United States Patent Application Publication US 2024/0066114 A1 - sequence listing, part 14

SEQ ID NO: 18518 - RNA, 876 nt, Artificial Sequence
  SARS-CoV-2__MT678839.1__non-structural protein 6 (NSP6) CDS gc
augagcgccgugaagcgcaccaucaagggcacccaccacuggcugcuccugacgauccugaccucccuccugguccuggugcagagcacccaguggucccucuucuucuucuucuacgagaacgccuuccugcccuucgcgauggggaucaucgccaugagcgccuucgccaugauguucgugaagcacaagcacgccuuccugugccucuuccugcugccgucccucgcgaccgucgccuacuucaacaugguguacaugcccgccagcugggugaugcggaucaugacguggcuggacauggucaucaccucccugagcggcuucaagcucaaggacugcgugauguacgccuccgcggugguccugcugauccucaugaccgcccgcaccguguacgacgacggggcccggcgcguguggacgcugaugaacguccugacccucguguacaagguguacuacggcaacgcccuggaccaggccaucagcaugugggcgcugaucaucuccgucaccagcaacuacuccgggguggugaccacggucauguuccucgcccggggcaucguguucaugugcguggaguacugccccaucuucuucaucaccggcaacacccugcagugcaucaugcuggucuacugcuuccucggguacuucugcacgugcuacuucggccuguucugccugcucaaccgcuacuuccggcugacccuggggguguacgacuaccucgugagcacccaggaguuccgcuacaugaacucccagggccugcugcccccgaagaacagcaucgacgccuucaagcucaacaucaagcugcugggggucggcggcaagcccugcaucaagguggccaccguccaguga

SEQ ID NO: 18519 - RNA, 876 nt, Artificial Sequence
  SARS-CoV-2__MT664169.1__non-structural protein 6 (NSP6) CDS gc
augagcgccgugaagcgcaccaucaagggcacccaccacuggcugcuccugacgauccugaccucccuccugguccuggugcagagcacccaguggucccucuucuucuuccuguacgagaacgccuuccugcccuucgcgauggggaccaucgccaugagcgccuucgccaugauguucgugaagcacaagcacgccuuccucugccuguuccugcucccgucccuggcgacggucgccuacuucaacaugguguacaugcccgccagcugggugaugcggaucaugaccuggcuggacauggucgacaccucccucagcggcuucaagcugaaggacugcgugauguacgccuccgcggugguccugcucauccugaugaccgcccgcacgguguacgacgacggggcccggcgcguguggacccugaugaacguccucacccugguguacaagguguacuacggcaacgcccuggaccaggccaucagcaugugggcgcucaucaucuccgucaccagcaacuacuccgggguggugacgaccgucauguuccuggcccggggcaucguguucaugugcguggaguacugccccaucuucuucaucaccggcaacacccugcagugcaucaugcucgucuacugcuuccugggguacuucugcacgugcuacuucggccuguucugccuccugaaccgcuacuuccggcugacccucgggguguacgacuaccuggugagcacccaggaguuccgcuacaugaacucccagggccugcugcccccgaagaacagcaucgacgccuucaagcucaacaucaagcugcucggggucggcggcaagcccugcaucaagguggccaccguccaguga

SEQ ID NO: 18520 - RNA, 876 nt, Artificial Sequence
  SARS-CoV-2__MT646087.1__non-structural protein 6 (NSP6) CDS gc
augagcgccgugaagcgcaccaucaagggcacccaccacuggcugcuccugacgauccugaccucccuccugguccuggugcagagcacccaguggucccucuucuucuuccuguacgagaacgccuuccugcccuucgcgauggggaucaucgccaugagcgccuucgccaugauguucgugaagcacaagcacgccuuccucugccuguuccugcucccgucccuggcgaccgucgccuacuucaacaugguguacaugcccgccagcugggugaugcggaucaugacguggcuggacauggucgacaccucccucagcggcuucaagcugaaggacugcgugauguacgccuccgcggugguccugcucauccugaugaccgcccgcaccguguacgacgacggggcccggcgcguguggacgcugaucaacguccucacccugguguacaagguguacuacggcaacgcccuggaccaggccaucagcaugugggcgcucaucaucuccgucaccagcaacuacuccgggguggugaccacggucauguuccuggcccggggcaucguguucaugugcguggaguacugccccaucuucuucaucaccggcaacacccugcagugcaucaugcucgucuacugcuuccugggguacuucugcacgugcuacuucggccuguucugccuccugaaccgcuacuuccggcugacccucgggguguacgacuaccuggugagcacccaggaguuccgcuacaugaacucccagggccugcugcccccgaagaacagcaucgacgccuucaagcucaacaucaagcugcucggggucggcggcaagcccugcaucaagguggccaccguccaguga

SEQ ID NO: 18521 - RNA, 876 nt, Artificial Sequence
  SARS-CoV-2__MT641533.1__non-structural protein 6 (NSP6) CDS gc
augagcgccgugaagcgcaccaucaagggcacccaccacuggcugcuccugacgauccugaccucccuccugguccuggugcagagcacccaguggucccucuucuucuuccuguacgagaacgccuuccugcccuucgcgauggggaucaucgccaugagcgccuucgccaugauguucgugaagcacaagcacgccuuccucugccuguuccugcucccgucccuggcgaccgucgccuacuucaacaugguguacaugcccgccagcugggugaugcggaucaugacguggcuggacauggucgacaccucccucagcggcuucaagcugaaggacugcgugauguacgccuccgcggugguccugcucauccugaugaccgcccgcaccguguacgacgacggggcccggcgcguguggacgcugaugaacguccucacccugguguacaagguguacuacggcaacgcccuggaccaggccaucuacaugugggcgcucaucaucagcgucaccuccaacuacagcgggguggugaccacggucauguuccuggcccggggcaucguguucaugugcguggaguacugccccaucuucuucaucaccggcaacacccugcagugcaucaugcucgucuacugcuuccugggguacuucugcacgugcuacuucggccuguucugccuccugaaccgcuacuuccggcugacccucgggguguacgacuaccugguguccacccaggaguuccgcuacaugaacagccagggccugcugcccccgaagaacuccaucgacgccuucaagcucaacaucaagcugcucggggucggcggcaagcccugcaucaagguggccaccguccaguga

SEQ ID NO: 18522 - RNA, 876 nt, Artificial Sequence
  SARS-CoV-2__MT641630.1__non-structural protein 6 (NSP6) CDS gc
augagcgccgugaagcgcaccaucaagggcacccaccacuggcugcuccugacgauccugaccucccuccugguccuggugcagagcacccaguggucccucuucuucuuccuguacgagaacgccuuccugcccuucgcgauggggaucaucgccaugagcgccuucgccaugauguucgugaagcacaagcacgccuuccucugccuguuccugcucccgucccuggcgaccgucgccuacuucaacaugguguacaugcccgccagcugggugaugcggaucaugacguggcuggacauggucgacaccucccucagcggcuucaagcugaaggacugcgugauguacgccuccgcggugguccugcucauccugaugaccgcccgcaccguguacgacgacggggcccggcgcguguggacgcugaugaacguccucacccugguguacaagguguacuacggcaacgcccuggaccaggccaucagcaugugggcgcucaucaucuccgucaccagcaacuacuccgggguggugaccacggucauguuccuggcccggggcaucguguucaugugcguggaguaccgccccaucuucuucaucaccggcaacacccugcagugcaucaugcucgucuacugcuuccugggguacuucugcacgugcuacuucggccuguucugccuccugaaccgguacuuccgccugacccucgggguguacgacuaccuggugagcacccaggaguuccgguacaugaacucccagggccugcugcccccgaagaacagcaucgacgccuucaagcucaacaucaagcugcucggggucggcggcaagcccugcaucaagguggccaccguccaguga

SEQ ID NO: 18523 - RNA, 876 nt, Artificial Sequence
  SARS-CoV-2__MT641677.1__non-structural protein 6 (NSP6) CDS gc
augagcgccgugaagcgcaccaucaagggcacccaccacuggcugcuccugacgauccugaccucccuccugguccuggugcagagcacccaguggucccucuucuucuuccuguacgagaacgccuuccugcccuucgcgauggggaucaucgccaugagcgccuucgccaugauguucgugaagcacaagcacgccuuccucugccuguuccugcucccgucccuggcgaccgucgccuacuucaacaugguguacaugcccgccagcugggugaugcggaucaugacguggcuggacauggucgacaccucccucagcggcuucaagcugaaggacugcgugauguacgccuccgcggugguccugcucauccugaugaccgcccgcaccguguacgacgacggggcccggcgcguguggacgcugaugaacguccucacccugguguacaagguguacuacggcaacgcccuggaccaggccaucagcaugugggcgcucaucaucuccgucaccagcaacuacuccgggguggugaccacggucauguuccuggcccgggugaucguguucaugugcgucgaguacugccccaucuucuucaucaccggcaacacccugcagugcaucaugcucguguacugcuuccugggcuacuucugcacgugcuacuucgggcuguucugccuccugaaccgcuacuuccggcugacccucggcguguacgacuaccuggucagcacccaggaguuccgcuacaugaacucccaggggcugcugcccccgaagaacagcaucgacgccuucaagcucaacaucaagcugcucggcgucgggggcaagcccugcaucaagguggccaccgugcaguga

SEQ ID NO: 18524 - RNA, 876 nt, Artificial Sequence
  SARS-CoV-2__MT642305.1__non-structural protein 6 (NSP6) CDS gc
augagcgccgugaagcgcaccaucaagggcacccaccacuggcugcuccugacgauccugaccucccuccugguccuggugcagagcacccaguggucccucuucuucuucuucuacgagaacgccuuccugcccuucgcgauggggaucaucgccaugagcgccuucgccaugauguucgugaagcacaagcacgccuuccugugccucuuccugcugccgucccucgcgaccgucgccuacuucaacaugguguacaugcccgccagcugggugaugcggaucaugacguggcuggacauggucgacaccucccugagcggcuucaagcucaaggacugcgugauguacgccuccgcggugguccugcugauccucaugaccgcccgcaccguguacgacgacggggcccggcgcguguggacgcugaugaacguccugacccucguguacaaguucuacuacggcaacgcccuggaccaggccaucagcaugugggcgcugaucaucuccgugaccagcaacuacuccggggucgugaccacggugauguuccucgcccggggcaucgucuucaugugcguggaguacugccccaucuucuucaucaccggcaacacccugcagugcaucaugcugguguacugcuuccucggguacuucugcacgugcuacuucggccuguucugccugcucaaccgcuacuuccggcugacccugggggucuacgacuaccucgugagcacccaggaguuccgcuacaugaacucccagggccugcugcccccgaagaacagcaucgacgccuucaagcucaacaucaagcugcugggggugggcggcaagcccugcaucaaggucgccaccgugcaguga

SEQ ID NO: 18525 - RNA, 876 nt, Artificial Sequence
  SARS-CoV-2__MT635270.1__non-structural protein 6 (NSP6) CDS gc
augagcgccgugaagcgcaccaucaagggcacccaccacuggcugcuccugacgauccugaccucccuccugguccuggugcagagcacccaguggucccucuucuucuuccuguacgagaacgccuuccugcccuucgcgauggggaucaucgccaugagcgccuucgccaugauguucgugaagcacaagcacgccuuccucugccuguuccugcucccgucccuggcgaccgucgccuacuucaacaugguguacaugcccgccagcugggugaugcggaucaugacguggcuggacauggucgacaccucccucagcggcuucaagcugaaggacugcgugauguacgccuccgcggugguccugcucauccugaugaccgcccgcaccguguacgacgacggggcccggcgcguguggacgcugaugaacguccucacccugguguacaagguguacuacggcaacgcccuggaccaggccaucagcaugugggcgcucaucaucuccgucaccagcaacuacuccgggguggugaccacggucauguuccuggcccggggcaucuucuucaugugcguggaguacugccccaucuucuucaucaccggcaacacccugcagugcaucaugcucguguacugcuuccugggguacuucugcacgugcuacuucggccuguucugccuccugaaccgcuacuuccggcugacccucggggucuacgacuaccuggugagcacccaggaguuccgcuacaugaacucccagggccugcugcccccgaagaacagcaucgacgccuucaagcucaacaucaagcugcucggggugggcggcaagcccugcaucaaggucgccaccgugcaguga

SEQ ID NO: 18526 - RNA, 876 nt, Artificial Sequence
  SARS-CoV-2__MT627427.1__non-structural protein 6 (NSP6) CDS gc
augagcgccgugaagcgcaccaucaagggcacccaccacuggcugcuccugacgauccugaccucccuccugguccuggugcagagcacccaguggucccucuucuucuucuucuacgagaacgccuuccugcccuucagcauggggaucaucgcgauguccgccuucgccaugauguucgugaagcacaagcacgccuuccugugccucuuccugcugccgagccucgccaccgucgcguacuucaacaugguguacaugcccgccuccugggugaugcggaucaugacguggcuggacauggucgacaccagccuguccggcuucaagcucaaggacugcgugauguacgccagcgccgugguccugcugauccucaugaccgcgcgcaccguguacgacgacggggcccggcgcguguggacgcugaugaacguccugacccucguguacaagguguacuacggcaacgcccuggaccaggccaucuccaugugggcccugaucaucagcgucaccuccaacuacagcgggguggugaccacggucauguuccucgcgcggggcaucguguucaugugcguggaguacugccccaucuucuucaucaccggcaacacccugcagugcaucaugcuggucuacugcuuccucggguacuucugcacgugcuacuucggccuguucugccugcucaaccgcuacuuccggcugacccuggggguguacgacuaccucguguccacccaggaguuccgcuacaugaacagccagggccugcugcccccgaagaacuccaucgacgccuucaagcucaacaucaagcugcugggggucggcggcaagcccugcaucaagguggccaccguccaguga

SEQ ID NO: 18527 - RNA, 876 nt, Artificial Sequence
  SARS-CoV-2__MT632596.1__non-structural protein 6 (NSP6) CDS gc
augagcgccgugaagcgcaccaucaagggcacccaccacuggcugcuccugacgauccugaccucccuccugguccuggugcagagcacccaguggucccucuucuucuuccuguacgagaacgccuuccugcccuucgcgauggggaucaucgccaugagcgccuucgccaugauguucgugaagcacaagcacgccuuccucugccuguuccugcucccgucccuggcgaccgucgccuacuucaacaugguguacaugcccgccagcugggugaugcggaucaugacguggcuggacauggucgacaccucccucagcggcuucaagcugaaggacugcgugauguacgccuccgcggugguccugcucauccugaugaccgcccgcaccguguacgacgacggggcccggcgcguguggacgcugaugaacguccucacccugguguacaagguguacuacggcaacgcccuggaccaggccaucagcaugugggcgcucaucaucuccgucaccagcaacuacuccgggguggugaccacggucauguuccuggcccggggcaucguguucaugugcguggaguacugccccaucuucuucaucaccggcaacacccugcagugcaucaugcucgucuacugcuuccugggguacuucugcacgugcuacuucggccuguucugccuccugaaccgcuacuuccggcugacccucgggguguacgacuaccuggugagcacccaggaguuccgcuacaugaacucccagggccugcugcccccgaagaacagcaucgacgccuucaagcucaacgucaagcugcucggggugggcggcaagcccugcaucaaggucgccaccgugcaguga

SEQ ID NO: 18528 - RNA, 876 nt, Artificial Sequence
  SARS-CoV-2__MT632820.1__non-structural protein 6 (NSP6) CDS gc
augagcgccgugaagcgcaccaucaagggcacccaccacuggcugcuccugacgauccugaccucccuccugguccuggugcagagcacccaguggucccucuucuucuuccuguacgagaacgccuuccugcccuucgcgauggggaucaucgccaugagcgccuucgccaugauguucgugaagcacaagcacgccuuccucugccuguuccugcucccgucccuggcgaccgucgccuacuucaacaugguguacaugcccgccagcugggugaugcggaucaugacguggcuggacauggucgacaccucccucagcggcuucaagcugaaggacugcgugauguacgccuccgcggugguccugcucauccugaugaccgcccgcaccguguacgacgacggggcccggcgcguguggacgcugaugaacguccucacccugguguacaagguguacuacggcaacgcccuggaccaggccaucagcaugugggcgcucaucaucuccgucaccagcaacuacuccgggguggugaccacggucauguuccuggcccggggcaucguguucaugugcguggaguacugccccaucuucuucaucaccggcaacacccugcgcugcaucaugcucgucuacugcuuccugggguacuucugcacgugcuacuucggccuguucugccuccugaaccgguacuuccgccugacccucgggguguacgacuaccuggugagcacccaggaguuccgguacaugaacucccagggccugcugcccccgaagaacagcaucgacgccuucaagcucaacaucaagcugcucggggucggcggcaagcccugcaucaagguggccaccguccaguga

SEQ ID NO: 18529 - RNA, 876 nt, Artificial Sequence
  SARS-CoV-2__MT614531.1__non-structural protein 6 (NSP6) CDS gc
augagcgccgugaagcgcaccaucaagggcacccaccacuggcugcuccugacgauccugaccucccuccugguccuggugcagagcacccaguggucccucuucuucuuccuguacgagaacgccuuccugcccuucgcgauggggaucaucgccaugagcgccuucgccaccauguucgugaagcacaagcacgccuuccucugccuguuccugcucccgucccuggcgacggucgccuacuucaacaugguguacaugcccgccagcugggugaugcggaucaugaccuggcuggacauggucgacaccucccucagcggcuucaagcugaaggacugcgugauguacgccuccgcggugguccugcucauccugaugaccgcccgcacgguguacgacgacggggcccggcgcguguggacccugaugaacguccucacccugguguacaagguguacuacggcaacgcccuggaccaggccaucagcaugugggcgcucaucaucuccgucaccagcaacuacuccgggguggugacgaccgucauguuccuggcccggggcaucguguucaugugcguggaguacugccccaucuucuucaucaccggcaacacccugcagugcaucaugcucgucuacugcuuccugggguacuucugcacgugcuacuucggccuguucugccuccugaaccgcuacuuccggcugacccucgggguguacgacuaccuggugagcacccaggaguuccgcuacaugaacucccagggccugcugcccccgaagaacagcaucgacgccuucaagcucaacaucaagcugcucggggucggcggcaagcccugcaucaagguggccaccguccaguga

SEQ ID NO: 18530 - RNA, 876 nt, Artificial Sequence
  SARS-CoV-2__MT609566.1__non-structural protein 6 (NSP6) CDS gc
augagcgccgugaagcgcaccaucaagggcacccaccacuggcugcuccugacgauccugaccucccuccugguccuggugcagagcacccaguggucccucuucuucuuccuguacgagaacgccuuccugcccuucgcgauggggaucaucgccaugagcgccuucgccaugauguucgugaagcacaagcacgccuuccucugccuguuccugcucccgucccuggcgaccgucgccuacuucaacaugguguacaugcccgccagcugggugaugcggaucaugacguggcuggacauggucgacaccucccucagcggcuucaagcugaaggacugcgugauguacgccuccgcggugguccugcucauccugaugaccgugcgcaccguguacgacgacggggcccggcgcgucuggacgcugaugaacgugcucacccugguguacaaggucuacuacggcaacgcccuggaccaggccaucagcaugugggcccucaucaucuccgugaccagcaacuacuccgggguggucaccacggugauguuccuggcgcggggcaucguguucaugugcgucgaguacugccccaucuucuucaucaccggcaacacccugcagugcaucaugcucguguacugcuuccugggguacuucugcacgugcuacuucggccuguucugccuccugaaccgcuacuuccggcugacccucgggguguacgacuaccuggucagcacccaggaguuccgcuacaugaacucccagggccugcugcccccgaagaacagcaucgacgccuucaagcucaacaucaagcugcucggggugggcggcaagcccugcaucaaggucgccaccgugcaguga

SEQ ID NO: 18531 - RNA, 876 nt, Artificial Sequence
  SARS-CoV-2__MT585032.1__non-structural protein 6 (NSP6) CDS gc
augagcgccgugaagcgcaccaucaagggcacccaccacuggcugcuccugacgauccugaccucccuccugguccuggugcagagcacccaguggucccucuucuucuuccuguacgagaacgccuuccugcccuucgcgauggggaucaucgccaugagcgccuucgccaugauguucgugaagcacaagcacgccuuccucugccuguuccugcucccgucccuggcgaccgucgccuacuucaacaugguguacaugcccgccagcugggugaugcggaucaugacguggcuggacauggucgacaccucccucagcggcuucaagcugaaggacugcgugauguacgccuccgcggugguccugcucauccugaugaccgcccgcaccguguacgacgacggggcccggcgcguguggacgcugaugaacguccucacccugguguacaagguguacuacggcagcgcccuggaccaggccaucuccaugugggcgcucaucaucagcgucaccuccaacuacagcgggguggugaccacggucauguuccuggcccggggcaucguguucaugugcguggaguacugccccaucuucuucaucaccggcaacacccugcagugcaucaugcucgucuacugcuuccugggguacuucugcacgugcuacuucggccuguucugccuccugaaccgcuacuuccggcugacccucgggguguacgacuaccugguguccacccaggaguuccgcuacaugaacagccagggccugcugcccccgaagaacuccaucgacgccuucaagcucaacaucaagcugcucggggucggcggcaagcccugcaucaagguggccaccguccaguga

SEQ ID NO: 18532 - RNA, 876 nt, Artificial Sequence
  SARS-CoV-2__MT585090.1__non-structural protein 6 (NSP6) CDS gc
augagcgccgugaagcgcaccaucaagggcacccaccacuggcugcuccugacgauccugaccucccuccugguccuggugcagagcacccaguggucccucuucuucuuccuguacgagaacgccuuccugcccuucgcgauggggaucaucgccaugagcgccuucgccaugauguucgugaagcacaagcacgccuuccucugccuguuccugcucccgucccuggcgaccgucgccuacuucaacaugguguacaugcccgccagcugggugaugcggaucaugacguggcugggcauggucgacaccucccucagcggguucaagcugaaggacugcgugauguacgccuccgcggugguccugcucauccugaugaccgcccgcaccguguacgacgacggcgcccggcgcguguggacgcugaugaacguccucacccugguguacaagguguacuacgggaacgcccuggaccaggccaucagcaugugggcgcucaucaucuccgucaccagcaacuacuccggcguggugaccacggucauguuccuggcccggggcaucguguucaugugcguggaguacugccccaucuucuucaucaccgggaacacccugcagugcaucaugcucgucuacugcuuccugggcuacuucugcacgugcuacuucgggcuguucugccuccugaaccgcuacuuccggcugacccucggcguguacgacuaccuggugagcacccaggaguuccgcuacaugaacucccaggggcugcugcccccgaagaacagcaucgacgccuucaagcucaacaucaagcugcucggcgucggcgggaagcccugcaucaagguggccaccguccaguga

SEQ ID NO: 18533 - RNA, 876 nt, Artificial Sequence
  SARS-CoV-2__MT576056.1__non-structural protein 6 (NSP6) CDS gc
augagcgccgugaagcgcaccaucaagggcacccaccacuggcugcuccugacgauccugaccucccuccugguccuggugcagagcacccaguggucccucuucuucuuccuguacgagaacgccuuccugcccuucgcgauggggaucaucgccaugagcgccuucgccaugauguucgugaagcacaagcacgccuuccucugccuguuccugcucccgucccuggcgaccgucgccuacuucaacaugguguacaugcccgccagcugggugaugcggaucaugacguggcuggacauggucgacaccucccucagcggcuucaagcugaaggacugcgugauguacgccuccgcggugguccugcucauccugaugaccgcccgcaccguguacgacgacggggcccggcgcguguggacgcugaugaacguccucacccugguguacaagguguacuacggcaacgcccuggaccaggccaccagcaugugggcgcucaucaucuccgucaccagcaacuacuccgggguggugacgaccgucauguuccuggcccggggcaucguguucaugugcguggaguacugccccaucuucuucaucaccggcaacacccugcagugcaucaugcucgucuacugcuuccugggguacuucugcacgugcuacuucggccuguucugccuccugaaccgcuacuuccggcugacccucgggguguacgacuaccuggugagcacccaggaguuccgcuacaugaacucccagggccugcugcccccgaagaacagcaucgacgccuucaagcucaacaucaagcugcucggggucggcggcaagcccugcaucaagguggccaccguccaguga

SEQ ID NO: 18534 - RNA, 876 nt, Artificial Sequence
  SARS-CoV-2__MT520221.1__non-structural protein 6 (NSP6) CDS gc
augagcgccgugaagcgcaccaucaagggcacccaccacuggcugcuccugacgauccugaccucccuccugguccuggugcagagcacccaguggucccucuucuucuuccuguacgagaacgccuuccugcccuucgcgauggggaucaucgccaugagcgccuucgccaugauguucgugaagcacaagcacgccuuccucugccuguuccugcucccgucccuggcgaccgucgccuacuucaacaugguguacaugcccgccagcugggugaugcggaucaugacguggcuggacauggucgacaccucccucagcggcuucaagcugaaggacugcgugauguacgccuccgcggugguccugcucauccugaugaccgcccgcaccguguacgacgacggggcccggcgcguguggacgcugaugaacguccucacccugguguacaagguguacuacggcaacgcccuggaccaggccaucagcaugugggcgcucaucaucuccgucaccagcaacuacuccgggguggugaccacggucauguucagcgcccggggcaucguguucaugugcguggaguacugccccaucuucuucaucaccggcaacacccugcagugcaucaugcuggucuacugcuuccucggguacuucugcacgugcuacuucggccuguucugccugcucaaccgcuacuuccggcugacccuggggguguacgacuaccucguguccacccaggaguuccgcuacaugaacagccagggccugcugcccccgaagaacuccaucgacgccuucaagcucaacaucaagcugcugggggucggcggcaagcccugcaucaagguggccaccguccaguga

SEQ ID NO: 18535 - RNA, 876 nt, Artificial Sequence
  SARS-CoV-2__MT520402.1__non-structural protein 6 (NSP6) CDS gc
augagcgccgugaagcgcaccaucaagggcacccaccacuggcugcuccugacgauccugaccucccuccugguccuggugcagagcacccaguggucccucuucuucuuccuguacgagaacgccuuccugcccuucgcgauggggaucaucgccaugagcgccuucgccaugauguucgugaagcacaagcacgccuuccucugccuguuccugcucccgucccuggcgaccgucgccuacuucaacaugguguacaugcccgccagcugggugaugcggaucaugacguggcuggacauggucgacaccucccucagcggcuucaagcugaaggacugcgugauguacgccuccgcggugguccugcucauccugaugaccgcccgcaccguguacgacgacggggcccggcgcguguggacgcugaugaacguccucacccugguguacaagguguacuacggcaacgcccuggaccaggccaucagcaugugggcgcucaucaucuccgucaccagcaacuacuccgggguggugaccacggucauguuccuggcccggggcgugguguucaugugcgucgaguacugccccaucuucuucaucaccggcaacacccugcagugcaucaugcucguguacugcuuccugggguacuucugcacgugcuacuucggccuguucugccuccugaaccgcuacuuccggcugacccucgggguguacgacuaccuggucagcacccaggaguuccgcuacaugaacucccagggccugcugcccccgaagaacagcaucgacgccuucaagcucaacaucaagcugcucggggugggcggcaagcccugcaucaaggucgccaccgugcaguga

SEQ ID NO: 18536 - RNA, 876 nt, Artificial Sequence
  SARS-CoV-2__MT520437.1__non-structural protein 6 (NSP6) CDS gc
augagcgccgugaagcgcaccaucaagggcacccaccacuggcugcuccugacgauccugaccucccuccugguccuggugcagagcacccaguggucccucuucuucuucuucuacgagaacgccuuccugcccuucgcgauggggaucaucgccaugagcgccuucgccaugauguucgugaagcacaagcacgccuuccugugccucuuccugcugccgucccucgcgaccgucgccuacuucaacaugguguacaugcccgccagcugggugaugcggaucaugacguggcuggacauggucgacaccucccugagcggcuucaagcucaaggacugcgugauguacgccuccgcggugguccugcugauccucaugaccgcccgcaccguguacgacgacggggcccggcgcguguggacgcugaugaacguccugacccucguguacaagguguacuacggcaacgcccuggaccaggccaucagcaugugggcgcugaucaucuccgucaccagcaacuacuccgggguggugaccacggucauguuccucgcccggagcaucguguucaugugcguggaguacugccccaucuucuucaucaccggcaacacccugcagugcaucaugcuggucuacugcuuccucggcuacuucugcacgugcuacuucgggcuguucugccugcucaaccgcuacuuccggcugacccugggcguguacgacuaccucguguccacccaggaguuccgcuacaugaacagccaggggcugcugcccccgaagaacuccaucgacgccuucaagcucaacaucaagcugcugggcgucgggggcaagcccugcaucaagguggccaccguccaguga

SEQ ID NO: 18537 - RNA, 876 nt, Artificial Sequence
  SARS-CoV-2__MT558680.1__non-structural protein 6 (NSP6) CDS gc
augagcgccgugaagcgcaccaucaagggcacccaccacuggcugcuccugacgauccugaccucccuccugguccuggugcagagcacccaguggucccucuucuucuuccuguacgagaacgccuuccugcccuucgcgauggggaucaucgccaugagcgccuucgccaugauguucgugaagcacaagcacgccuuccucugccuguuccugcucccgucccuggcgaccgucgccuacuucaacaugguguacaugcccgccagcugggugaugcggaucaugacguggcuggacauggucgacaccucccucagcggcuucaagcugaaggacugcgugauguacgccuccgcggugguccugcucauccugaugaccgcccgcaccguguacgacgacggggcccggcgcguguggacgcugaugaacguccucacccugguguacaagguguacuacggcaacgcccuggaccaggccaucagcaugugggcgcucaucaucuccgucaccagcaacuacuccgggguggugaccacggucauguuccuggcccggggcaucguguucaugugcguggaguacugccccaucuucuucaucaccggcaacacccugcagugcaucaugcucgucuacugcuuccugggguacuucugcacgugcuacuucggccuguucugccuccugaaccgcuacuuccggcugacccucgggguguacgacuaccuggugagcacccaggaguuccgcuacaugaacucccagggccugcugcccccgaagaacagcaucgacgccuucaagcucaacaucaagcugcucggggucggcggcaagcccugcaucaagguggccaucguccaguga

SEQ ID NO: 18538 - RNA, 876 nt, Artificial Sequence
  SARS-CoV-2__MT539174.1__non-structural protein 6 (NSP6) CDS gc
augagcgccgugaagcgcaccaucaagggcacccaccacuggcugcuccugacgauccugaccucccuccugguccuggugcagagcacccaguggucccucuucuucuuccuguacgagaacgccuuccugcccuucgcgauggggaucaucgccaugagcgccuucgccaugauguucgugaagcacaagcacgccuuccucugccuguuccugcucccgucccuggcgaccgucgccuacuucaacaugguguacaugcccgccagcugggugaugcggaucaugacguggcuggacauggucgacaccucccucagcggcuucaagcugaagaacugcgugauguacgccuccgcggugguccugcucauccugaugaccgcccgcaccguguacgacgacggggcccggcgcguguggacgcugaugaacguccucacccugguguacaagguguacuacggcaacgcccuggaccaggccaucagcaugugggcgcucaucaucuccgucaccagcaacuacuccgggguggugaccacggucauguuccuggcccggggcaucguguucaugugcguggaguacugccccaucuucuucaucaccggcaacacccugcagugcaucaugcucgucuacugcuuccugggguacuucugcacgugcuacuucggccuguucugccuccugaaccgcuacuuccggcugacccucgggguguacgacuaccuggugagcacccaggaguuccgcuacaugaacucccagggccugcugcccccgaagaacagcaucgacgccuucaagcucaacaucaagcugcucggggucggcggcaagcccugcaucaagguggccaccguccaguga

SEQ ID NO: 18539 - RNA, 876 nt, Artificial Sequence
  SARS-CoV-2__MT461620.1__non-structural protein 6 (NSP6) CDS gc
augagcgccgugaagcgcaucaucaagggcacccaccacuggcugcuccugaccauccugacgucccuccugguccuggugcagagcacccaguggucccucuucuucuuccuguacgagaacgccuuccugcccuucgcgauggggaucaucgccaugagcgccuucgccaugauguucgugaagcacaagcacgccuuccucugccuguuccugcucccgucccuggcgaccgucgccuacuucaacaugguguacaugcccgccagcugggugaugcggaucaugaccuggcuggacauggucgacacgucccucagcggcuucaagcugaaggacugcgugauguacgccuccgcggugguccugcucauccugaugaccgcccgcaccguguacgacgacggggcccggcgcguguggacccugaugaacguccucacgcugguguacaagguguacuacggcaacgcccuggaccaggccaucagcaugugggcgcucaucaucuccgucaccagcaacuacuccgggguggugaccaccgucauguuccuggcccggggcaucguguucaugugcguggaguacugccccaucuucuucaucacgggcaacacccugcagugcaucaugcucgucuacugcuuccugggguacuucugcacgugcuacuucggccuguucugccuccugaaccgcuacuuccggcugacccucgggguguacgacuaccuggugagcacccaggaguuccgcuacaugaacucccagggccugcugcccccgaagaacagcaucgacgccuucaagcucaacaucaagcugcucggggucggcggcaagcccugcaucaagguggccaccguccaguga

SEQ ID NO: 18540 - RNA, 876 nt, Artificial Sequence
  SARS-CoV-2__MT461630.1__non-structural protein 6 (NSP6) CDS gc
augagcgccgugaagcgcaccaucaagggcacccaccacuggcugcuccugacgauccugaccucccuccugguccuggugcagagcacccaguggucccucuucuucuuccuguacgagaacgccuuccugcccuucgcgauggggaucaucgccaugagcgccuucgccaugauguucgugaagcacaagcacgccuuccucugccuguuccugcucccgucccuggcgaccgucgccuacuucaacaugguguacaugcccgccagcugggugaugcggaucaugacguggcuggacauggucgacaccucccucagcggcuucaagcugaaggacugcgugauguacgccuccgcggugguccugcucauccugaugaccgcccgcaccguguacgacgacggggcccggcgcguguggacgcugaugaacguccucacccugguguacaagguguacuacggcaacgcccuggaccaggccaucagcaugugggcgcucaucaucuccgucaccagcaacuacuccgggguggugaccacggucauguuccuggcccggggcaucguguucaugugcguggaguacugccccaucuucuucaucaccggcaacacccugcagugcaucaugcucgucuacugcuuccugggguacuucugcacgugcuacuucggccuguucugccuccugaaccgcuacuuccggcugacccucgggguguacgacuaccuggugagcacccaggaguuccgcuacaugaacucccagggccugcugcccccgaagaacagcaucgacgccuucaagcucaacaucaagcugcucggggucuccggcaagcccugcaucaagguggccaccguccaguga

SEQ ID NO: 18541 - RNA, 876 nt, Artificial Sequence
  SARS-CoV-2__MT451074.1__non-structural protein 6 (NSP6) CDS gc
augagcgccgugaagcgcaccaucaagggcacccaccacuggcugcuccugacgauccugaccucccuccugguccuggugcagagcacccaguggucccucuucuucuucuucuacgagaacgccuuccugcccuucgcgauggggaucaucgccaugagcgccuucgccaugauguucgugaagcacaagcacgccuuccugugccucuuccugcugccgucccucgcgaccgucgccuacuucaacaugguguacaugcccgccagcugggugaugcggaucaugacguggcuggacauggucgacaccucccugagcggcuucaagcucaaggacugcgugauguacgccuccgcggugguccugcugauccucaugaccgcccgcaccguguacgacgacguggcccggcgcgucuggacgcugaugaacgugcugacccucguguacaaggucuacuacgggaacgcccuggaccaggccaucagcaugugggcgcugaucaucuccgugaccagcaacuacuccggcguggucaccacggugauguuccucgcccgggggaucguguucaugugcgucgaguacugccccaucuucuucaucaccggcaacacccugcagugcaucaugcugguguacugcuuccucggcuacuucugcacgugcuacuucgggcuguucugccugcucaaccgcuacuuccggcugacccugggcguguacgacuaccucgucagcacccaggaguuccgcuacaugaacucccaggggcugcugcccccgaagaacagcaucgacgccuucaagcucaacaucaagcugcugggcgucgggggcaagcccugcaucaagguggccaccgugcaguga

SEQ ID NO: 18542 - RNA, 876 nt, Artificial Sequence
  SARS-CoV-2__MT434803.1__non-structural protein 6 (NSP6) CDS gc
augagcgccgugaagcgcaccaucaagggcacccaccacuggcugcuccugacgauccugaccucccuccugguccuggugcagagcacccaguggucccucuucuucuuccuguacgagaacgccuuccugcccuucgcgauggggaucaucgccaugagcgccuucgccaugauguucgugaagcacaagcacgccuuccucugccuguuccugcucccgucccuggcgaccgucgccuacuucaacaugguguacaugcccgccagcugggugaugcggaucaugacguggcuggacauggucgacaccucccucagcuccuucaagcugaaggacugcgugauguacgccagcgcggugguccugcucauccugaugaccgcccgcaccguguacgacgacggcgcccggcgcguguggacgcugaugaacguccucacccugguguacaagguguacuacgggaacgcccuggaccaggccaucuccaugugggcgcucaucaucagcgucaccuccaacuacagcggcguggugaccacggucauguuccuggcccgggggaucguguucaugugcguggaguacugccccaucuucuucaucaccggcaacacccugcagugcaucaugcucgucuacugcuuccugggcuacuucugcacgugcuacuucgggcuguucugccuccugaaccgcuacuuccggcugacccucggcguguacgacuaccugguguccacccaggaguuccgcuacaugaacagccaggggcugcugcccccgaagaacuccaucgacgccuucaagcucaacaucaagcugcucggcgucgggggcaagcccugcaucaagguggccaccguccaguga

SEQ ID NO: 18543 - RNA, 876 nt, Artificial Sequence
  SARS-CoV-2__MT434813.1__non-structural protein 6 (NSP6) CDS gc
augagcgccgugaagcgcaccaucaagggcacccaccacuggcugcuccugacgauccugaccucccuccugguccuggugcagagcacccaguggucccucuucuucuuccuguacgagaacgccuuccugcccuucgcgauggggaucaucgccaugagcgccuucgccaugauguucgugaagcacaagcacgccuuccucugccuguuccugcucccgucccuggcgaccgucgccuacuucagcaugguguacaugcccgccuccugggugaugcggaucaugacguggcuggacauggucgacaccagccucuccggcuucaagcugaaggacugcgugauguacgccagcgcggugguccugcucauccugaugaccgcccgcaccguguacgacgacggggcccggcgcguguggacgcugaugaacguccucacccugguguacaagguguacuacggcaacgcccuggaccaggccaucuccaugugggcgcucaucaucagcgucaccuccaacuacagcgggguggugaccacggucauguuccuggcccggggcaucguguucaugugcguggaguacugccccaucuucuucaucaccggcaacacccugcagugcaucaugcucgucuacugcuuccugggguacuucugcacgugcuacuucggccuguucugccuccugaaccgcuacuuccggcugacccucgggguguacgacuaccugguguccacccaggaguuccgcuacaugaacagccagggccugcugcccccgaagaacuccaucgacgccuucaagcucaacaucaagcugcucggggucggcggcaagcccugcaucaagguggccaccguccaguga

SEQ ID NO: 18544 - RNA, 876 nt, Artificial Sequence
  SARS-CoV-2__MT385437.1__non-structural protein 6 (NSP6) CDS gc
augagcgccgugaagcgcaccaucaagggcacccaccacuggcugcuccugacgauccugaccucccuccugguccuggugcagagcacccaguggucccucuucuucuuccuguacgagaacgccuuccugcccuucgcgauggggaucaucgccaugagcgccuucgccaugauguucgugaagcacaagcacgccuuccucugccuguuccugcucccgucccuggcgaccgucgccuacuucaacaugguguacaugcccgccagcugggugaugcggaucaugacguggcuggacauggucgacaccucccucagcggcuucaagcugaaggacugcgugauguacgccuccgcggugguccugcucauccugaugaccgcccgcaccguguacgacgacagcgcccggcgcguguggacgcugaugaacguccucacccugguguacaagguguacuacgggaacgcccuggaccaggccaucuccaugugggcgcucaucaucagcgucaccuccaacuacagcggcguggugaccacggucauguuccuggcccgggggaucguguucaugugcguggaguacugccccaucuucuucaucaccggcaacacccugcagugcaucaugcucgucuacugcuuccugggcuacuucugcacgugcuacuucgggcuguucugccuccugaaccgcuacuuccggcugacccucggcguguacgacuaccugguguccacccaggaguuccgcuacaugaacagccaggggcugcugcccccgaagaacuccaucgacgccuucaagcucaacaucaagcugcucggcgucgggggcaagcccugcaucaagguggccaccguccaguga

SEQ ID NO: 18545 - RNA, 876 nt, Artificial Sequence
  SARS-CoV-2__MT358678.1__non-structural protein 6 (NSP6) CDS gc
augagcgccgugaagcgcaccaucaagggcacccaccacuggcugcuccugacgauccugaccucccuccugguccuggugcagagcacccaguggucccucuucuucuuccuguacgagaacgccuuccugcccuucgcgauggggaucaucgccaugagcgccuucgccaugauguucgugaagcacaagcacgccuuccucugccuguuccugcucccgucccuggcgaccgucgccuacuucaacaugguguacaugcccgccagcugggugaugcggaucaugacguggcuggacauggucgacaccucccucagcggcuucaagcugaaggacugcgugauguacgccuccgcggugguccugcucauccugaugaccgcccgcaccguguacgacgacggggcccggcgcguguggacgcugaugaacguccucacccugguguacaagguguacuacggcaacgcccuggaccaggccaucagcaugugggcgcucaucaucuccgucaccagcaacuacuccgggguggugaccacggucauguuccuggcccggggcaucguguucaugugcguggaguacugccccaucuucuucaucaccggcaacacccugcagugcaucaugcucgucuacugcuuccugggguacuucugcacgugcuacuucggccuguucugccuccugaaccgcuacuuccggcugacccucgggguguacgacuaccuggugagcacccaggaguuccgcuacaugaacucccugggccuccugcccccgaagaacagcaucgacgccuucaagcugaacaucaagcuccugggggucggcggcaagcccugcaucaagguggccaccguccaguga

SEQ ID NO: 18546 - RNA, 876 nt, Artificial Sequence
  SARS-CoV-2__MT358402.1__non-structural protein 6 (NSP6) CDS gc
augagcgccgugaagcgcaccaucaagggcacccaccacuggcugcuccugacgauccugaccucccuccugguccuggugcagagcacccaguggucccucuucuucuuccuguacgagaacgccuuccugcccuucgcgauggggaucaccgccaugagcgccuucgccaugauguucgugaagcacaagcacgccuuccucugccuguuccugcucccgucccuggcgacggucgccuacuucaacaugguguacaugcccgccagcugggugaugcggaucaugaccuggcuggacauggucgacaccucccucagcggcuucaagcugaaggacugcgugauguacgccuccgcggugguccugcucauccugaugaccgcccgcacgguguacgacgacggggcccggcgcguguggacccugaugaacguccucacccugguguacaagguguacuacggcaacgcccuggaccaggccaucagcaugugggcgcucaucaucuccgucaccagcaacuacuccgggguggugacgaccgucauguuccuggcccggggcaucguguucaugugcguggaguacugccccaucuucuucaucaccggcaacacccugcagugcaucaugcucgucuacugcuuccugggguacuucugcacgugcuacuucggccuguucugccuccugaaccgcuacuuccggcugacccucgggguguacgacuaccuggugagcacccaggaguuccgcuacaugaacucccagggccugcugcccccgaagaacagcaucgacgccuucaagcucaacaucaagcugcucggggucggcggcaagcccugcaucaagguggccaccguccaguga

SEQ ID NO: 18547 - RNA, 876 nt, Artificial Sequence
  SARS-CoV-2__MT326071.1__non-structural protein 6 (NSP6) CDS gc
augagcgccgugaagcgcaccaucaagggcacccaccacuggcugcuccugacgauccugaccucccuccugguccuggugcagagcacccaguggucccucuucuucuuccuguacgagaacgccuuccugcccuucgcgauggggaucaucgccaugagcgccuucgccaugauguucgugaagcacaagcacgccuuccucugccuguuccugcucccgucccuggcgaccgucgccuacuucaacaugguguacaugcccgccagcugggugaugcggaucaugacguggcuggacaccucccucagcggcuucaagcugaaggacugcgucauguacgccuccgcgguggugcugcucauccugaugaccgcccgcaccgucuacgacgacggggcccggcgcguguggacgcugaugaacgugcucacccuggucuacaagguguacuacggcaacgcccuggaccaggccaucagcaugugggcgcucaucaucuccgugaccagcaacuacuccggggucgugaccacggugauguuccuggcccggggcaucgucuucaugugcguggaguacugccccaucuucuucaucaccggcaacacccugcagugcaucaugcucguguacugcuuccugggguacuucugcacgugcuacuucggccuguucugccuccugaaccgcuacuuccggcugacccucggggucuacgacuaccuggugagcacccaggaguuccgcuacaugaacucccagggccugcugcccccgaagaacagcaucgacgccuucaagcucaacaucaagcugcucggggugggcggcaagcccugcaucaaggucgccaccgugcaguccaagauguga

SEQ ID NO: 18548 - RNA, 876 nt, Artificial Sequence
  SARS-CoV-2__MT326117.1__non-structural protein 6 (NSP6) CDS gc
augagcgccgugaagcgcaccaucaagggcacccaccacuggcugcuccugacgauccugaccucccuccugguccuggugcagagcacccaguggucccucuucuucuucuucuacgagaacgccuuccugcccuucgcgauggggaucaucgccaugagcgccuucgccaugauguucgugaagcacaagcacgccuuccugugccucuuccugcugccgucccucgcgaccgucgccuacuucaacaugguguacaugcccgccagcugggugaugcggaucaugacguggcuggacauggucgacaccucccugagcggcuucaagcucaaggacugcgugauguacgccuccgcggugguccugcugauccucaugaccgcccgcaccguguacgacgacggggcccggcgcguguggacgcugaugaacguccugacccucguguacaagguguacuacggcaacgcccuggaccaggccaucagcaugugggcgcugaucaucuccgucaccagcaacuacuccgggguggugaccacggucauguuccucgcccggggcaucgugaugugcguggaguacugccccaucuucuucaucaccggcaacacccugcagugcaucaugcuggucuacugcuuccucggguacuucugcacgugcuacuucggccuguucugccugcucaaccgcuacuuccggcugacccuggggguguacgacuaccucgugagcacccaggaguuccgcuacaugaacucccagggccugcugcccccgaagaacagcaucgacgccuucaagcucaacaucaagcugcugggggucggcggcaagcccugcaucaagguggccaccguccaguccuga

SEQ ID NO: 18549 - RNA, 312 nt, Artificial Sequence
  MERS-CoV/MERS-CoV-Jeddah-human-1__KF958702.1__ORF3 protein CDS gc
augcgcgugcagcggcccccgacccugcuccuggucuucagccugucccuccuggugaccgccuucagcaagccccuguacgugcccgagcacugccagaacuacuccggcugcaugcuccgcgccugcaucaagacggcgcaggccgacaccgccgggcuguacaccaacuuccggaucgacguccccagcgccgaguccaccggcacgcagagcguguccguggaccgcgagagcaccuccacccacgacgggccgaacgagcacgucaccaucgugaaccugcucgacgugggcuacagcgucaacuga

SEQ ID NO: 18550 - RNA, 312 nt, Artificial Sequence
  MERS-CoV/Al-Hasa_4_2013__KF186564.1__ORF3 protein CDS gc
augcgcgugcagcggcccccgacccugcuccuggucuucagccugucccuccuggugaccgccuucagcaagccccuguacgugcccgagcacugccagaacuacuccggcugcaugcuccgcgccugcaucaagacggcgcaggccgacaccgccgggcuguacaccaacagccggaucgacguccccuccgccgagagcaccggcacgcaguccgugagcguggaccgcgaguccaccagcacccacgacgggccgaccgagcacgucacguccgugaaccuguucgacgugggcuacagcgucaacuga

SEQ ID NO: 18551 - RNA, 312 nt, Artificial Sequence
  MERS-CoV/Riyadh_14_2013__KJ156934.1__ORF3 protein CDS gc
augcgcgugcagcggcccccgacccugcuccuggucuucagccugucccuccuggugaucgccuucagcaagccccuguacgugcccgagcacugccagaacuacuccggcugcaugcuccgcgccugcaucaagaccgcgcaggccgacacggccgggcuguacaccaacuuccggaucgacguccccagcgccgaguccaccggcacccagagcguguccguggaccgcgagagcacguccacccacgacgggccgaccgagcacgucaccagcgugaaccuguucgacgugggcuacuccgucaacuga

SEQ ID NO: 18552 - RNA, 312 nt, Artificial Sequence
  MERS-CoV/England 1__NC_038294.1__ORF3 protein CDS gc
augcgcgugcagcggcccccgacccugcuccuggucuucagccugucccuccuggugaccgccuucagcaagccccuguacgugcccgagcacugccagaacuacuccggcugcaugcuccgcgccugcaucaagacggcgcaggccgacaccgccgggcuguacaccaacuuccggaucgacguccccagcgccgaguccaccggcacgcagagcguguccguggaccgcgagagcaccuccacccacgacgggccgaccgagcacgucacgagcgugaaccuguucgacgugggcuacuccgucaacuga

SEQ ID NO: 18553 - RNA, 825 nt, Artificial Sequence
  SARS-CoV/Tor2__NC_004718.3__ORF3a protein CDS gc
auggaccuguucaugcgcuucuucacccuccggagcaucaccgcccagcccgugaagaucgacaacgccuccccggcgagcacgguccacgccaccgccaccaucccccugcaggccucccugcccuucggcuggcucgugaucgggguggccuuccuggcggucuuccagagcgccaccaagaucaucgcccugaacaagcgcuggcagcucgcccuguacaagggcuuccaguucaucugcaaccugcuccugcuguucgugacgaucuacucccaccuccugcugguggcggccgggauggaggcccaguuccucuaccuguacgcccugaucuacuuccuccagugcaucaacgccugccggaucaucaugcgcugcuggcugugcuggaagugcaagagcaagaacccccugcucuacgacgcgaacuacuucgucugcuggcacacccacaacuacgacuacugcaucccguacaacuccgugaccgacaccaucguggucacggagggcgacgggaucagcacccccaagcugaaggaggacuaccagaucggcggcuacuccgaggaccggcacagcggggugaaggacuacguggucgugcacggcuacuucaccgagguguacuaccagcuggaguccacccagaucacgaccgacaccgggaucgagaacgccaccuucuucaucuucaacaagcucgucaaggacccgcccaacgugcagauccacacgaucgacggcagcuccgggguggccaaccccgccauggaccccaucuacgacgagcccaccaccaccacgagcgucccccuguga

SEQ ID NO: 18554 - RNA, 330 nt, Artificial Sequence
  HCoV/OC43__NC_006213.1__ORF3 protein CDS gc
auggacaucuggcgccccgagaagaaguaccugcgguacaucaacggcuucaacgugagcgagcucgaggacgccugcuucaaguucaacuaccaguucccgaaggucggguacugccgcgugcccucccacgccuggugccggaaccagggccgcuucugcgcgaccuucacccuguacggcaagagcaagcacuacgacaaguacuucggggugaucaacggguucacggccuucgccaacaccgucgaggacgccgugaacaagcugguguuccucgccgucgacuucaucaccuggcggcgccaggagcugaacguguacggcuga

SEQ ID NO: 18555 - RNA, 330 nt, Artificial Sequence
  HCoV/HKU1__NC_006577.2__ORF3 protein CDS gc
auggacguguggcgccccagcuacacccacucccuggucauccgggaguucggcgugaccaaccucgaggaccugugccugaaguacaacuacugccagccgaucgugggguacugcaucgucccccucaacguguggugccgcaaguucggcaaguucgccagccacuucacgcugcggucccacgacaucagccacuccaacaacuucgggguggucaccagcuucaccaccuacggcaacacgguguccgaggccgugagccgccuggucgaguccgcgagcgaguucaucguguggcgggccgaggcccucaacaaguacggguga

SEQ ID NO: 18556 - RNA, 660 nt, Artificial Sequence
  HCoV/229E/BN1/GER/2015__KU291448.1__ORF3 protein CDS gc
auggcccugggccucuucacccugcaguucgugagcgccgucaaccagucccugaucaagagcaagguguccgcggaggugagccgccaggucauccaggacgugaaggacgggaccgugacguucaaccuccuggccuacacccugaugucccucuucgucguguacuucgcccuguucaaggcccggagccaccgcggccgguccgcccugaucguguucaagauccucauccuguucgucuacgugccccugcucuacuggagccaggcguacaucgacgccacccugaucgccgugauccugcucgggcgcuucuuccacaccgccuggcacugcuggcuguacaagacgugggacuucaucgucuucaacgugaccacccugugcuacgugcagggcaagugcugguuccucgagaacaaggcgcugaagccguucgucugcuucuacgggggcgaccaguuccuguacaucggcgaccggaucgugaccuaccucuccacgaacgaccuguacguggcccugcgcgggcggaucgacaaggaccucagccugucccgcaaggucgagcuguacaacggcgagugcguguaccucuucugcgagcaccccgccguggggaucgucaacaccgacuucaagcuggagauccacuga

SEQ ID NO: 18557 - RNA, 678 nt, Artificial Sequence
  HCoV/NL63/RPTEC/2004__JX504050.1__ORF3 protein CDS gc
augcccuucggcgggcuguuccagcucacccuggagagcaccaucaacaaguccguggccaaccugaagcucccgccccacgacgucacggugcugcgcgacaaccugaagcccgugaccacccucagcaccaucacggccuaccugcuggucucccucuucgugaccuacuucgcgcuguucaagccccugaccgcccggggccgcguggccugcuucguccucaagcugcugacccucuucguguacgugccgcugcugguccucuucgggauguaccuggacagcuucaucaucuucuccacgcugcuguuccgguucauccacgugggcuacuacgccuaccuguacaagaacuucagcuucgugcuguucaacgucaccaagcucugcuucguguccgggaagugcugguaccuggagcagagcuucuacgagaaccgcuucgccgcgaucuacggcggcgaccacuacgugguccucgggggcgagaccaucaccuucguguccuucgacgaccucuacguggccauccgggggagcugcgagaagaaccugcagcugaugcgcaaggucgaccucuacaacggcgccgugaucuacaucuucgccgaggagcccguggucgggaucguguacuccagccagcuguacgaggacgugcccuccaucaacuga

SEQ ID NO: 18558 - RNA, 825 nt, Artificial Sequence
  Bat SARS-like CoV/WIV1__KF367457.1__ORF3 protein CDS gc
auggaccuguucaugcgcaucuucacccucggccccaucaccgcccagccggggaagaucgacaacgccagccccgcguccacggugcacgccaccgccaccaucccccugcaggccagccugcccuucggcuggcucgucaucgggguggccuuccuggcgguguuccaguccgccaccaagaucaucagccugaacaagcgguggcagcucgcccuguacaagggcuuccaguucaucugcaaccugcuccugcuguucgucacgaucuacucccaccuccugcugguggccgcggggauggaggcccaguuccucuaccuguacgcccugaucuacuuccuccagugcaucaacgccugccgcaucaucaugcggugcuggcugugcuggaagugcaagagcaagaacccgcugcucuacgacgccaacuacuucgugugcuggcacacccacaacuacgacuacugcauccccuacaacuccgucaccgacaccaucguggugacggcgggcgacggcaucagcacccccaagcugaaggaggacuaccagaucgggggcuacuccgagaacuggcacagcggggucaaggacuacguggugguccacggcuacuucaccgagguguacuaccagcuggaguccacccagaucacgaccgacaccgggaucgagaacgccaccuucuucaucuucaacaagcucgugaaggacccgcccaacguccagauccacacgaucgacggcagcuccggcguggugaaccccgccauggaccccaucuacgacgagcccaccaccaccacgagcgucccgcuguga

SEQ ID NO: 18559 - RNA, 663 nt, Artificial Sequence
  BatCoV/HKU9-1 BF_005I__NC_009021.1__ORF3 protein CDS gc
augaaccuguacaaccucgugcgcgacgcccugcggcccagcuacgccaccgucuccccgagcguggacgagcccaccguggacaacaacuucgucgcgcuguccugcuacgccacgcucagcgugcugcuguacuaccuccagcgcgugaagcagcccuaccuguccaugcuguuccacauccucuucugccugagccaggucugcauggugaucuggcugaucuucuccgccaacuucuacgugagccucuucgcccagugcaugcuggucgugugcgcccugggcugcuuccucgagcggaccauccuguccaucaagcugcgcagcauggcgcccuucauguccauggccgacaacuucgccaucaucaagacgaccugcaacaacuacguguucccggucgagcggagcuccgacaaccucguggugcugaccaccagccgcgggaucuacuccaacggcgucuucaugaagggggccaucaccgugagcgacaacgcgcugguggucucccucuucaagagccacucccugcugcucgaccggguggagcacggcuacgacuacaccguguucaucuacaucaacagcgucauccugcagaacaucaagcccacggugagcguggucaacaccgaguucaccgacguggagcuguga

SEQ ID NO: 18560 - RNA, 675 nt, Artificial Sequence
  PEDV/NPL-PEDv/2013/P10__KJ778616.1__ORF3 protein CDS gc
auguuccugggccucuuccaguacaccaucgacaccguggucaaggacgugagcaaguccgccaaccugagccuggacgccgugcaggagcucgagcugaacgucgugcccauccgccaggcguccaacgugacgggguuccuguucaccagcgucuucaucuacuucuucgcccucuucaaggccuccagccugcggcgcaacuacaucaugcuggccgcccgguucgcggugaucgugcucuacugcccgcugcuguacuacugcggcgccuuccucgacgccaccaucaucugcugcacccugaucgggcgccugugccucgucugcuucuacuccuggcgguacaagaacgcccuguucaucaucuucaacacgaccacccugagcuuccucaacggcaaggcggccuacuacgacgggaaguccaucgugauccuggagggcggcgaccacuacaucaccuucgggaacagcuucguggccuucgucuccagcaucgaccuguaccucgccauccgcggccggcaggaggccgaccugcagcugcuccgcacgguggagcugcuggacgggaagaagcucuacguguucucccagcaccagaucgucggcaucaccaacgcggccuucgacagcauccagcuggacgaguacgccaccaucuccgaguga

SEQ ID NO: 18561 - RNA, 828 nt, Artificial Sequence
  SARS-CoV-2/Wuhan-Hu-1__NC_045512.2/MN908947.2/EPI_ISL_402128__ORF 3a protein (ORF3a) CDS gc
auggaccuguucaugcgcaucuucaccaucggcaccgugacgcucaagcagggggagaucaaggacgccacccccagcgacuucguccgggccaccgcgaccaucccgauccaggccucccugcccuucggcuggcugaucguggggguggcccuccuggccgucuuccagagcgccuccaagaucaucacgcugaagaagcgcuggcagcucgcgcugagcaagggcgugcacuucgugugcaaccugcuccugcuguucgucaccguguacucccaccuccugcugguggccgccgggcucgaggcccccuuccuguaccuguacgcgcucgucuacuuccugcagagcaucaacuucgugcggaucaucaugcgccuguggcucugcuggaagugccgguccaagaacccccugcuguacgacgccaacuacuuccucugcuggcacaccaacugcuacgacuacugcaucccguacaacagcgugaccuccagcaucgucaucacguccggcgacggcaccaccagccccaucuccgagcacgacuaccagaucgggggcuacaccgagaagugggagagcggggugaaggacugcgugguccugcacuccuacuucacgagcgacuacuaccagcuguacuccacccagcucagcaccgacaccggcguggagcacgugacguucuucaucuacaacaagaucgucgacgagcccgaggagcacgugcagauccacaccaucgacggguccagcggcguggucaaccccgugauggagccgaucuacgacgagcccaccaccacgaccagcgugccccuguga

SEQ ID NO: 18562 - RNA, 828 nt, Artificial Sequence
  SARS-CoV-2__MT919525.1__ORF3a protein CDS gc
auggaccuguucaugcgcaucuucaccaucggcaccgugacgcucaagcagggggagaucaaggacgccacccccagcgacuucguccgggccaccgcgaccaucccgauccaggccucccugcccuucggcuggcugaucguggggguggcccuccuggccgucuuccagagcgccuccaagaucaucacgcugaagaagcgcuggcagcucgcgcugagcaagggcgugcacuucgugugcaaccugcuccugcuguucgucaccguguacucccaccuccugcugguggccgccgggcucgaggcccccuuccuguaccuguacgcgcucgucuacuuccugcagagcaucaacuucgugcggaucaucaugcgccuguggcucugcuggaagugccgguccaagaacccccugcuguacgacgccaacuacuuccucugcuggcacaccaacugcuacgacuacugcaucccguacaacagcgugaccuccagcaucgucaucacguccggcgacggcaccaccagccccaucuccgaguacgacuaccagaucgggggcuacaccgagaagugggagagcggggugaaggacugcgugguccugcacuccuacuucacgagcgacuacuaccagcuguacuccacccagcucagcaccgacaccggcguggagcacgugacguucuucaucuacaacaagaucgucgacgagcccgaggagcacgugcagauccacaccaucgacggguccagcggcguggucaaccccgugauggagccgaucuacgacgagcccaccaccacgaccagcgugccccuguga

SEQ ID NO: 18563 - RNA, 828 nt, Artificial Sequence
  SARS-CoV-2__MT919995.1__ORF3a protein CDS gc
auggaccuguucaugcgcaucuucaccaucggcaccgugacgcucaagcagggggagaucaaggacgccacccccagcgacuucguccgggccaccgcgaccaucccgauccaggccucccugcccuucguguggcugaucgugggcgucgcccuccuggccguguuccacagcgccuccaagaucaucacgcugaagaagcgcuggcagcucgcgcugagcaagggggugcacuucgucugcaaccugcuccugcuguucgugaccguguacucccaccuccugcuggucgccgccggccucgaggcccccuuccuguaccuguacgcgcucguguacuuccugcagagcaucaacuucgugcggaucaucaugcgccuguggcucugcuggaagugccgguccaagaacccccugcuguacgacgccaacuacuuccucugcuggcacaccaacugcuacgacuacugcaucccguacaacagcgucaccuccagcaucgugaucacguccggggacggcaccaccagccccaucuccgagcacgacuaccagaucggcggguacaccgagaagugggagagcggcgugaaggacugcgucgugcugcacuccuacuucacgagcgacuacuaccagcuguacuccacccagcucagcaccgacaccgggguggagcacgucacguucuucaucuacaacaagaucguggacgagcccgaggagcacgugcagauccacaccaucgacggcuccagcggggucgugaaccccgugauggagccgaucuacgacgagcccaccaccacgaccagcgucccccuguga

SEQ ID NO: 18564 - RNA, 828 nt, Artificial Sequence
  SARS-CoV-2__MT919996.1__ORF3a protein CDS gc
auggaccuguucaugcgcaucuucaccaucggcaccgugacgcucaagcagggggagaucaaggacgccacccccagcgacuucguccgggccaccgcgaccaucccgauccaggccucccugcccuucggcuggcugaucguggggguggcccuccuggccgucuuccacagcgccuccaagaucaucacgcugaagaagcgcuggcagcucgcgcugagcaagggcgugcacuucgugugcaaccugcuccugcuguucgucaccguguacucccaccuccugcugguggccgccgggcucgaggcccccuuccuguaccuguacgcgcucgucuacuuccugcagagcaucaacuucgugcggaucaucaugcgccuguggcucugcuggaagugccgguccaagaacccccugcuguacgacgccaacuacuuccucugcuggcacaccaacugcuacgacuacugcaucccguacaacagcgugaccuccagcaucgucaucacguccggcgacggcaccaccagccccaucuccgagcacgacuaccagaucgggggcuacaccgagaagugggagagcggggugaaggacugcgugguccugcacuccuacuucacgagcgacuacuaccagcuguacuccacccagcucagcaccgacaccggcguggagcacgugacguucuucaucuacaacaagaucgucgacgagcccgaggagcacgugcagauccacaccaucgacggguccagcggcguggucaaccccgugauggagccgaucuacgacgagcccaccaccacgaccagcgugccccuguga

SEQ ID NO: 18565 - RNA, 828 nt, Artificial Sequence
  SARS-CoV-2__MT920030.1__ORF3a protein CDS gc
auggaccuguucaugcgcaucuucaccaucggcaccgugacgcucaagcagggggagaucaaggacgccacccccagcgacuucguccgggccaccgcgaccaucccgauccaggccucccugcccuucggcuggcugaucguggggguggcccuccuggccgucuuccagagcgccuccaagaucaucacgcugaagaagcgcuggcagcucgcgcugagcaagggcgugcacuucgugugcaaccugcuccugcuguucgucaccguguacucccaccuccugcugguggccgccgggcucgaggcccccuuccuguaccuguacgcgcucgucuacuuccugcagagcaucaacuucgugcggaucaucaugcgccuguggcucugcuggaagugccgguccaagaacccccugcuguacgacgccaacuacuuccucugcuggcacaccaacugcuacgacuacugcaucccguacaacagcgugaccuccagcaucgucaucacguccggcgacggcaccaccagccccaucuccgagcacgacuaccagaucgggggcuacaccgagaagugggagagcggggugaaggacugcgugguccugcacuccuacuucacgagcgacuacuaccagcuguacuccacccagcucagcaccgacaccggcguggagcacgugacguucuucaucuacaacaagaucgucgacgagcccgaggagcacgugcagauccacaccaucgacguguccagcggggucgugaaccccgugauggagccgaucuacgacgagcccaccaccacgaccagcgucccccuguga

SEQ ID NO: 18566 - RNA, 828 nt, Artificial Sequence
  SARS-CoV-2__MT913045.1__ORF3a protein CDS gc
auggaccuguucaugcgcaucuucaccaucggcaccgugacgcucaagcagggggagaucaaggacgccacccccagcgacuucguccgggccaccgcgaccaucccgauccaggccucccugcccuucggcuggcugaucguggggguggcccuccuggccgucuuccacagcgccuccaagaucaucacgcugaagaagcgcuggcagcucgcgcugagcaagggcgugcacuucgugugcaacuuccugcuccuguucgucaccguguacucccaccuccugcugguggccgccgggcuggaggcccccuuccucuaccuguacgcgcuggucuacuuccuccagagcaucaacuucgugcggaucaucaugcgccuguggcugugcuggaagugccgguccaagaacccccuccuguacgacgccaacuacuuccugugcuggcacaccaacugcuacgacuacugcaucccguacaacagcgugaccuccagcaucgucaucacguccggcgacggcaccaccagccccaucuccgagcacgacuaccagaucgggggcuacaccgagaagugggagagcggggugaaggacugcgugguccuccacuccuacuucacgagcgacuacuaccagcuguacuccacccagcugagcaccgacaccggcguggagcacgugacguucuucaucuacaacaagaucgucgacgagcccgaggagcacgugcagauccacaccaucgacggguccagcggcguggucaaccccgugauggagccgaucuacgacgagcccaccaccacgaccagcgugccccucuga

SEQ ID NO: 18567 - RNA, 828 nt, Artificial Sequence
  SARS-CoV-2__MT913078.1__ORF3a protein CDS gc
auggaccuguucaugcgcaucuucaccaucggcaccgugacgcucaagcagggggagaucaaggacgccacccccagcgacuucguccgggccaccgcgaccaucccgauccaggccucccugcccuucggcuggcugaucgugggggccgcccuccuggccguguuccacagcgcguccaagaucaucacgcugaagaagcgcuggcagcucgcccugagcaagggcguccacuucgugugcaaccugcuccugcuguucgugaccgucuacucccaccuccugcugguggccgccgggcucgaggcgcccuuccuguaccuguacgcccucguguacuuccugcagagcaucaacuucguccggaucaucaugcgccuguggcucugcuggaagugccgguccaagaacccccugcuguacgacgccaacuacuuccucugcuggcacaccaacugcuacgacuacugcaucccguacaacagcgugaccuccagcaucgugaucacguccggcgacggcaccaccagccccaucuccgagcacgacuaccagaucgggggcuacaccgagaagugggagagcggggucaaggacugcguggugcugcacuccuacuucacgagcgacuacuaccagcuguacuccacccagcucagcaccgacaccggcgucgagcacgugacguucuucaucuacaacaagaucguggacgagcccgaggagcacguccagauccacaccaucgacggguccagcggcguggugaaccccgucauggagccgaucuacgacgagcccaccaccacgaccagcgugccccuguga

SEQ ID NO: 18568 - RNA, 822 nt, Artificial Sequence
  SARS-CoV-2__MT913086.1__ORF3a protein CDS gc
auggaccuguucaugcgcaucuucaccaucggcaccgugacgcucaagcagggggagaucaaggacgccacccccagcgacuucguccgggccaccgcgaccauccaggccucccugccguucggcuggcugaucguggggguggcccuccuggccgucuuccacagcgccuccaagaucaucacgcugaagaagcgcuggcagcucgcgcugagcaagggcgugcacuucgugugcaaccugcuccugcuguucgucaccguguacucccaccuccugcugguggccgccgggcucgaggcccccuuccuguaccuguacgcgcucgucuacuuccugcagagcaucaacuucgugcggaucaucaugcgccuguggcucugcuggaagugccgguccaagaacccccugcuguacgacgccaacuacuuccucugcuggcacaccaacugcuacgacuacugcauccccuacaacagcgugaccuccagcaucgucaucacguccggcgacggcaccaccagcccgaucuccgagcacgacuaccagaucgggggcuacaccgagaagugggagagcggggugaaggacugcgugguccugcacuccuacuucacgagcgacuacuaccagcuguacuccacccagcucagcaccgacaccggcguggagcacgugacguucuucaucuacaacaagaucgucgacgagcccgaggagcacgugcagauccacaccaucgacggguccagcggcguggucaaccccgugauggagcccaucuacgacgagccgaccaccacgaccagcgugccccuguga

SEQ ID NO: 18569 - RNA, 828 nt, Artificial Sequence
  SARS-CoV-2__MT913089.1__ORF3a protein CDS gc
auggaccuguucaugcgcaucuucaccaucggcaccgugacgcucaagcagggggagaucaaggacgccacccccagcgacuucguccgggccaccgcgaccaucccgauccaggccucccugcccuucggcuggcugaucguggggguggcccuccuggccgucuuccagagcgccuccaagaucaucacgcugaagaagcgcuggcagcucgcgcugagcaagggcgugcacuucgugugcaaccugcuccugcuguucgucaccguguacuccuaccuccugcugguggccgccgggcucgaggcccccuuccuguaccuguacgcgcucgucuacuuccugcagagcaucaacuucgugcggaucaucaugcgccuguggcucugcuggaagugccgguccaagaacccccugcuguacgacgccaacuacuuccucugcuggcacaccaacugcuacgacuacugcaucccguacaacagcgugaccuccagcaucgucaucacguccggcgacggcaccaccagccccaucuccgagcacgacuaccagaucgggggcuacaccgagaagugggagagcggggugaaggacugcgugguccugcacuccuacuucacgagcgacuacuaccagcuguacuccacccagcucagcaccgacaccggcguggagcacgugacguucuucaucuacaacaagaucgucgacgagcccgaggagcacgugcagauccacaccaucgacggguccagcggcguggucaaccccgugauggagccgaucuacgacgagcccaccaccacgaccagcgugccccuguga

SEQ ID NO: 18570 - RNA, 828 nt, Artificial Sequence
  SARS-CoV-2__MT913110.1__ORF3a protein CDS gc
auggaccuguucaugcgcaucuucaccaucggcaccgugacgcucaagcagggggagaucaaggacagcacccccuccgacuucguccgggccaccgccaccaucccgauccaggcgagccugcccuucggcuggcugaucguggggguggcccuccuggccuucuuccacuccgccagcaagaucaucacgcugaagaagcgcuggcagcucgcccuguccaagggcguccacuucgugugcaaccugcuccugcuguucgugaccgucuacagccaccuccugcugguggcggccgggcucgaggcccccuuccuguaccuguacgcccucguguacuuccugcaguccaucaacuucguccggaucaucaugcgccuguggcucugcuggaagugccggagcaagaacccccugcuguacgacgcgaacuacuuccucugcuggcacaccaacugcuacgacuacugcaucccguacaacuccgugaccagcuccaucgugaucacgagcggcgacggcaccaccucccccaucagcgagcacgacuaccagaucgggggcuacaccgagaagugggaguccggggucaaggacugcguggugcugcacagcuacuucacguccgacuacuaccagcuguacagcacccagcucuccaccgacaccggcgucgagcacgugacguucuucaucuacaacaagaucguggacgagcccgaggagcacguccagauccacaccaucgacgggagcagcggcguggugaaccccgucauggagccgaucuacgacgagcccaccaccacgaccuccgugccccuguga

SEQ ID NO: 18571 - RNA, 828 nt, Artificial Sequence
  SARS-CoV-2__MT913118.1__ORF3a protein CDS gc
auggaccuguucaugcgcaucuucaccaucggcaccgugacgcucaagcagggggagaucaaggacgccacccccagcgacuucguccgggccaccgcgaccaucccgauccaggccucccugcccuucggcuggcugaucguggggguggcccuccuggccgucuuccacagcgccuccaagaucaucacgcugaagaagcgcuggcagcucgcgcugagcaagggcgugcacuucgugugcaaccugcuccugcugcucgucaccguguacucccaccuccugcugguggccgccgggcuggaggcccccuuccuguaccucuacgcgcuggucuacuuccugcagagcaucaacuucgugcggaucaucaugcgccucuggcugugcuggaagugccgguccaagaacccccugcucuacgacgccaacuacuuccugugcuggcacaccaacugcuacgacuacugcaucccguacaacagcgugaccuccagcaucgucaucacguccggcgacggcaccaccagccccaucuccgagcacgacuaccagaucgggggcuacaccgagaagugggagagcggggugaaggacugcgugguccugcacuccuacuucacgagcgacuacuaccagcucuacuccacccagcugagcaccgacaccggcguggagcacgugacguucuucaucuacaacaagaucgucgacgagcccgaggagcacgugcagauccacaccaucgacggguccagcggcguggucaaccccgugauggagccgaucuacgacgagcccaccaccacgaccagcgugccccuguga

SEQ ID NO: 18572 - RNA, 828 nt, Artificial Sequence
  SARS-CoV-2__MT913122.1__ORF3a protein CDS gc
auggaccuguucaugcgcaucuucaccaucggcaccgugacgcucaagcagggggagaucaaggacgccacccccagcgacuucguccgggccaccgcgaccaucccgauccaggccucccugcccuucggcuggcugaucguggggguggcccuccuggccgucuuccacagcgccuccaagaucaucacgcugaagaagcgcuggcagcucgcgcugagcaagggcgugcacuucgugugcaaccugcuccugcuguucgucaccguguacucccaccuccugcugguggccgccgggcucgaggcccccuuccuguaccuguacgcgcucgucuacuuccugcagagcaucaacuucgugcggaucaucaugcgccuguggcucugcuggaagugccgguccaagaacccccugcuguacgacgccaacuacuuccucugcuggcacaccaacugcuacgacuacugcaucccguacaacagcgugaccuccagcaucgucaucacguccggcgacggcaccaccagccccaucuccgagcacgacuaccacaucgggggcuacaccgagaagugggagagcggggugaaggacugcgugguccugcacuccuacuucacgagcgacuacuaccagcuguacuccacccagcucagcaccgacaccggcguggagcacgugacguucuucaucuacaacaagaucgucgacgagcccgaggagcacgugcagauccacaccaucgacggguccagcggcguggucaaccccgugauggagccgaucuacgacgagcccaccaccacgaccagcgugccccuguga

SEQ ID NO: 18573 - RNA, 828 nt, Artificial Sequence
  SARS-CoV-2__MT913127.1__ORF3a protein CDS gc
auggaccuguucaugcgcaucuucaccaucggcaccgugacgcucaagcagggggagaucaaggacgccacccccagcgacuucguccgggccaccgcgaccaucccgauccaggccucccugcccuucggcuggcugaucguggggguggcccuccuggccgucuuccagagcgccuccaagaucaucacgcugaagaagcgcuggcagcucgcgcugagcaagggcgugcacuucgugugcaaccugcuccugcuguucgucaccguguacucccaccuccugcugguggccgccgggcucgaggcccccuucuucuaccuguacgcgcuggucuacuuccuccagagcaucaacuucgugcggaucaucaugcgccuguggcugugcuggaagugccgguccaagaacccccuccuguacgacgccaacuacuuccugugcuggcacaccaacugcuacgacuacugcaucccguacaacagcgugaccuccagcaucgucaucacguccggcgacggcaccaccagccccaucuccgagcacgacuaccagaucgggggcuacaccgagaagugggagagcggggugaaggacugcgugguccuccacuccuacuucacgagcgacuacuaccagcuguacuccacccagcugagcaccgacaccggcguggagcacgugacguucuucaucuacaacaagaucgucgacgagcccgaggagcacgugcagauccacaccaucgacggguccagcggcguggucaaccccgugauggagccgaucuacgacgagcccaccaccacgaccagcgugccccucuga

SEQ ID NO: 18574 - RNA, 828 nt, Artificial Sequence
  SARS-CoV-2__MT913129.1__ORF3a protein CDS gc
auggaccuguucaugcgcaucuucaccaucggcaccgugacgcucaagcagggggagaucaaggacgccacccccagcgacuucguccgggccaccgcgaccaucccgauccaggccucccugcccuucggcuggcugaucguggggguggcccuccuggccgucuuccacagcgccuccaagaucaucacgcugaagaagcgcuggcagcucgcgcugagcaagggcgugcacuucgugugcaaccugcuccugcuguucgucaccguguacucccaccuccugcugguggccgccgggcucgaggcccccuuccuguaccuguacgcgcucgucuacuuccugcagagcaucaacuucgugcggaucaucaugcgccuguggcucugcuggaagugccgguccaagaacccccugcuguacgacgccaacuacuuccucugcuggcacaccaacugcuacgacuacugcaucccguacaacagccugaccuccagcaucgugaucacguccggcgacggcaccaccagccccaucuccgagcacgacuaccagaucgggggcuacaccgagaagugggagagcggggucaaggacugcguggugcugcacuccuacuucacgagcgacuacuaccagcucuacuccacccagcugagcaccgacaccggcgucgagcacgugacguucuucaucuacaacaagaucguggacgagcccgaggagcacguccagauccacaccaucgacggguccagcggcguggugaaccccgucauggagccgaucuacgacgagcccaccaccacgaccagcgugccccuguga

SEQ ID NO: 18575 - RNA, 828 nt, Artificial Sequence
  SARS-CoV-2__MT913131.1__ORF3a protein CDS gc
auggaccuguucaugcgcaucuucaccaucggcaccgugacgcucaagcagggggagaucaaggacgccacccccagcgacuucguccgggccaccgcgaccaucccgauccaggccucccugcccuucggcuggcugaucguggggguggcccuccuggccgucuuccacagcgccuccaagaucaucacgcugaagaagcgcuggcagcucgcgcugagcaagggcgugcacuucgugugcaaccugcuccugcuguucgucaucguguacucccaccuccugcugguggccgccgggcucgaggcccccuuccuguaccuguacgcgcucgucuacuuccugcagagcaucaacuucgugcggaucaucaugcgccuguggcucugcuggaagugccgguccaagaacccccugcuguacgacgccaacuacuuccucugcuggcacaccaacugcuacgacuacugcaucccguacaacagcgugaccuccagcaucgucaucaccuccggcgacggcacgaccagccccaucuccgagcacgacuaccagaucgggggcuacaccgagaagugggagagcggggugaaggacugcgugguccugcacuccuacuucaccagcgacuacuaccagcuguacuccacgcagcucagcaccgacaccggcguggagcacgugaccuucuucaucuacaacaagaucgucgacgagcccgaggagcacgugcagauccacacgaucgacggguccagcggcguggucaaccccgugauggagccgaucuacgacgagcccaccaccaccacgagcgugccccuguga

SEQ ID NO: 18576 - RNA, 828 nt, Artificial Sequence
  SARS-CoV-2__MT913141.1__ORF3a protein CDS gc
auggaccuguucaugcgcaucuucaccaucggcaccgugacgcucaagcagggggagaucaaggacgccacccccagcgacuucguccgggccaccgcgaccaucccgauccccgccucccugcccuucggcuggcugaucguggggguggcccuccuggccgucuuccagagcgccuccaagaucaucacgcugaagaagcgcuggcagcucgcgcugagcaagggcgugcacuucgugugcaaccugcuccugcuguucgucaccguguacucccaccuccugcugguggccgccgggcucgaggcccccuuccuguaccuguacgcgcucgucuacuuccugcagagcaucaacuucgugcggaucaucaugcgccuguggcucugcuggaagugccgguccaagaacccgcugcuguacgacgccaacuacuuccucugcuggcacaccaacugcuacgacuacugcauccccuacaacagcgugaccuccagcaucgucaucacguccggcgacggcaccaccagccccaucuccgagcacgacuaccagaucgggggcuacaccgagaagugggagagcggggugaaggacugcgugguccugcacuccuacuucacgagcgacuacuaccagcuguacuccacccagcucagcaccgacaccggcguggagcacgugacguucuucaucuacaacaagaucgucgacgagcccgaggagcacgugcagauccacaccaucgacggguccagcggcguggucaacccggugauggagcccaucuacgacgagcccaccaccacgaccagcgugccccuguga

SEQ ID NO: 18577 - RNA, 828 nt, Artificial Sequence
  SARS-CoV-2__MT907515.1__ORF3a protein CDS gc
auggaccuguucaugcgcaucuucaccaucggcaccgugacgcucaagcagggggagaucaaggacgccacccccagcgacuucguccgggccaccgcgaccaucccgauccaggccucccugcccuucggcuggcugaucguggggguggcccuccuggccgucuuccagagcgccuccaagaucaucacgcugaagaagcgcuggcagcucgcgcugagcaagggcgugcacuucgugugcaaccugcuccugcuguucgucaccguguacucccaccuccugcugguggccgccgggcucgaggcccccuuccuguaccuguacgcgcucgucuacuuccugcagagcaucaacuucgugcggaucaucaugcgccuguggcucugcuggaagugccgguccaagaacccccugcuguacgacgccaacuacuuccucugcuggcacaccaacugcuacgacuacugcaucccguacaacagcgugaccuccagcaucgucaucacguccggcgacggcaccaccagccccaucuccgagcacgacuaccagaucgggggcuacaccgagaagugggagagcguggugaaggacugcgucgugcugcacuccuacuucacgagcgacuacuaccagcuguacuccacccagcucagcaccgacaccgggguggagcacgucacguucuucaucuacaacaagaucguggacgagcccgaggagcacgugcagauccacaccaucgacggcuccagcggggucgugaaccccgugauggagccgaucuacgacgagcccaccaccacgaccagcgucccccuguga

SEQ ID NO: 18578 - RNA, 828 nt, Artificial Sequence
  SARS-CoV-2__MT907518.1__ORF3a protein CDS gc
auggaccuguucaugcgcaucuucaccaucggcaccgugacgcucaagcagggggagaucaaggacgccacccccagcgacuucguccgggccaccgcgaccaucccgauccaggccucccugcccuucggcuggcugaucguggggguggcccuccuggccgucuuccagagcgccuccaagaucaucacgcugaagaagcgcuggcagcucgcgcugagcaagggcgugcacuucgugugcaaccugcuccugcuguucgucaccguguacucccaccuccugcugguggccgccgggcucgaggcccccuuccuguaccuguacagccucgucuacuuccugcaguccaucaacuucgugcggaucaucaugcgccuguggcucugcuggaagugccggagcaagaacccccugcuguacgacgcgaacuacuuccucugcuggcacaccaacugcuacgacuacugcaucccguacaacuccgugaccagcuccaucgucaucacgagcggcgacggcaccaccucccccaucagcgagcacgacuaccagaucgggggcuacaccgagaagugggaguccggggugaaggacugcgugguccugcacagcuacuucacguccgacuacuaccagcuguacagcacccagcucuccaccgacaccggcguggagcacgugacguucuucaucuacaacaagaucgucgacgagcccgaggagcacgugcagauccacaccaucgacgggagcagcggcguggucaaccccgugauggagccgaucuacgacgagcccaccaccacgaccuccgugccccuguga

SEQ ID NO: 18579 - RNA, 828 nt, Artificial Sequence
  SARS-CoV-2__MT911811.1__ORF3a protein CDS gc
auggaccuguucaugcgcaucuucaccaucggcaccgugacgcucaagcagggggagaucaaggacgccacccccagcgacuucguccgggccaccgcgaccaucccgauccaggccucccugcccuucggccgccugaucguggggguggcccuccuggccgucuuccacagcgccuccaagaucaucacgcugaagaagcgguggcagcucgcgcugagcaagggcgugcacuucgugugcaaccugcuccugcuguucgucaucguguacucccaccuccugcugguggccgccgggcucgaggcccccuuccuguaccuguacgcgcucgucuacuuccugcagagcaucaacuucgugcgcaucaucaugcggcuguggcucugcuggaagugccgcuccaagaacccccugcuguacgacgccaacuacuuccucugcuggcacaccaacugcuacgacuacugcaucccguacaacagcgugaccuccagcaucgucaucaccuccggcgacggcacgaccagccccaucuccgagcacgacuaccagaucgggggcuacaccgagaagugggagagcggggugaaggacugcgugguccugcacuccuacuucaccagcgacuacuaccagcuguacuccacgcagcucagcaccgacaccggcguggagcacgugaccuucuucaucuacaacaagaucgucgacgagcccgaggagcacgugcagauccacacgaucgacggguccagcggcguggucaaccccgugauggagccgaucuacgacgagcccaccaccaccacgagcgugccccuguga

SEQ ID NO: 18580 - RNA, 828 nt, Artificial Sequence
  SARS-CoV-2__MT483876.1__ORF3a protein CDS gc
auggaccuguucaugcgcaucuucaccaucggcaccgugacgcucaagcagggggagaucaaggacgccacccccagcgacuucguccgggccaccgcgaccaucccgauccaggccucccugcccuucggcuggcugaucguggggguggcccuccuggccgucuuccagagcgccuccaagaucaucacgcugaagaagcgcuggcagcucgcgcugagcaagggcgugcacuucgugugcaaccugcuccugcuguucgucaccguguacucccaccuccugcugguggccgccgggcucgaggcccccuuccuguaccuguacgcgcucgucuacuuccugcagagcaucaacuucgugcggaucaucaugcgccuguggcucugcuggaagugccgguccaagaacccccugcuguacgacgccaacuacuuccucugcuggcacaccaacugcuacgacuacugcaucccguacaacagcgugaccuccagcaucgucaucacguccggcgacggcaccaccagccccaucuccgagcacgacuaccagaucgggggcuacaccgagaagugggagagcggggugaaggacugcgugguccugcacuccuacuucacgagcgacuacuaccagcuguacuccacccagcucagcaccggcaccgggguggagcacgugacguucuucaucuacaacaagaucgucgacgagcccgaggagcacgugcagauccacaccaucgacggcuccagcggcguggucaaccccgugauggagccgaucuacgacgagcccaccaccacgaccagcgugccccuguga

SEQ ID NO: 18581 - RNA, 828 nt, Artificial Sequence
  SARS-CoV-2__MT893659.1__ORF3a protein CDS gc
auggaccuguucaugcgcaucuucaccaucggcaccgugacgcucaagcagggggagaucaaggacgccacccccagcgacuucguccgggccaccgcgaccaucccgauccaggccucccugcccuucggcuggcugaucguggggguggcccuccuggccgucuuccacagcgccuccaagaucaucacgcugaagaagcgcuggcagcucgcgcugagcaagggcgugcacuucgugugcaaccugcuccugcuguucgucaccguguacucccaccuccugcugguggccgccgggcucgaggcccccuuccuguaccuguacgcgcucgucuacuuccugcagagcaucaacuucgugcggaucaucaugcgccuguggcucugcuggaagugccgguccaagaacccccugcuguacgacgccaacuacuuccucugcuggcacaccaacugcuacgacuacugcaucccguacaacagcgugaccuccagcaucgucaucacguccggcgacggcaccaccagccccaucuccgagcacgacuaccagaucgggggcuacaccgagaagugggagagcggggugaaggacugcgugcugcugcacuccuacuucacgagcgacuacuaccagcucuacuccacccagcugagcaccgacaccggcgucgagcacgugacguucuucaucuacaacaagaucguggacgagcccgaggagcacguccagauccacaccaucgacggguccagcggcguggugaaccccgucauggagccgaucuacgacgagcccaccaccacgaccagcgugccccuguga

SEQ ID NO: 18582 - RNA, 828 nt, Artificial Sequence
  SARS-CoV-2__MT893667.1__ORF3a protein CDS gc
auggaccuguucaugcgcaucuucaccaucggcaccgugacguucaagcagggggagaucaaggacgccacccccagcgacuucguccgggccaccgcgaccaucccgauccaggccucccuccccuucggcuggcugaucguggggguggcccugcucgccgucuuccagagcgccuccaagaucaucacgcugaagaagcgcuggcagcuggcgcucagcaagggcgugcacuucgugugcaaccugcugcuccuguucgucaccguguacucccaccuccugcugguggccgccgggcuggaggcccccuuccucuaccuguacgcgcuggucuacuuccuccagagcaucaacuucgugcggaucaucaugcgccuguggcugugcuggaagugccgguccaagaacccccuccuguacgacgccaacuacuuccugugcuggcacaccaacugcuacgacuacugcaucccguacaacagcgugaccuccagcaucgucaucacguccggcgacggcaccaccagccccaucuccgagcacgacuaccagaucgggggcuacaccgagaagugggagagcggggugaaggacugcgugguccuccacuccuacuucacgagcgacuacuaccagcuguacuccacccagcugagcaccgacaccggcguggagcacgugacguucuucaucuacaacaagaucgucgacgagcccgaggagcacgugcagauccacaccaucgacggguccagcggcguggucaaccccgugauggagccgaucuacgacgagcccaccaccacgaccagcgugccccucuga

SEQ ID NO: 18583 - RNA, 828 nt, Artificial Sequence
  SARS-CoV-2__MT893675.1__ORF3a protein CDS gc
auggaccuguucaugcgcaucuucaccaucggcaccgugacgcucaagcagggggagaucaaggacgccacccccagcgacuucguccgggccaccgcgaccaucccgauccaggccucccugcccuucggcuggcugaucguggggguggcccuccuggccgucuuccagagcgccuccaagaucaucacgcugaagaagcgcuggcagcucgcgcugagcaagggcgugcacuucgugugcaaccugcuccugcuguucgucaccguguacucccaccuccugcugguggccgccgggcucgaggcccccuuccuguaccuguacgcgcucgucuacuuccugcagagcaucaacuucgugcggaucaucaugcgccuguggcucugcuggaagugccgguccaagaacccccugcuguacgacgccaacuacuuccucugcuggcacaccaacugcuacgacuacugcaucccguacaacagcgugaccuccagcaucgucaucacguccggcgacggcaucaccagccccaucuccgagcacgacuaccagaucgggggcuacaccgagaagugggagagcggggugaaggacugcgugguccugcacuccuacuucaccagcgacuacuaccagcuguacuccacgcagcucagcaccgacaccggcguggagcacgugaccuucuucaucuacaacaagaucgucgacgagcccgaggagcacgugcagauccacacgaucgacggguccagcggcguggucaaccccgugauggagccgaucuacgacgagcccaccaccaccacgagcgugccccuguga

SEQ ID NO: 18584 - RNA, 828 nt, Artificial Sequence
  SARS-CoV-2__MT897460.1__ORF3a protein CDS gc
auggaccuguucaugcgcaucuucaccaucggcaccgugacgcucaaccagggggagaucaaggacgccacccccagcgacuucguccgggccaccgcgaccaucccgauccaggccucccugcccuucggcuggcugaucguggggguggcccuccuggccgucuuccacagcgccuccaagaucaucacgcugaagaagcgcuggcagcucgcgcugagcaagggcgugcacuucgugugcaaccugcuccugcuguucgucaccguguacucccaccuccugcugguggccgccgggcucgaggcccccuuccuguaccuguacgcgcucgucuacuuccugcagagcaucaacuucgugcggaucaucaugcgccuguggcucugcuggaagugccgguccaagaacccccugcuguacgacgccaacuacuuccucugcuggcacaccaacugcuacgacuacugcaucccguacaacagcgugaccuccagcaucgucaucacguccggcgacggcaccaccagccccaucuccgagcacgacuaccagaucgggggcuacaccgagaagugggagagcggggugaaggacugcgugguccugcacuccuacuucacgagcgacuacuaccagcuguacuccacccagcucagcaccgacaccggcguggagcacgugacguucuucaucuacaacaagaucgucgacgagcccgaggagcacgugcagauccacaccaucgacggguccagcggcguggucaaccccgugauggagccgaucuacgacgagcccaccaccacgaccagcgugccccuguga

SEQ ID NO: 18585 - RNA, 822 nt, Artificial Sequence
  SARS-CoV-2__MT890280.1__ORF3a protein CDS gc
auggaccuguucaugcgcaucuucaccaucggcaccgugacgcucaagcagggggagaucaaggacgccacccccagcgacuucguccgggccaccgcgaccaucccgauccaggccucccugcccuucggcuggcugaucguggggguggcccuccuggccgucuuccagagcgccuccaagaucaucacgcugaagaagcgcuggcagcucgcgcugagcaagggcgugcacuucgugugcaaccugcuccugcuguucgucaccguguacucccaccuccugcugguggccgccgggcucgaggcccccuuccuguacgcgcuggucuacuuccuccagagcaucaacuucgugcggaucaucaugcgccuguggcugugcuggaagugccgguccaagaacccccuccuguacgacgccaacuacuuccugugcuggcacaccaacugcuacgacuacugcaucccguacaacagcgugaccuccagcaucgucaucacguccggcgacggcaccaccagccccaucuccgagcacgacuaccagaucgggggcuacaccgagaagugggagagcggggugaaggacugcgugguccuccacuccuacuucacgagcgacuacuaccagcuguacuccacccagcugagcaccgacaccggcguggagcacgugacguucuucaucuacaacaagaucgucgacgagcccgaggagcacgugcagauccacaccaucgacggguccagcggcguggucaaccccgugauggagccgaucuacgacgagcccaccaccacgaccagcgugccccucuga

SEQ ID NO: 18586 - RNA, 828 nt, Artificial Sequence
  SARS-CoV-2__MT890290.1__ORF3a protein CDS gc
auggaccuguucaugcgcaucuucaccaucggcaccgugacgcucaagcagggggagaucaaggacgccacccccagcgacuucguccgggccaccgcgaccaucccgauccaggccucccugcccuucggcuggcugaucguggggguggcccuccuggccgucuuccacagcgccuccaagaucaucacgcugaagaagcgcuggcagcucgcgcugagcaagggcgugcacuucgugugcaaccugcuccugcuguucgucaccguguacucccaccuccugcugguggccgccgggcucgaggcccccuuccuguaccuguacgcgcucgucuacuuccugcagagcaucaacuucgugcggaucaucaugcgccuguggcucugcuggaagugccgguccaagaacccccugcuguacgacgccaacuacuuccucugcuggcacaccaacugcuacgacuacugcaucccguacaacagcgugaccuccagcaucgucaucacguccggcgacggcaccaccagccccaucuccgagcacgacuaccagaucgggggcuacaccgagaagugggagagcggggugaaggacugcgugguccugcacuccuacuucacgagcgacuacuaccaccuguacuccacccagcucagcaccgacaccggcguggagcacgugacguucuucaucuacaacaagaucgucgacgagcccgaggagcacgugcagauccacaccaucgacggguccagcggcguggucaaccccgugauggagccgaucuacgacgagcccaccaccacgaccagcgugccccuguga

SEQ ID NO: 18587 - RNA, 828 nt, Artificial Sequence
  SARS-CoV-2__MT890292.1__ORF3a protein CDS gc
auggaccuguucaugcgcaucuucaccaucggcaccgugacgcucaagcagggggagaucaaggacgccacccccagcgacuucguccgggccaccgcgaccaucccgauccaggccucccugcccuucggcuggcugaucguggggguggcccuccuggccgucuuccacagcgccuccaagaucaucacgcugaagaagcgcuggcagcucgcgcugagcaagggcgugcacuucgugugcaaccugcuccugcuguucgucaccguguacucccaccuccugcugguggccgccgggcucgaggcccccuuccuguaccuguacgcgcucgucuacuuccugcagagcaucaacuucgugcggaucaucaugcgccuguggcucugcuggaagugccgguccaagaacccccugcuguacgacgccaacuacuuccucugcuggcacaccaacugcuacgacuacugcaucccguacaacagcgugaccuccagcaucgucaucacguccugcgacggcaccaccagccccaucuccgagcacgacuaccagaucggcggguacaccgagaagugggagagcggcgugaaggacugcgugguccugcacuccuacuucacgagcgacuacuaccagcuguacuccacccagcucagcaccgacaccgggguggagcacgugacguucuucaucuacaacaagaucgucgacgagcccgaggagcacgugcagauccacaccaucgacggcuccagcgggguggucaaccccgugauggagccgaucuacgacgagcccaccaccacgaccagcgugccccuguga

SEQ ID NO: 18588 - RNA, 828 nt, Artificial Sequence
  SARS-CoV-2__MT890294.1__ORF3a protein CDS gc
auggaccuguucaugcgcaucuucaccaucggcaccgugacgcucaagcagggggagaucaaggacgccacccccagccacuucguccgggccaccgcgaccaucccgauccaggccucccugcccuucggcuggcugaucguggggguggcccuccuggccgucuuccacagcgccuccaagaucaucacgcugaagaagcgcuggcagcucgcgcugagcaagggcgugcacuucgugugcaaccugcuccugcuguucgucaccguguacucccaccuccugcugguggccgccgggcucgaggcccccuuccuguaccuguacgcgcucgucuacuuccugcagagcaucaacuucgugcggaucaucaugcgccuguggcucugcuggaagugccgguccaagaacccccugcuguacgacgccaacuacuuccucugcuggcacaccaacugcuacgacuacugcaucccguacaacagcgugaccuccagcaucgucaucacguccggcgacggcaccaccagccccaucuccgagcacgacuaccagaucgggggcuacaccgagaagugggagagcggggugaaggacugcgugguccugcacuccuacuucacgagcgacuacuaccagcuguacuccacccagcucagcaccgacaccggcguggagcacgugacguucuucaucuacaacaagaucgucgacgagcccgaggagcacgugcagauccacaccaucgacggguccagcggcguggucaaccccgugauggagccgaucuacgacgagcccaccaccacgaccagcgugccccuguga

SEQ ID NO: 18589 - RNA, 828 nt, Artificial Sequence
  SARS-CoV-2__MT890296.1__ORF3a protein CDS gc
auggaccuguucaugcgcaucuucaccaucggcaccgugacgcucaagcagggggagaucaaggacgccacccccagcgacuucguccgggccaccgcgaccaucccgauccaggccucccugcccuucggcuggcugaucguggggguggcccuccuggccgucuuccacagcgccuccaagaucaucacgcugaagaagcgcuggcagcucgcgcugagcaagggcgugcacuucgugugcaaccugcuccugcuguucgucaccguguacucccaccuccugcugguggccgccgggcucgaggcccccuuccuguaccuguacgcgcucgucuacuuccugcagagcaucaacuucgugcggaucaucaugcgccugugguucugcuggaagugccgguccaagaacccccuccuguacgacgccaacuacuuccugugcuggcacaccaacugcuacgacuacugcaucccguacaacagcgugaccuccagcaucgucaucacguccggcgacggcaccaccagccccaucuccgagcacgacuaccagaucgggggcuacaccgagaagugggagagcggggugaaggacugcgugguccuccacuccuacuucacgagcgacuacuaccagcuguacuccacccagcugagcaccgacaccggcguggagcacgugacguucuucaucuacaacaagaucgucgacgagcccgaggagcacgugcagauccacaccaucgacggguccagcggcguggucaaccccgugauggagccgaucuacgacgagcccaccaccacgaccagcgugccccucuga

SEQ ID NO: 18590 - RNA, 828 nt, Artificial Sequence
  SARS-CoV-2__MT890320.1__ORF3a protein CDS gc
auggaccuguucaugcgcaucuucaccaucggcaccgugacgcucaagcagggggagaucaaggacgccacccccagcgacuucguccgggccaccgcgaccaucccgauccaggccucccugcccuucggcuggcugaucguggggguggcccuccuggccgucuuccacagcgccuccaagaucaucacgcugaagaagcgcuggcagcucgcgcugagcaagggcgugcacuucgugugcaaccugcuccugcuguucgucaccguguacucccaccuccugcugguggccgccgggcucgaggcccuguuccuguaccucuacgcgcuggucuacuuccugcagagcaucaacuucgugcggaucaucaugcgccucuggcugugcuggaagugccgguccaagaacccccugcucuacgacgccaacuacuuccugugcuggcacaccaacugcuacgacuacugcauccccuacaacagcgugaccuccagcaucgucaucacguccggcgacggcaccaccagcccgaucuccgagcacgacuaccagaucgggggcuacaccgagaagugggagagcggggugaaggacugcgugguccugcacuccuacuucacgagcgacuacuaccagcucuacuccacccagcugagcaccgacaccggcguggagcacgugacguucuucaucuacaacaagaucgucgacgagcccgaggagcacgugcagauccacaccaucgacggguccagcggcguggucaaccccgugauggagcccaucuacgacgagccgaccaccacgaccagcgugccccuguga

SEQ ID NO: 18591 - RNA, 828 nt, Artificial Sequence
  SARS-CoV-2__MT890355.1__ORF3a protein CDS gc
auggaccuguucaugcgcaucuucaccaucggcaccgugacgcucaagcagggggagaucaaggacgccacccccagcgacuucguccgggccaccgcgaccaucccgauccaggccucccugcccuucggcuggcugaucguggggguggccuuccucgccgucuuccacagcgccuccaagaucaucacgcugaagaagcgcuggcagcuggcgcucagcaagggcgugcacuucgugugcaaccugcugcuccuguucgucaccguguacucccaccuccugcugguggccgccgggcuggaggcccccuuccucuaccuguacgcgcuggucuacuuccuccagagcaucaacuucgugcggaucaucaugcgccuguggcugugcuggaagugccgguccaagaacccccuccuguacgacgccaacuacuuccugugcuggcacaccaacugcuacgacuacugcaucccguacaacagcgugaccuccagcaucgucaucacguccggcgacggcaccaccagccccaucuccgagcacgacuaccagaucgggggcuacaccgagaagugggagagcggggugaaggacugcgugguccuccacuccuacuucacgagcgacuacuaccagcuguacuccacccagcugagcaccgacaccggcguggagcacgugacguucuucaucuacaacaagaucgucgacgagcccgaggagcacgugcagauccacaccaucgacggguccagcggcguggucaaccccgugauggagccgaucuacgacgagcccaccaccacgaccagcgugccccucuga

SEQ ID NO: 18592 - RNA, 828 nt, Artificial Sequence
  SARS-CoV-2__MT890356.1__ORF3a protein CDS gc
auggaccuguucaugcgcaucuucaccaucggcaccgugacgcucaagcaggucgagaucaaggacgccacccccagcgacuucgugcgggccaccgcgaccaucccgauccaggccucccugcccuucggguggcugaucgugggcgucgcccuccuggccguguuccacagcgccuccaagaucaucacgcugaagaagcgcuggcagcucgcgcugagcaagggggugcacuucgucugcaaccugcuccugcuguucgugaccguguacucccaccuccugcuggucgccgccggccucgaggcccccuuccuguaccuguacgcgcucguguacuuccugcagagcaucaacuucgugcggaucaucaugcgccuguggcucugcuggaagugccgguccaagaacccccugcuguacgacgccaacuacuuccucugcuggcacaccaacugcuacgacuacugcaucccguacaacagcgucaccuccagcaucgugaucacguccggggacggcaccaccagccccaucuccgagcacgacuaccagaucggcggguacaccgagaagugggagagcggcgugaaggacugcgucgugcugcacuccuacuucacgagcgacuacuaccagcuguacuccacccagcucagcaccgacaccgggguggagcacgucacguucuucaucuacaacaagaucguggacgagcccgaggagcacgugcagauccacaccaucgacggcuccagcggggucgugaaccccgugauggagccgaucuacgacgagcccaccaccacgaccagcgucccccuguga

SEQ ID NO: 18593 - RNA, 828 nt, Artificial Sequence
  SARS-CoV-2__MT892981.1__ORF3a protein CDS gc
auggaccuguucaugcgcaucuucaccaucggcaccgugacgcucaagcagggggagaucaaggacgccacccccagcgacuucguccgggccaccgcgaccaucccgauccaggcccugcugcccuucggcuggcucaucguggggguggcccugcuggccgucuuccacuccgccagcaagaucaucacgcucaagaagcgcuggcagcuggcgcuguccaagggcgugcacuucgugugcaaccuccugcugcuguucgucaccguguacagccaccuccugcucguggccgccgggcuggaggcccccuuccuguaccucuacgcgcuggucuacuuccugcaguccaucaacuucgugcggaucaucaugcgccucuggcugugcuggaagugccggagcaagaacccccugcucuacgacgccaacuacuuccugugcuggcacaccaacugcuacgacuacugcaucccguacaacuccgugaccagcuccaucgucaucacgagcggcgacggcaccaccucccccaucagcgagcacgacuaccagaucgggggcuacaccgagaagugggaguccggggugaaggacugcgugguccugcacagcuacuucacguccgacuacuaccagcucuacagcacccagcuguccaccgacaccggcguggagcacgugacguucuucaucuacaacaagaucgucgacgagcccgaggagcacgugcagauccacaccaucgacgggagcuccggcguggucaaccccgugauggagccgaucuacgacgagcccaccaccacgaccagcgugccccuguga

SEQ ID NO: 18594 - RNA, 828 nt, Artificial Sequence
  SARS-CoV-2__MT892985.1__ORF3a protein CDS gc
auggaccuguucaugcgcaucuucaccaucggcaccgugacgcucaagcagggggagaucaaggacgccacccccagcgacuucguccgggccaccgcgaccaucccgauccaggccucccugcccuucggcuggcugaucguggggguggcccuccuggccgucuuccagagcgccuccaagaucaucacgcugaagaagcgcuggcagcucgcgcugagcaagggcgugcacuucgugugcaaccugcuccugcuguucgucaccguguacucccaccuccugcugguggccgccgggcucgaggcccccuuccuguaccuguacgcgcucgucuacuuccugcagagcaucaacuucgugcggaucaucaugcgccuguggcucugcuggaagugccgguccaagaacccccugcuguacgacgccaacuacuuccucugcuggcacaccaacugcuacgacuacugcaucccguacaacagcgugaccuccagcaucgucaucacguccggcgacggcaccaccagccccaucuccgagcacgacuaccagaucgggggcuacaccgagaagugggagagcggggugaaggacugcgugguccugcacuccuacuucacgagcgacuacuaccagcuguacuccacccagcucagcaccgacaccggcguggagcacgugacguucuucaucuacaacaagaucgucgacgagcccgaggagcacgugcagauccacaccaucgacggguccagcggcguggucaaccccgugauggagagcaucuacgacgagccgaccaccacgaccuccgugccccuguga

SEQ ID NO: 18595 - RNA, 828 nt, Artificial Sequence
  SARS-CoV-2__MT892988.1__ORF3a protein CDS gc
auggaccuguucaugcgcaucuucaccaucggcaccgugacgcucaagcagggggagaucaaggacgccacccccagcgacuucguccgggccaccgcgaccaucccgauccaggccucccugcccuucggcuggcugaucguggggguggcccuccuggccgucuuccagagcgccuccaagaucaucacgcugaagaagcgcuggcagcucgcgcugagcaagggcgugcacuucgugugcaaccugcuccugcuguucgucaccguguacucccaccuccugcugguggccgccgggcucgaggcccccuuccuguaccuguacgcgcucgucuacuuccugcagagcaucaacuucgugcggaucaucaugcgccuguggcucugcuggaagugccgguccaagaacccccugaucuacgacgccaacuacuuccugugcuggcacaccaacugcuacgacuacugcaucccguacaacagcgugaccuccagcaucgucaucacguccggcgacggcaccaccagccccaucuccgagcacgacuaccagaucgggggcuacaccgagaagugggagagcggggugaaggacugcgugguccuccacuccuacuucacgagcgacuacuaccagcuguacuccacccagcugagcaccgacaccggcguggagcacgugacguucuucaucuacaacaagaucgucgacgagcccgaggagcacgugcagauccacaccaucgacggguccagcggcguggucaaccccgugauggagccgaucuacgacgagcccaccaccacgaccagcgugccccucuga

SEQ ID NO: 18596 - RNA, 828 nt, Artificial Sequence
  SARS-CoV-2__MT892993.1__ORF3a protein CDS gc
auggaccuguucaugcgcaucuucaccaucggcaccgugacgcucaagcagggggagaucaaggacgccacccccagcgacuucguccgggccaccgcgaccaucccgauccaggccucccugcccuucggcuggcugaucguggggguggcccucuucgccgucuuccagagcgccuccaagaucaucacgcugaagaagcgcuggcagcuggcgcucagcaagggcgugcacuucgugugcaaccugcugcuccuguucgucaccguguacucccaccuccugcugguggccgccgggcuggaggcccccuuccucuaccuguacgcgcuggucuacuuccuccagagcaucaacuucgugcggaucaucaugcgccuguggcugugcuggaagugccgguccaagaacccccuccuguacgacgccaacuacuuccugugcuggcacaccaacugcuacgacuacugcaucccguacaacagcgugaccuccagcaucgucaucacguccggcgacggcaccaccagccccaucuccgagcacgacuaccagaucgggggcuacaccgagaagugggagagcggggugaaggacugcgugguccuccacuccuacuucacgagcgacuacuaccagcuguacuccacccagcugagcaccgacaccggcguggagcacgugacguucuucaucuacaacaagaucgucgacgagcccgaggagcacgugcagauccacaccaucgacggguccagcggcguggucaaccccgugauggagccgaucuacgacgagcccaccaccacgaccagcgugccccucuga

SEQ ID NO: 18597 - RNA, 828 nt, Artificial Sequence
  SARS-CoV-2__MT893011.1__ORF3a protein CDS gc
auggaccuguucaugcgcaucuucaccaucggcaccgugacgcucaagcagggggagaucaaggacgccacccccagcgacuucguccgggccaccgcgaccaucccgauccaggccucccugcccuucggcuggcugaucguggggguggcccuccuggccgucuuccagagcgccuccaagaucaucacgcugaagaagcgcuggcagcucgcgcugagcaagggcgugcacuucgugugcaaccugcuccugcuguucgucaccguguacucccaccuccugcugguggccgccgggcucgaggcccccuuccuguaccuguacgcgcucgucuacuuccugcagagcaucaacuucgugcggaucaucaugcgccuguggcucugcuggaagugccgguccaagaacccccuguucuacgacgccaacuacuuccugugcuggcacaccaacugcuacgacuacugcaucccguacaacagcgugaccuccagcaucgucaucacguccggcgacggcaccaccagccccaucuccgagcacgacuaccagaucgggggcuacaccgagaagugggagagcggggugaaggacugcgugguccuccacuccuacuucacgagcgacuacuaccagcuguacuccacccagcugagcaccgacaccggcguggagcacgugacguucuucaucuacaacaagaucgucgacgagcccgaggagcacgugcagauccacaccaucgacguguccagcggggucgugaaccccgugauggagccgaucuacgacgagcccaccaccacgaccagcgucccccucuga

SEQ ID NO: 18598 - RNA, 828 nt, Artificial Sequence
  SARS-CoV-2__MT883503.1__ORF3a protein CDS gc
auggaccuguucaugcgcaucuucaccaucggcaccgugacgcucaagcagggggagaucaaggacgccacccccagcgacuucguccgggccaccgcgaccaucccgauccaggccucccugcccuucggcuggcugaucguggggguggcccuccuggccgucuuccagagcgccuccaagaucaucacgcugaagaagcgcuggcagcucgcgcugagcaagggcgugcacuucgugugcaaccugcuccugcuguucgucaccguguacucccaccuccugcugguggccgccgggcucgaggcccccuuccuguaccuguacgcgcucgucuacuuccugcagagcaucaacuucgugcggaucaucaugcgccuguggcucugcuggaagugccgguccaagaacccccugcuguacgacgccaacuacuuccucugcuggcacaccaacugcuacgacuacugcaucccguacaacagcgugaccuccagcaucgucaucacguccggcgacggcaccaccagccccaucuccgagcacgacuaccagaucgggggcuacaccgagaagugggagagcggggugaaggacugcgugguccugcacuccuacuucacgagcgacuacuaccagcuguacuccacccagcucagcaccgacaccggcguggagcacgugacguucuucaucuacaacaagaucgucgacgagcuggaggagcacgugcagauccacaccaucgacggguccagcggcguggucaaccccgugauggagcccaucuacgacgagccgaccaccacgaccagcgugccccuguga

SEQ ID NO: 18599 - RNA, 828 nt, Artificial Sequence
  SARS-CoV-2__MT886294.1__ORF3a protein CDS gc
auggaccuguucaugcgcaucuucaccaucggcaccgugacgcucaagcagggggagaucaaggacgccacccccagcgacuucguccgggccaccgcgaccaucccgauccaggccucccugcccuucggcuggcugaucguggggguggcccuccuggccgucuuccagagcgccuccaagaucaucacgcugaagaagcgcuggcagcucgcgcugagcaagggcgugcacuucgugugcaaccugcuccugcuguucgucaccguguacucccaccuccugcugguggccgccgggcucgaggcccccuuccuguaccuguacgcgcucgucuacuuccugcagagcaucaacuucgugcggaucaucaugcgccuguggcucugcuggaagugccgguccaagaacccccugcuguacgacgccaacuacuuccucugcuggcacaccaacugcuacgacuacugcgugccguacaacagcgucaccuccagcaucgugaucacguccggcgacggcaccaccagccccaucuccgagcacgacuaccagaucgggggcuacaccgagaagugggagagcggggugaaggacugcgucgugcugcacuccuacuucacgagcgacuacuaccagcuguacuccacccagcucagcaccgacaccggcguggagcacgucacguucuucaucuacaacaagaucguggacgagcccgaggagcacgugcagauccacaccaucgacggguccagcggcgucgugaaccccgugauggagccgaucuacgacgagcccaccaccacgaccagcgucccccuguga

SEQ ID NO: 18600 - RNA, 828 nt, Artificial Sequence
  SARS-CoV-2__MT886301.1__ORF3a protein CDS gc
auggaccuguucaugcgcaucuucaccaucggcaccgugacgcucaagcagggggagaucaaggacgccacccccagcgacuucguccgggccaccgcgaccaucccgauccaggccucccugcccuucggcuggcugaucguggggguggcccuccuggccgucuuccagagcgccuccaagaucaucacgcugaagaaccgcuggcagcucgcgcugagcaagggcgugcacuucgugugcaaccugcuccugcuguucgucaccguguacucccaccuccugcugguggccgccgggcucgaggcccccuuccuguaccuguacgcgcucgucuacuuccugcagagcaucaacuucgugcggaucaucaugcgccuguggcucugcuggaagugccgguccaagaacccccugcuguacgacgccaacuacuuccucugcuggcacaccaacugcuacgacuacugcaucccguacaacagcgugaccuccagcaucgucaucacguccggcgacggcaccaccagccccaucuccgagcacgacuaccagaucgggggcuacaccgagaagugggagagcggggugaaggacugcgugguccugcacuccuacuucacgagcgacuacuaccagcuguacuccacccagcucagcaccgacaccggcguggagcacgugacguucuucaucuacaacaagaucgucgacgagcccgaggagcacgugcagauccacaccaucgacggguccagcggcguggucaaccccgugauggagccgaucuacgacgagcccaccaccacgaccagcgugccccuguga

SEQ ID NO: 18601 - RNA, 828 nt, Artificial Sequence
  SARS-CoV-2__MT886348.1__ORF3a protein CDS gc
auggaccuguucaugcgcaucuucaccaucggcaccgugacgcucaagcagggggagaucaaggacgccacccccagcgacuucguccgggccaccgcgaccaucccgauccaggccucccugcccuucggcuggcugaucguggggguggcccuccuggccgucuuccacagcgccuccaagaucaucacgcugaagaagcgcuggcagcucgcgcugagcaagggcgugcacuucgugugcaaccugcuccugcuguucgucaccguguacucccaccuccugcugguggccgccggguucgaggcccccuuccucuaccuguacgcgcuggucuacuuccuccagagcaucaacuucgugcggaucaucaugcgccuguggcugugcuggaagugccgguccaagaacccccuccuguacgacgccaacuacuuccugugcuggcacaccaacugcuacgacuacugcaucccguacaacagcgugaccuccagcaucgucaucacguccggcgacggcaccaccagccccaucuccgagcacgacuaccagaucgggggcuacaccgagaagugggagagcggggugaaggacugcgugguccuccacuccuacuucacgagcgacuacuaccagcuguacuccacccagcugagcaccgacaccggcguggagcacgugacguucuucaucuacaacaagaucgucgacgagcccgaggagcacgugcagauccacaccaucgacggguccagcggcguggucaaccccgugauggagccgaucuacgacgagcccaccaccacgaccagcgugccccucuga

SEQ ID NO: 18602 - RNA, 828 nt, Artificial Sequence
  SARS-CoV-2__MT886385.1__ORF3a protein CDS gc
auggaccuguucaugcgcaucuucaccaucggcaccgugacgcucaagcagggggagaucaaggacgccacccccagcgacuucguccgggccaccgcgaccaucccgauccaggccucccugcccuucggcuggcugaucguggggguggcccuccuggccgucuuccacagcgccuccaagaucaucacgcugaagaagcgcuggcagcucgcgcugagcaagggcgugcacuucgugugcaaccugcuccugcuguucgucaccguguacucccaccuccugcugguggccgccgggcucgaggccagcuuccuguaccuguacgcgcucgucuacuuccugcaguccaucaacuucgugcggaucaucaugcgccuguggcucugcuggaagugccggagcaagaacccccugcuguacgacgccaacuacuuccucugcuggcacaccaacugcuacgacuacugcauccccuacaacuccgugaccagcuccaucgucaucacgagcggcgacggcaccaccuccccgaucagcgagcacgacuaccagaucgggggcuacaccgagaagugggaguccggggugaaggacugcgugguccugcacagcuacuucacguccgacuacuaccagcuguacagcacccagcucuccaccgacaccggcguggagcacgugacguucuucaucuacaacaagaucgucgacgagcccgaggagcacgugcagauccacaccaucgacgggagcagcggcguggucaaccccgugauggagcccaucuacgacgagccgaccaccacgaccuccgugccccuguga

SEQ ID NO: 18603 - RNA, 828 nt, Artificial Sequence
  SARS-CoV-2__MT873050.1__ORF3a protein CDS gc
auggaccuguucaugcgcaucuucaccaucggcaccgugacgcucaagcagggggagaucaaggacgccacccccagcgacuucguccgggccaccgcgaccaucccgauccaggccucccugcccuucggcuggcugaucguggggguggcccuccuggccgucuuccagagcgccuccaagaucaucacgcugaagaagcgcuggcagcucgcgcugagcaagggcgugcacuucgugugcaaccugcuccugcuguucgucaccguguacucccaccuccugcugguggccgccgggcucgaggcccccuuccuguacuucuacgcgcuggucuacuuccuccagagcaucaacuucgugcggaucaucaugcgccuguggcugugcuggaagugccgguccaagaacccccuccuguacgacgccaacuacuuccugugcuggcacaccaacugcuacgacuacugcaucccguacaacagcgugaccuccagcaucgucaucacguccggcgacggcaucaccagccccaucuccgagcacgacuaccagaucgggggcuacaccgagaagugggagagcggggugaaggacugcgugguccuccacuccuacuucaccagcgacuacuaccagcuguacuccacgcagcugagcaccgacaccggcguggagcacgugaccuucuucaucuacaacaagaucgucgacgagcccgaggagcacgugcagauccacacgaucgacggguccagcggcguggucaaccccgugauggagccgaucuacgacgagcccaccaccaccacgagcgugccccucuga

SEQ ID NO: 18604 - RNA, 828 nt, Artificial Sequence
  SARS-CoV-2__MT873062.1__ORF3a protein CDS gc
auggaccuguucgugcgcaucuucaccaucggcaccgucacgcucaagcagggggagaucaaggacgccacccccagcgacuucgugcgggccaccgcgaccaucccgauccaggccucccugcccuucggcuggcugaucgugggggucgcccuccuggccguguuccacagcgccuccaagaucaucacgcugaagaagcgcuggcagcucgcgcugagcaagggcgugcacuucgucugcaaccugcuccugcuguucgugaccguguacucccaccuccugcuggucgccgccgggcucgaggcccccuuccuguaccuguacgcgcucguguacuuccugcagagcaucaacuucgugcggaucaucaugcgccuguggcucugcuggaagugccgguccaagaacccccugcuguacgacgccaacuacuuccucugcuggcacaccaacugcuacgacuacugcaucccguacaacagcgucaccuccagcaucgugaucacguccggcgacggcaccaccagccccaucuccgagcacgacuaccagaucgggggcuacaccgagaagugggagagcggggugaaggacugcgucgugcugcacuccuacuucacgagcgacuacuaccagcuguacuccacccagcucagcaccgacaccggcguggagcacgucacguucuucaucuacaacaagaucguggacgagcccgaggagcacgugcagauccacaccaucgacggguccagcggcgucgugaaccccgugauggagccgaucuacgacgagcccaccaccacgaccagcgucccccuguga

SEQ ID NO: 18605 - RNA, 828 nt, Artificial Sequence
  SARS-CoV-2__MT873078.1__ORF3a protein CDS gc
auggaccuguucaugcgcaucuucaccaucggcaccgugacgcucaagcagggggagaucaaggacgccacccccagcgacuucguccgggccaccgcgaccaucccgauccaggccucccugcccuucggcuggcugaucguggggguggcccuccuggccgucuuccacagcgccuccaagaucaucacgcugaagaagcgcuggcagcucgcgcugagcaagggcgugcacuucgugugcaaccugcuccugcuguucgucaccguguacucccaccuccugcugguggccgccgggcucgaggcccccuuccuguaccuguacgcgcucgucuacuuccugcagagcaucaacuucgugcggaucaucaugcgccuguggcucugcugcaagugccgguccaagaacccccugcuguacgacgccaacuacuuccucugcuggcacaccaacugcuacgacuacugcaucccguacaacagcgugaccuccagcaucgucaucacguccggcgacggcaccaccagccccaucuccgagcacgacuaccagaucgggggcuacaccgagaagugggagagcggggugaaggacugcgugguccugcacuccuacuucacgagcgacuacuaccagcuguacuccacccagcucagcaccgacaccggcguggagcacgugacguucuucaucuacaacaagaucgucgacgagcccgaggagcacgugcagauccacaccaucgacggguccagcggcguggucaaccccgugauggagccgaucuacgacgagcccaccaccacgaccagcgugccccuguga

SEQ ID NO: 18606 - RNA, 828 nt, Artificial Sequence
  SARS-CoV-2__MT873085.1__ORF3a protein CDS gc
auggaccuguucaugcgcaucuucaccaucggcaccgugacgcucaagcagggggagaucaaggacgccacccccagcgacuucguccgggccaccgcgaccaucccgauccaggccucccugcccuucggcuggcugaucguggggguggcccuccuggccgucuuccacagcgccuccaagaucaucacgcugaagaagcgcuggcagcucgcgcugagcaagggcgugcacuucgugugcaaccugcuccugcuguucgucaccguguacucccacuuccuccugguggccgccgggcuggaggcccccuuccucuaccuguacgcgcuggucuacuuccuccagagcaucaacuucgugcggaucaucaugcgccuguggcugugcuggaagugccgguccaagaacccccuccuguacgacgccaacuacuuccugugcuggcacaccaacugcuacgacuacugcaucccguacaacagcgugaccuccagcaucgucaucacguccggcgacggcaccaccagccccaucuccgagcacgacuaccagaucgggggcuacaccgagaagugggagagcggggugaaggacugcgugguccuccacuccuacuucacgagcgacuacuaccagcuguacuccacccagcugagcaccgacaccggcguggagcacgugacguucuucaucuacaacaagaucgucgacgagcccgaggagcacgugcagauccacaccaucgacggguccagcggcguggucaaccccgugauggagccgaucuacgacgagcccaccaccacgaccagcgugccccucuga

SEQ ID NO: 18607 - RNA, 825 nt, Artificial Sequence
  SARS-CoV-2__MT873087.1__ORF3a protein CDS gc
auggaccuguucaugcgcaucuucaccaucggcaccgugacgcucaagcagggggagaucaaggacgccacccccagcgacuucguccgggccaccgcgaccaucccgauccaggccucccugcccuucggcuggcugaucguggggguggcccuccuggccgucuuccacagcgccuccaagaucaucacgcugaagaagcgcuggcagcucgcgcugagcaagggcgugcacuucgugugcaaccugcuccugcuguucgucaccguguacucccaccuccugcugguggccgccgggcucgaggcccccuuccuguaccuguacgcgcucgucuacuuccugcagagcaucaacuucgugcggaucaucaugcgccuguggcucugcuggaagugccgguccaagaacccccugcuguacgacgccaacuacuuccucugcuggcacaccaacugcuacgacuacugcaucccguacaacagcgugaccuccagcaucgucaucacguccggcgacggcaccaccagccccaucuccgagcacgacuaccagaucgggggcuacaccgagaagugggagagcggggugaaggacugcgugguccugcacuccuacuucacgagcgacuacuaccagcuguacuccacccagcucagcaccgacaccggcguggagcacgugacguucuucaucuacaacaagaucgucgacgagcccgaggagcacgugcagauccacaccaucgacggguccagcggcgugaaccccgucauggagccgaucuacgacgagcccaccaccacgaccagcgugccccuguga

SEQ ID NO: 18608 - RNA, 828 nt, Artificial Sequence
  SARS-CoV-2__MT873115.1__ORF3a protein CDS gc
auggaccuguucaugcgcaucuucaccaucggcaccgugacgcucaagcagggggagaucaaggacgccacccccagcgacuucguccgggccaccgcgaccaucccgauccaggccucccugcccuucggcuggcugaucguggggguggcccuccuggccgucuuccacagcgccuccaagaucaucacgcugaagaagcgcuggcagcucgcgcugagcaagggcgugcacuucgugugcaaccugcuccugcuguucgucaccguguacucccaccuccugcugguggccgccgggcucgaggcccccuuccuguaccuguacgcgcucgucuacuuccugcagagcaucaacuucgugcggaucaucaugcgccuguggcucugcuggaagugccgguccaagaacccccugcuguacgacgccaacuacuuccucugcuggcacaccaacugcuacgacuacugcaucccguacaacagcgugaccuccagcaucaucaucacguccggcgacggcaccaccagccccaucuccgagcacgacuaccagaucgggggcuacaccgagaagugggagagcggggucaaggacugcguggugcugcacuccuacuucacgagcgacuacuaccagcuguacuccacccagcucagcaccgacaccggcgucgagcacgugacguucuucaucuacaacaagaucguggacgagcccgaggagcacguccagauccacaccaucgacggguccagcggcguggugaaccccgucauggagccgaucuacgacgagcccaccaccacgaccagcgugccccuguga

SEQ ID NO: 18609 - RNA, 828 nt, Artificial Sequence
  SARS-CoV-2__MT873125.1__ORF3a protein CDS gc
auggaccuguucaugcgcaucuucaccaucggcaccgugacgcucaagcagggggagaucaaggacgccacccccagcgacuucguccgggccaccgcgaccaucccgauccaggccucccugcccuucggcuggcugaucguggggguggcccuccuggccgucuuccacagcgccuccaagaucaucacgcugaagaagcgcuggcagcucgcgcugagcaagggcgugcacuucgugugcaaccugcuccugcuguucgucaccguguacucccaccuccugcugguggccgccgggcucgaggcccccuuccuguaccuguacgcgcucgucuacuuccugcagagcaucaacuucgugcggaucaucaugcgccuguggcucugcuggaagugccgguccaagaacccccugcuguacgacgccaacuacuuccucugcuggcacaccaacugcuacgacuacugcaucccguacaacagcgugaccuccagcaucgucaucacguccggcgacggcaccaccagccccaucuccgagcacgacuaccagaucgggggcuacaccgagaagugggagagcggggugaaggacugcgugguccugcacuccuacuucacgagcgacuacuaccagcuguacuccacccagcucagcaccgacaccggcguggagcacgugacguucuucaucuacaacaagaucgucgacgagcccgaggagcacgugcagauccacaccaucgacggguccagccgcguggucaaccccgugauggagccgaucuacgacgagcccaccaccacgaccagcgugccccuguga

SEQ ID NO: 18610 - RNA, 828 nt, Artificial Sequence
  SARS-CoV-2__MT873139.1__ORF3a protein CDS gc
auggaccuguucaugcgcaucuucaccaucggcaccgugacgcucaagcagggggagaucaaggacgccacccccagcgacuucguccgggccaccgcgaccaucccgauccaggccucccugcccuucggcuggcugaucguggggguggcccuccuggccgucuuccacagcgccuccaagaucaucacgcugaagaagcgcuggcagcucgcgcugagcaagggcgugcacuucgugugcaaccugcuccugcuguucgucaccguguacucccaccuccugcugguggccgucgggcucgaggcccccuuccuguaccuguacgcccucguguacuuccugcagagcaucaacuucgugcggaucaucaugcgccuguggcucugcuggaagugccgguccaagaacccccugcuguacgacgcgaacuacuuccucugcuggcacaccaacugcuacgacuacugcaucccguacaacagcgucaccuccagcaucgugaucacguccggcgacggcaccaccagccccaucuccgagcacgacuaccagaucgggggcuacaccgagaagugggagagcggggugaaggacugcgucgugcugcacuccuacuucacgagcgacuacuaccagcuguacuccacccagcucagcaccgacaccggcguggagcacgucacguucuucaucuacaacaagaucgccgacgagcccgaggagcacgugcagauccacaccaucgacggguccagcggcguggucaaccccgugauggagccgaucuacgacgagcccaccaccacgaccagcgugccccuguga

SEQ ID NO: 18611 - RNA, 828 nt, Artificial Sequence
  SARS-CoV-2__MT873208.1__ORF3a protein CDS gc
auggaccuguucaugcgcaucuucaccaucggcaccgugacgcucaagcagggggagaucaaggacgccacccccagcgacuucguccgggccaccgcgaccaucccgauccaggccucccugcccuucggcuggcugaucguggggguggcccuccuggccgucuuccacagcgccuccaagaucaucacgcugaagaagcgcuggcagcucgcgcugagcaagggcgugcacuucgugugcaaccugcuccugcuguucgucaccguguacucccaccuccugcugguggccgccgggcucgaggcccccuuccuguaccuguacgcgcucgucuacuuccugcagagcaucaacuucgugcggaucaucaugcgccuguggcucugcuggaagugccgguccaagaacccccugcuguacgacgccaacuacuuccucugcuggcacaccaacugcuacgacuacugcaucccgcacaacagcgugaccuccagcaucgucaucacguccggcgacggcaccaccagccccaucuccgagcacgacuaccagaucgggggcuacaccgagaagugggagagcggggugaaggacugcgugguccugcacuccuacuucacgagcgacuacuaccagcuguacuccacccagcucagcaccgacaccggcguggagcacgugacguucuucaucuacaacaagaucgucgacgagcccgaggagcacgugcagauccacaccaucgacggguccagcggcguggucaaccccgugauggagccgaucuacgacgagcccaccaccacgaccagcgugccccuguga

SEQ ID NO: 18612 - RNA, 828 nt, Artificial Sequence
  SARS-CoV-2__MT873256.1__ORF3a protein CDS gc
auggaccuguucaugcgcaucuucaccaucggcaccgugacgcucaagcagggggagaucaaggacgccacccccagcgacuucguccgggccaccgcgaccaucccgauccaggccucccugcccuucggcuggcugaucguggggguggcccuccuggccgucuuccacagcgccuccaagaucaucacgcugaagaagcgcuggcagcucgcgcugagcaagggcgugcacuucgugugcaaccugcuccugcuguucgucaccguguacucccaccuccugcugguggccgccgggcucgaggcccccuuccuguaccuguacagccucgucuacuuccugcaguccaucaacuucgugcggaucaucaugcgccuguggcucugcuggaagugccggagcaagaacccccugcuguacgacgcgaacuacuuccucugcuggcacaccaacugcuacgacuacugcaucccguacaacuccgugaccagcuccaucgucaucacgagcggcgacggcaccaccucccccaucagcgagcacgacuaccagaucgggggcuacaccgagaagugggaguccggggugaaggacugcgugguccugcacagcuacuucacguccgacuacuaccagcuguacagcacccagcucuccaccgacaccggcguggagcacgugacguucuucaucuacaacaagaucgucgacgagcccgaggagcacgugcagauccacaccaucgacgggagcagcggcguggucaaccccgugauggagccgaucuacgacgagcccaccaccacgaccuccgugccccuguga

SEQ ID NO: 18613 - RNA, 828 nt, Artificial Sequence
  SARS-CoV-2__MT873272.1__ORF3a protein CDS gc
auggaccuguucaugcgcaucuucaccaucggcaccgugacgcucaagcagggggagaucaaggacgccacccccagcgacuucguccgggccaccgcgaccaucccgauccaggccucccugcccuucggcuggcugaucguggggguggcccuccuggccgucuuccacagcgccuccaagaucaucacgcugaagaagcgcuggcagcucgcgcugagcaagggcgugcacuucgugugcaaccugcuccugcuguucgucaccguguacucccaccuccugcugguggccgccgggcucgaggcccccuuccuguaccuguacgcgcucgucuacuuccugcagagcaucaacuucgugcgggugaucaugcgccuguggcucugcuggaagugccgguccaagaacccccugcuguacgacgccaacuacuuccucugcuggcacaccaacugcuacgacuacugcaucccguacaacagcgucaccuccagcaucgugaucacguccggcgacggcaccaccagccccaucuccgagcacgacuaccagaucgggggcuacaccgagaagugggagagcggggugaaggacugcgucgugcugcacuccuacuucacgagcgacuacuaccagcuguacuccacccagcucagcaccgacaccggcguggagcacgucacguucuucaucuacaacaagaucguggacgagcccgaggagcacgugcagauccacaccaucgacggguccagcggcgucgugaaccccgugauggagccgaucuacgacgagcccaccaccacgaccagcgucccccuguga

SEQ ID NO: 18614 - RNA, 828 nt, Artificial Sequence
  SARS-CoV-2__MT873280.1__ORF3a protein CDS gc
auggaccuguucaugcgcaucuucaccaucggcaccgugacgcucaagcagggggagaucaaggacgccacccccagcgacuucguccgggccaccgcgaccaucccgauccaggccucccugcccuucggcuggcugaucguggggguggcccuccuggccgucuuccacagcgccuccaagaucaucacgcugaagaagcgcuggcagcucgcgcugagcaagggcgugcacuucgugugcaaccugcuccugcuguucgucaccguguacucccaccuccugcugguggccgccgggcucgaggcccccuuccuguaccuguacgcgcucgucuacuuccugcagagcaucaacuucgugcggaucaucaugcgccuguggcucugcuggaagugccgguccaagaacccccugcuguacgacgccaacuacuuccucugcuggcacaccaacugcuacgacuacugcaucccguacaacagcgugaccuccagcaucgucaucacguccggcgacggcaucaccagccccaucuccgagcacgacuaccagaucgggggcuacaccgagaagugggagagcggggugaaggacugcgugguccugcacuccuacuucaccagcgacuacuaccagcuguacuccacgcagcucagcaccgacaccggcguggagcacgugaccuucuucaucuacaacaagaucgucgacgagcccgaggagcacgugcagauccacacgaucgacggguccagcggcguggucaaccccgugauggagccgaucuacgacgagcccaccaccaccacgagcgugccccuguga

SEQ ID NO: 18615 - RNA, 828 nt, Artificial Sequence
  SARS-CoV-2__MT873282.1__ORF3a protein CDS gc
auggaccuguucaugcgcaucuucaccaucggcacccucacgcugaagcagggggagaucaaggacgccacccccagcgacuucgugcgggccaccgcgaccaucccgauccaggccucccugcccuucggcuggcucaucgucgggguggcccugcuggccguguuccagagcgccuccaagaucaucacgcucaagaagcgcuggcagcuggcgcugagcaagggcguccacuucgugugcaaccuccugcugcuguucgugaccgucuacucccaccuccugcucguggccgccgggcuggaggcccccuuccuguaccucuacgcgcugguguacuuccugcagagcaucaacuucguccggaucaucaugcgccucuggcugugcuggaagugccgguccaagaacccccugcucuacgacgccaacuacuuccugugcuggcacaccaacugcuacgacuacugcaucccguacaacagcgugaccuccagcaucgugaucacguccggcgacggcaccaccagccccaucuccgagcacgacuaccagaucgggggcuacaccgagaagugggagagcggggucaaggacugcguggugcugcacuccuacuucacgagcgacuacuaccagcucuacuccacccagcugagcaccgacaccggcgucgagcacgugacguucuucaucuacaacaagaucguggacgagcccgaggagcacguccagauccacaccaucgacggguccagcggcguggugaaccccgucauggagccgaucuacgacgagcccaccaccacgaccagcgugccccuguga

SEQ ID NO: 18616 - RNA, 828 nt, Artificial Sequence
  SARS-CoV-2__MT873298.1__ORF3a protein CDS gc
auggaccuguucaugcgcaucuucaccaucggcaccgugacgcucaagcagggggagaucaaggacgccacccccagcgacuucguccgggccaccgcgaccaucccgauccaggccucccugcccuucggcuggcugaucguggggguggcccuccuggccgucuuccacagcgccuccaagaucaucacgcugaagaagcgcuggcagcucgcgcugagcaagggcgugcacuucgugugcaaccugcuccugcuguucgucaccguguacucccaccuccugcugguggccgccgggcucgaggcgccccugcuguaccucuacgcccuggucuacuuccugcagagcaucaacuucgugcggaucaucaugcgccucuggcugugcuggaagugccgguccaagaacccccugcucuacgacgccaacuacuuccugugcuggcacaccaacugcuacgacuacugcaucccguacaacagcgugaccuccagcaucgucaucacguccggcgacggcaccaccagccccaucuccgagcacgacuaccagaucgggggcuacaccgagaagugggagagcggggugaaggacugcgugguccugcacuccuacuucacgagcgacuacuaccagcucuacuccacccagcugagcaccgacaccggcguggagcacgugacguucuucaucuacaacaagaucgucgacgagcccgaggagcacgugcagauccacaccaucgacggguccagcggcguggucaaccccgugauggagccgaucuacgacgagcccaccaccacgaccagcgugccccuguga

SEQ ID NO: 18617 - RNA, 828 nt, Artificial Sequence
  SARS-CoV-2__MT873299.1__ORF3a protein CDS gc
auggaccuguucaugcgcaucuucaccaucggcaccgugacgcucaagcagggggagaucaaggacgccacccccagcgacuucguccgggccaccgcgaccaucccgauccaggccucccugcccuucggcuggcugaucguggggguggcccuccuggccgucuuccacagcgccuccaagaucaucacgcugaagaagcgcuggcagcucgcgcugagcaagggcgugcacuucgugugcaaccugcuccugcuguucgucaccguguacucccaccuccugcugguggccgccgggcucgaggcccccuuccuguaccuguacgcgcucgucuacuuccugcagagcaucaacuucgugcggaucaucaugcgccuguggcucugcuggaagugccgguccaagaacccccugcuguacgacgccaacuacuuccucugcuggcacaccaacugcuacgacuacugcaucccguacaacagcgugaccuccagcaucgucaucacguccggcgacggcaagaccagccccaucuccgagcacgacuaccagaucgggggcuacaccgagaagugggagagcggggugaaggacugcgugguccugcacuccuacuucaccagcgacuacuaccagcuguacuccacgcagcucagcaccgacaccggcguggagcacgugaccuucuucaucuacaacaagaucgucgacgagcccgaggagcacgugcagauccacacgaucgacggguccagcggcguggucaaccccgugauggagccgaucuacgacgagcccaccaccaccacgagcgugccccuguga

SEQ ID NO: 18618 - RNA, 828 nt, Artificial Sequence
  SARS-CoV-2__MT873363.1__ORF3a protein CDS gc
auggaccuguucaugcgcaucuucaccaucggcaccgugacgcucaagcagggggagaucaaggacgccacccccagcuacuucguccgggccaccgcgaccaucccgauccaggccucccugcccuucggcuggcugaucguggggguggcccuccuggccgucuuccacagcgccuccaagaucaucacgcugaagaagcgcuggcagcucgcgcugagcaagggcgugcacuucgugugcaaccugcuccugcuguucgucaccguguacucccaccuccugcugguggccgccgggcucgaggcccccuuccuguaccuguacgcgcucgucuacuuccugcagagcaucaacuucgugcggaucaucaugcgccuguggcucugcuggaagugccgguccaagaacccccugcuguacgacgccaacuacuuccucugcuggcacaccaacugcuacgacuacugcaucccguacaacagcgugaccuccagcaucgucaucacguccggcgacggcaccaccagccccaucuccgagcacgacuaccagaucgggggcuacaccgagaagugggagagcggggugaaggacugcgugguccugcacuccuacuucacgagcgacuacuaccagcuguacuccacccagcucagcaccgacaccggcguggagcacgugacguucuucaucuacaacaagaucgucgacgagcccgaggagcacgugcagauccacaccaucgacggguccagcggcguggucaaccccgugauggagccgaucuacgacgagcccaccaccacgaccagcgugccccuguga

SEQ ID NO: 18619 - RNA, 828 nt, Artificial Sequence
  SARS-CoV-2__MT873375.1__ORF3a protein CDS gc
auggaccuguucaugcgcaucuucaccaucggcaccgugacgcucaagcagggggagaucaaggacgccacccccagcgacuucguccgggccaccgcgaccaucccgauccaggccucccugcccuucggcuggcugaucguggggguggcccuccuggccgucuuccacagcgccuccaagaucaucacgcugaagaagcgcuggcagcucgcgcugagcaagggcgugcacuucgugugcaaccugcuccugcuguucgucaccguguacucccacauccuccugguggccgccgggcuggaggcccccuuccucuaccuguacgcgcuggucuacuuccuccagagcaucaacuucgugcggaucaucaugcgccuguggcugugcuggaagugccgguccaagaacccccuccuguacgacgccaacuacuuccugugcuggcacaccaacugcuacgacuacugcaucccguacaacagcgugaccuccagcaucgucaucacguccggcgacggcaccaccagccccaucuccgagcacgacuaccagaucgggggcuacaccgagaagugggagagcggggugaaggacugcgugguccuccacuccuacuucacgagcgacuacuaccagcuguacuccacccagcugagcaccgacaccggcguggagcacgugacguucuucaucuacaacaagaucgucgacgagcccgaggagcacgugcagauccacaccaucgacggguccagcggcguggucaaccccgugauggagccgaucuacgacgagcccaccaccacgaccagcgugccccucuga

SEQ ID NO: 18620 - RNA, 828 nt, Artificial Sequence
  SARS-CoV-2__MT876554.1__ORF3a protein CDS gc
auggaccuguucaugcgcaucuucaccaucggcaccgugacgcucaagcagggggagaucaaggacgccacccccagcgacuucguccgggccaccgcgaccaucccgauccaggccucccugcccuucggcuggcugaucguggggguggcccuccuggccgucuuccagagcgccuccaagaucaucacgcugaagaagcgcuggcagcucgcgcugagcaagggcgugcacuucgugugcaaccugcuccugcuguucgucaccguguacucccaccuccugcugguggccgccgggcucgaggcccccuuccuguaccuguacgcgcucgucuacuuccugcagagcaucaacuucgugcggaucaucaugcgccuguggcucugcuggaagugccgguccaagaacccccugcuguacgacgccaacuacuuccucugccugcacaccaacugcuacgacuacugcaucccguacaacagcgugaccuccagcaucgucaucacguccggcgacggcaccaccagccccaucuccgagcacgacuaccagaucgggggcuacaccgagaagugggagagcggggugaaggacugcgugguccugcacuccuacuucacgagcgacuacuaccagcucuacuccacccagcugagcaccgacaccggcguggagcacgugacguucuucaucuacaacaagaucgucgacgagcccgaggagcacgugcagauccacaccaucgacggguccagcggcguggucaaccccgugauggagccgaucuacgacgagcccaccaccacgaccagcgugccccuguga

SEQ ID NO: 18621 - RNA, 828 nt, Artificial Sequence
  SARS-CoV-2__MT872492.1__ORF3a protein CDS gc
auggaccuguucaugcgcaucuucaccaucggcaccgugacgcucaagcagggggagaucaaggacgccacccccagcgacuucguccgggccaccgcgaccaucccgauccaggccucccugcccuucggcuggcugaucguggggguggcccuccuggccgucuuccagagcgccuccaagaucaucacgcugaagaagcgcuggcagcucgcgcugagcaagggcgugcacuucgugugcaaccugcuccugcuguucgucaccguguacucccaccuccugcugguggccgccgggcucgaggccagcuuccuguaccuguacgcgcucgucuacuuccugcaguccaucaacuucgugcggaucaucaugcgccuguggcucugcuggaagugccggagcaagaacccccugcuguacgacgccaacuacuuccucugcuggcacaccaacugcuacgacuacugcauccccuacaacuccgugaccagcuccaucgucaucacgagcggcgacggcaccaccuccccgaucagcgagcacgacuaccagaucgggggcuacaccgagaagugggaguccggggugaaggacugcgugguccugcacagcuacuucacguccgacuacuaccagcuguacagcacccagcucuccaccgacaccggcguggagcacgugacguucuucaucuacaacaagaucgucgacgagcccgaggagcacgugcagauccacaccaucgacgggagcagcggcguggucaaccccgugauggagcccaucuacgacgagccgaccaccacgaccuccgugccccuguga

SEQ ID NO: 18622 - RNA, 828 nt, Artificial Sequence
  SARS-CoV-2__MT872494.1__ORF3a protein CDS gc
augggccuguucaugcgcaucuucaccaucgggaccgugacgcucaagcagggcgagaucaaggacgccacccccagcgacuucguccgggccaccgcgaccaucccgauccaggccucccugcccuucggguggcugaucgugggcguggcccuccuggccgucuuccagagcgccuccaagaucaucacgcugaagaagcgcuggcagcucgcgcugagcaagggggugcacuucgugugcaaccugcuccugcuguucgucaccguguacucccaccuccugcugguggccgccggccucgaggcccccuuccuguaccuguacgcgcucgucuacuuccugcagagcaucaacuucgugcggaucaucaugcgccuguggcucugcuggaagugccgguccaagaacccccugcuguacgacgccaacuacuuccucugcuggcacaccaacugcuacgacuacugcaucccguacaacagcgugaccuccagcaucgucaucacguccggcgacgggaccaccagccccaucuccgagcacgacuaccagaucggcggguacaccgagaagugggagagcggcgugaaggacugcgugguccugcacuccuacuucacgagcgacuacuaccagcuguacuccacccagcucagcaccgacaccgggguggagcacgugacguucuucaucuacaacaagaucgucgacgagcccgaggagcacgugcagauccacaccaucgacggcuccagcggcguggucaaccccgugauggagccgaucuacgacgagcccaccaccacgaccagcgugccccuguga

SEQ ID NO: 18623 - RNA, 825 nt, Artificial Sequence
  SARS-CoV-2__MT846012.1__ORF3a protein CDS gc
auggaccuguucaugcgcaucuucaccaucggcaccgugacgcucaagcagggggagaucaaggacgccacccccagcgacuucguccgggccaccgcgaccaucccgauccaggccucccugcccuucggcuggcugaucguggggguggcccuccuggccgucuuccagagcgccuccaagaucaucacgcugaagaagcgcuggcagcucgcgcugagcaagggcgugcacuucgugugcaaccugcuccugcuguucgucaccguguacucccaccuccugcugguggccgccgggcucgaggcccccuuccuguaccuguacgcgcucgucuacuuccugcagagcaucaacuucgugcggaucaucaugcgccuguggcucugcuggaagugccgguccaagaacccccugcuguacgacgccaacuacuuccucugcuggcacaccaacugcuacgacuacugcaucccguacaacagcgugaccuccagcaucgucaucacguccggcgacggcaccaccagccccaucuccgagcacgacuaccagaucgggggcuacaccgagaagugggagagcggggugaaggacugcgugguccugcacuccuacuucacgagcgacuacuaccagcuguacuccacccagcucagcaccgacaccggcguggagcacgugacguucuucaucuacaacaagaucgucgacgagcccgaggagcacgugcagauccacaccaucgacggguccagcggcguggaccccgucauggagccgaucuacgacgagcccaccaccacgaccagcgugccccuguga

SEQ ID NO: 18624 - RNA, 828 nt, Artificial Sequence
  SARS-CoV-2__MT846420.1__ORF3a protein CDS gc
auggaccuguucaugcgcaucuucaccaucggcaccgugacgcucaagcaggucgagaucaaggacgccacccccagcgacuucgugcgggccaccgcgaccaucccgauccaggccucccugcccuucggguggcugaucgugggcgucgcccuccuggccguguuccagagcgccuccaagaucaucacgcugaagaagcgcuggcagcucgcgcugagcaagggggugcacuucgucugcaaccugcuccugcuguucgugaccguguacucccaccuccugcuggucgccgccggccucgaggcccccuuccuguaccuguacgcgcucguguacuuccugcagagcaucaacuucgugcggaucaucaugcgccuguggcucugcuggaagugccgguccaagaacccccugcuguacgacgccaacuacuuccucugcuggcacaccaacugcuacgacuacugcaucccguacaacagcgucaccuccagcaucgugaucacguccggggacggcaccaccagccccaucuccgagcacgacuaccagaucggcggguacaccgagaagugggagagcggcgugaaggacugcgucgugcugcacuccuacuucacgagcgacuacuaccagcuguacuccacccagcucagcaccgacaccgggguggagcacgucacguucuucaucuacaacaagaucguggacgagcccgaggagcacgugcagauccacaccaucgacggcuccagcggggucgugaaccccgugauggagccgaucuacgacgagcccaccaccacgaccagcgucccccuguga

SEQ ID NO: 18625 - RNA, 828 nt, Artificial Sequence
  SARS-CoV-2__MT846431.1__ORF3a protein CDS gc
auggaccuguucaugcgcaucuucaccaucggcaccgugacgcucaagcagggggagaucaaggacgccacccccagcgacuucguccgggccaccgcgaccaucccgauccaggccucccugcccuucggcuggcugaucguggggguggcccuccuggccgucuuccacagcgccuccaagaucaucacgcugaagaagcgcuggcagcucgcgcugagcaagggcgugcacuucgugugcaaccugcuccugcuguucgucaccguguacucccaccuccugcugguggccgccgggcucgaggcccccuuccuguaccuguacgcgcucgucuacuuccugcagagcaucaacuucgugcggaucaucaugcgccuguggcucugcuggaagugccgguccaagaacccccugcuguacgacgccaacuacuuccucugcuggcacaccaacugcuacgacuacugcaucccguacaacagcgugaccuccagcaucgucaucacguccggcgacggcaccaccagccccaucuccgagcacgacuaccagaucgggggcuacaccgagaagugggagagcggggugaaggacugcgugguccugcacuccuacuucacgagcgacuacuaccagcuguacuccacccagcucagcaccgacaccggcguggagcacgugacguucuucaucuacaacaagaucgucgacgagcccgaggagcacgugcagauccacaccaucgacggguccagcggcguggucaaccccgugauggagccgaucuacgacgagagcaccaccacgaccuccgugccccuguga

SEQ ID NO: 18626 - RNA, 828 nt, Artificial Sequence
  SARS-CoV-2__MT846433.1__ORF3a protein CDS gc
auggaccuguucaugcgcaucuucaccaucggcaccgugacgcucaagcagggggagaucaaggacgccacccccagcgacuucguccgggccaccgcgaccaucccgauccaggccucccugcccuucggcuggcugaucguggggguggcccuccugagcgucuuccaguccgccagcaagaucaucacgcugaagaagcgcuggcagcucgcccuguccaagggcgugcacuucgugugcaaccugcuccugcuguucgucaccguguacagccaccuccugcugguggcggccgggcucgaggcccccuuccuguaccuguacgcccucgucuacuuccugcaguccaucaacuucgugcggaucaucaugcgccuguggcucugcuggaagugccggagcaagaacccccugcuguacgacgcgaacuacuuccucugcuggcacaccaacugcuacgacuacugcaucccguacaacuccgugaccagcuccaucgucaucacgagcggcgacggcaccaccucccccaucagcgagcacgacuaccagaucgggggcuacaccgagaagugggaguccggggugaaggacugcgugguccugcacagcuacuucacguccgacuacuaccagcuguacagcacccagcucuccaccgacaccggcguggagcacgugacguucuucaucuacaacaagaucgucgacgagcccgaggagcacgugcagauccacaccaucgacgggagcagcggcguggucaaccccgugauggagccgaucuacgacgagcccaccaccacgaccuccgugccccuguga

SEQ ID NO: 18627 - RNA, 828 nt, Artificial Sequence
  SARS-CoV-2__MT846483.1__ORF3a protein CDS gc
auggaccuguucaugcgcaucuucaccaucggcaccgugacguucaagcagggggagaucaaggacgccacccccagcgacuucguccgggccaccgcgaccaucccgauccaggccucccuccccuucggcuggcugaucguggggguggcccugcucgccgucuuccagagcgccuccaagaucaucacgcugaagaagcgcuggcagcuggcgcucagcaagggcgugcacuucgugugcaaccugcugcuccuguucgucaccguguacucccaccuccugcugguggccgccgggcuggaggcccccuuccucuaccuguacgcgcuggucuacuuccuccagagcaucaacuucgugcggaucaucaugcgccuguggcugugcuggaagugccgguccaagaacccccuccuguacgacgccaacuacuuccugugcuggcacaccaacugcuacgacuacugcaucccguacaacagcgugaccuccagcaucgucaucacguccggcgacggcaccaccagccccaucuccgagcacgacuaccagaucgggggcuacaccgagaagugggagagcggggugaaggacugcgugguccuccacuccuacuucacgagcgacuacuaccagcuguacuccacccagcugagcaccgacaccggcguggagcacgugacguucuucaucuacaacaagaucgucgacgagcccgaggagcacgugcagauccacaccaucgacggguccagcggcguggucaaccccgugauggagccgaucuacgacgagcccaugaccaccacgagcgugccccucuga

SEQ ID NO: 18628 - RNA, 828 nt, Artificial Sequence
  SARS-CoV-2__MT846503.1__ORF3a protein CDS gc
auggaccuguucaugcgcaucuucaccaucggcaccgugacgcucaagcagggggagaucaaggacgccacccccagcgacuucguccgggccaccgcgaccaucccgauccaggccucccugcccuucggcuggcugaucguggggguggcccuccuggccgucuuccacagcgccuccaagaucaucacgcugaagaagcgcuggcagcucgcgcugagcaagggcguguacuucgugugcaaccugcuccugcuguucgucaccguguacucccaccuccugcugguggccgccgggcucgaggcccccuuccuguaccuguacgcgcucgucuacuuccugcagagcaucaacuucgugcggaucaucaugcgccuguggcucugcuggaagugccgguccaagaacccccugcuguacgacgccaacuacuuccucugcuggcacaccaacugcuacgacuacugcaucccguacaacagcgugaccuccagcaucgucaucacguccggcgacggcaccaccagccccaucuccgagcacgacuaccagaucgggggcuacaccgagaagugggagagcggggugaaggacugcgugguccugcacuccuacuucacgagcgacuacuaccagcuguacuccacccagcucagcaccgacaccggcguggagcacgugacguucuucaucuacaacaagaucgucgacgagcccgaggagcacgugcagauccacaccaucgacggguccagcggcguggucaaccccgugauggagccgaucuacgacgagcccaccaccacgaccagcgugccccuguga

SEQ ID NO: 18629 - RNA, 828 nt, Artificial Sequence
  SARS-CoV-2__MT846557.1__ORF3a protein CDS gc
auggaccuguucaugcgcaucuucaccaucggcaccgugacgcucaagcagagcgagaucaaggacgccacccccuccgacuucguccgggccaccgcgaccaucccgauccaggccagccugcccuucggguggcugaucgugggcguggcccuccuggccgucuuccacuccgccagcaagaucaucacgcugaagaagcgcuggcagcucgcgcuguccaagggggugcacuucgugugcaaccugcuccugcuguucgucaccguguacagccaccuccugcugguggccgccggccucgaggcccccuuccuguaccuguacgcgcucgucuacuuccugcaguccaucaacuucgugcggaucaucaugcgccuguggcucugcuggaagugccggagcaagaacccccugcuguacgacgccaacuacuuccucugcuggcacaccaacugcuacgacuacugcaucccguacaacuccgugaccagcuccaucgucaucacgagcggggacggcaccaccucccccaucagcgagcacgacuaccagaucggcggguacaccgagaagugggaguccggcgugaaggacugcgugguccugcacagcuacuucacguccgacuacuaccagcuguacagcacccagcucuccaccgacaccgggguggagcacgugacguucuucaucuacaacaagaucgucgacgagcccgaggagcacgugcagauccacaccaucgacggcagcagcgggguggucaaccccgugauggagccgaucuacgacgagcccaccaccacgaccuccgugccccuguga

SEQ ID NO: 18630 - RNA, 828 nt, Artificial Sequence
  SARS-CoV-2__MT846561.1__ORF3a protein CDS gc
auggaccuguucaugcgcaucuucaccaucggcaccgugacgcucaagcagggggagaucaaggacgccacccccagcgacuucguccgggccaccgcgaccaucccgauccaggccucccugcccuucggcuggcugaucguggggguggcccuccuggccgucuuccagagcgccuccaagaucaucacgcugaagaagcgcuggcagcucgcgcugagcaagggcgugcacuucgugugcaaccugcuccugcuguucgucaccguguacucccaccuccugcugguggccgccgggcucgaggcccccuuccuguaccuguacgcgcucgucuacuuccugcagagcaucaacuucgugcggaucaucaugcgccugugccucugcuggaagugccgguccaagaacccccugcuguacgacgccaacuacuuccucugcuggcacaccaacugcuacgacuacugcaucccguacaacagcgugaccuccagcaucgucaucacguccggcgacggcaccaccagccccaucuccgagcacgacuaccagaucgggggcuacaccgagaagugggagagcggggugaaggacugcgugguccugcacuccuacuucacgagcgacuacuaccagcuguacuccacccagcucagcaccgacaccggcguggagcacgugacguucuucaucuacaacaagaucgucgacgagcccgaggagcacgugcagauccacaccaucgacggguccagcggcguggucaaccccgugauggagccgaucuacgacgagcccaccaccacgaccagcgugccccuguga

SEQ ID NO: 18631 - RNA, 828 nt, Artificial Sequence
  SARS-CoV-2__MT846613.1__ORF3a protein CDS gc
auggaccuguucaugcgcaucuucaccaucggcaccgugacgcucaagcagggggagaucaaggacgccacccccagcgacuucguccgggccaccgcgaccaucccgauccaggccucccugcccuucggcuggcugaucguggggguggcccuccuggccgucuuccagagcgccuccaagaucaucacgcugaagaagcgcuggcagcucgcgcugagcaagggcgugcacuucgugugcaaccugcuccugcuguucgucaccguguacucccaccuccugcugguggccgccgggcucgaggcccccuuccuguaccuguacgcgcucgucuacuuccugcagagcaucaacuucgugcggaucaucaugcgccugugccucugcuggaagugccgguccaagaacccccugcuguacgacgccaacuacuuccucugcuggcacaccaacugcuacgacuacugcaucccguacaacagcgugaccuccagcaucgucaucacguccggcgacggcaccaccagccccaucuccgagcacgacuaccagaucgggggcuacaccgagaagugggagagcggggugaaggacugcgugguccugcacuccuacuucacgagcgacuacuaccagcuguacuccacccagcucagcaccgacaccggcguggagcacgugacguucuucaucuacaacaagaucgucgacgagcccgaggagcacgugcagaucuacaccaucgacggguccagcggcguggucaaccccgugauggagccgaucuacgacgagcccaccaccacgaccagcgugccccuguga

SEQ ID NO: 18632 - RNA, 828 nt, Artificial Sequence
  SARS-CoV-2__MT846636.1__ORF3a protein CDS gc
auggaccuguucaugcgcaucuucaccaucggcaccgugacgcucaagcagggggagaucaaggacgccacccccagcgacuucguccgggccaccgcgaccaucccgauccaggccucccugcccuucggcuggcugaucguggggguggcccuccuggccgucuuccacagcgccuccaagaucaucacgcugaagaagcgcuggcagcucgcgcugagcaagggcgugcacuucgugugcaaccugcuccugcuguucgucaccguguacucccaccuccugcugguggccgccgggcucgaggcccccuuccuguaccuguacgcgcucgucuacuuccugcagagcaucaacuucgugcggaucaucaugcgccuguggcucugcuggaagugccgguccaagaacccccugcuguacgacgccaacuacuuccucugcuggcacaccaacugcuacgacuacugcaucccguacaacagcgugaccuccagcaucgucaucacgcugggcgacggcaccaccucccccaucagcgagcacgacuaccagaucgggggcuacaccgagaagugggaguccggggugaaggacugcgugguccugcacagcuacuucacguccgacuacuaccagcucuacagcacccagcuguccaccgacaccggcguggagcacgugacguucuucaucuacaacaagaucgucgacgagcccgaggagcacgugcagauccacaccaucgacgggagcuccggcguggucaaccccgugauggagccgaucuacgacgagcccaccaccacgaccagcgugccccuguga

SEQ ID NO: 18633 - RNA, 828 nt, Artificial Sequence
  SARS-CoV-2__MT846666.1__ORF3a protein CDS gc
auggaccuguucaugcgcaucuucaccaucggcaccgugacgcucaagcagggggagaucaaggacgccacccccagcuacuucguccgggccaccgcgaccaucccgauccaggccucccugcccuucggcuggcugaucguggggguggcccuccuggccgucuuccagagcgccuccaagaucaucacgcugaagaagcgcuggcagcucgcgcugagcaagggcgugcacuucgugugcaaccugcuccugcuguucgucaccguguacucccaccuccugcugguggccgccgggcucgaggcccccuuccuguaccuguacgcgcucgucuacuuccugcagagcaucaacuucgugcggaucaucaugcgccuguggcucugcuggaagugccgguccaagaacccccugcuguacgacgccaacuacuuccucugcuggcacaccaacugcuacgacuacugcaucccguacaacagcgugaccuccagcaucgucaucacguccggcgacggcaccaccagccccaucuccgagcacgacuaccagaucgggggcuacaccgagaagugggagagcggggugaaggacugcgugguccugcacuccuacuucacgagcgacuacuaccagcuguacuccacccagcucagcaccgacaccggcguggagcacgugacguucuucaucuacaacaagaucgucgacgagcccgaggagcacgugcagauccacaccaucgacggguccagcggcguggucaaccccgugauggagccgaucuacgacgagcccaccaccacgaccagcgugccccuguga

SEQ ID NO: 18634 - RNA, 828 nt, Artificial Sequence
  SARS-CoV-2__MT846668.1__ORF3a protein CDS gc
auggaccuguucaugcgcaucuucaccaucggcaccgugacgcucaagcagggggagaucaaggacgccacccccagcgacuucguccgggccaccgcgaccaucccgauccaggccucccugcccuucggcugguucaucguggggguggcccugcucgccgucuuccagagcgccuccaagaucaucacgcugaagaagcgcuggcagcuggcgcucagcaagggcgugcacuucgugugcaaccugcugcuccuguucgucaccguguacucccaccuccugcugguggccgccgggcuggaggcccccuuccucuaccuguacgcgcuggucuacuuccuccagagcaucaacuucgugcggaucaucaugcgccuguggcugugcuggaagugccgguccaagaacccccuccuguacgacgccaacuacuuccugugcuggcacaccaacugcuacgacuacugcaucccguacaacagcgugaccuccagcaucgucaucacguccggcgacggcaccaccagccccaucuccgagcacgacuaccagaucgggggcuacaccgagaagugggagagcggggugaaggacugcgugguccuccacuccuacuucacgagcgacuacuaccagcuguacuccacccagcugagcaccgacaccggcguggagcacgugacguucuucaucuacaacaagaucgucgacgagcccgaggagcacgugcagauccacaccaucgacggguccagcggcguggucaaccccgugauggagccgaucuacgacgagcccaccaccacgaccagcgugccccucuga

SEQ ID NO: 18635 - RNA, 828 nt, Artificial Sequence
  SARS-CoV-2__MT846689.1__ORF3a protein CDS gc
auggaccuguucaugcgcaucuucaccaucggcaccgugacgcucaagcagggggagaucaaggacgccacccccagcgacuucguccgggccaccgcgaccaucccgauccaggccucccugcccuucggcuggcugaucguggggguggcccuccuggccgucuuccagagcgccuccaagaucaucacgcugaagaagcgcuggcagcucgcgcugagcaagggcgugcacuucgugugcaaccugcuccugcuguucgucaccguguacucccaccuccugcugguggccgccgggcucgaggcccccuuccuguaccuguacgcgcucgucuacuuccugcagagcaucaacuucgugaucaucaucaugcggcuguggcucugcuggaagugccgcuccaagaacccccugcuguacgacgccaacuacuuccucugcuggcacaccaacugcuacgacuacugcaucccguacaacagcgugaccuccagcaucgucaucacguccggcgacggcaccaccagccccaucuccgagcacgacuaccagaucgggggcuacaccgagaagugggagagcggggugaaggacugcgugguccugcacuccuacuucacgagcgacuacuaccagcuguacuccacccagcucagcaccgacaccggcguggagcacgugacguucuucaucuacaacaagaucgucgacgagcccgaggagcacgugcagauccacaccaucgacggguccagcggcguggucaaccccgugauggagccgaucuacgacgagcccaccaccacgaccagcgugccccuguga

SEQ ID NO: 18636 - RNA, 828 nt, Artificial Sequence
  SARS-CoV-2__MT847210.1__ORF3a protein CDS gc
auggaccuguucaugcgcaucuucaccaucggcaccgugacgcucaagcagggggagaucaaggacgccacccccagcgacuucguccgggccaccgcgaccaucccgauccaggccucccugcccuucggcuggcugaucgugguggucgcccuccuggccguguuccagagcgccuccaagaucaucacgcugaagaagcgcuggcagcucgcgcugagcaagggggugcacuucgucugcaaccugcuccugcuguucgugaccguguacucccaccuccugcuggucgccgccggccucgaggcccccuuccuguaccuguacgcgcucguguacuuccugcagagcaucaacuucgugcggaucaucaugcgccuguggcucugcuggaagugccgguccaagaacccccugcuguacgacgccaacuacuuccucugcuggcacaccaacugcuacgacuacugcaucccguacaacagcgucaccuccagcaucgugaucacguccggggacggcaccaccagccccaucuccgagcacgacuaccagaucggcggguacaccgagaagugggagagcggcgugaaggacugcgucgugcugcacuccuacuucacgagcgacuacuaccagcuguacuccacccagcucagcaccgacaccgggguggagcacgucacguucuucaucuacaacaagaucguggacgagcccgaggagcacgugcagauccacaccaucgacggcuccagcggggucgugaaccccgugauggagccgaucuacgacgagcccaccaccacgaccagcgucccccuguga

SEQ ID NO: 18637 - RNA, 828 nt, Artificial Sequence
  SARS-CoV-2__MT847211.1__ORF3a protein CDS gc
auggaccuguucaugcgcaucuucaccaucggcaccgugacgcucaagcagggggagaucaaggacgccacccccagcgacuucguccgggccaccgcgaccaucccgauccaggccucccugcccuucggcuggcugaucguggggguggcccuccuggccgucuuccagagcgccuccaagaucaucacgcugaagaagcgcuggcagcucgcgcugagcaagggcgugcacuucgugugcaaccugcuccugcuguucgucaccguguacucccaccuccugcugguggccgccgggcucgaggcccccuuccuguaccuguacgcgcucgucuacuuccugcagagcaucaacuucgugcggaucaucaugcgccuguggcucugcuggaagugccgguccaagaacccccugcuguacgacgccaacuacuuccucugcuggcacaccaacugcuacgacuacugcaucccguacaacagcgugaccuccagcaucgucaucacgcugggcgacggcaccaccucccccaucagcgagcacgacuaccagaucgggggcuacaccgagaagugggaguccggggugaaggacugcgugguccugcacagcuacuucacguccgacuacuaccagcucuacagcacccagcuguccaccgacaccggcguggagcacgugacguucuucaucuacaacaagaucgucgacgagcccgaggagcacgugcagauccacaccaucgacgggagcuccggcguggucaaccccgugauggagccgaucuacgacgagcccaccaccacgaccagcgugccccuguga

SEQ ID NO: 18638 - RNA, 828 nt, Artificial Sequence
  SARS-CoV-2__MT847220.1__ORF3a protein CDS gc
auggaccuguucaugcgcaucuucaccaucggcaccgugacgcucaagcagggggagaucaaggacgccacccccagcgacuucguccgggccaccgcgaccaucccgauccaggccucccugcccuucggcuggcugaucguggggguggcccuccuggccgucuuccagagcgccuccaagaucaucacgcugaagaagcgcuggcagcucgcgcugagcaagggcgugcacuucgugugcaaccugcuccugcuguucgucaccguguacucccaccuccugcugguggccgccgggcucgaggcccccuuccuguaccuguacgcgcucgucuacuuccugcagagcaucaacuucgugcggaucaucaugcgccuguggcucugcuggaagugccgguccaagaacccccugcuguacgacgccaacuacuuccucugcuggcacaccaacugcuacuacuacugcaucccguacaacagcgugaccuccagcaucgucaucacguccggcgacggcaccaccagccccaucuccgagcacgacuaccagaucgggggcuacaccgagaagugggagagcggggugaaggacugcgugguccugcacuccuacuucacgagcgacuacuaccagcuguacuccacccagcucagcaccgacaccggcguggagcacgugacguucuucaucuacaacaagaucgucgacgagcccgaggagcacgugcagauccacaccaucgacggguccagcggcguggucaaccccgugauggagccgaucuacgacgagcccaccaccacgaccagcgugccccuguga

SEQ ID NO: 18639 - RNA, 828 nt, Artificial Sequence
  SARS-CoV-2__MT847228.1__ORF3a protein CDS gc
auggaccuguucaugcgcaucuucaccaucggcaccgugacgcucaagcagggggagaucaaggacgccacccccagcgacuucguccgggccaccgcgaccaucccgauccaggccucccugcccuucggcuggcugaucguggggguggcccuccuggccgucuuccagagcgccuccaagaucaucacgcugaagaagcgcuggcagcucgcgcugagcaagggcgugcacuucgugugcaaccugcuccugcuguucgucaccguguacucccaccuccugcugguggccgccgggcucgaggcccccuuccuguaccuguacgcgcucgucuacuuccugcagagcaucaacuucgugcggaucaucaugcgccuguggcucugcuggaagugccgguccaagaacccccugcuguacgacgccaacuacuuccucugcuggcacaccaacugcuacgacuacugcaucccguacaacagcgugaccuccagcaucgucaucacguccggcgacggcaccaccagccccaucuccgagcacgacuaccagaucgggggcuacaccgagaagugggagagcggggugaaggacugcgugguccugcacuccuacuucacgagcgacuacuaccagcuguacuccacccagcucagcaccgacaccggcguggagcacgugacguucuucaucuacaacaagaucgucgacgaccccgaggcccacgugcagauccacaccaucgacggguccagcggcguggucaaccccgugauggagccgaucuacgacgagcccaccaccacgaccagcgugccccuguga

SEQ ID NO: 18640 - RNA, 828 nt, Artificial Sequence
  SARS-CoV-2__MT843309.1__ORF3a protein CDS gc
auggaccuguucaugcgcaucuucaccaucggcaccgugacgcucaagcagggggagaucaaggacgccacccccagcgacuucguccgggccaccgcgaccaucccgauccaggccucccugcccuucggcuggcugaucguggggguggcccuccuggccgucuuccacagcgccuccaagaucaucacgcugaagaagcgcuggcagcucgcgcuguucaagggcgugcacuucgugugcaaccugcuccugcuguucgucaccguguacagccaccuccugcugguggccgccgggcucgaggcccccuuccuguaccuguacgcgcucgucuacuuccugcaguccaucaacuucgugcggaucaucaugcgccuguggcucugcuggaagugccggagcaagaacccccugcuguacgacgccaacuacuuccucugcuggcacaccaacugcuacgacuacugcaucccguacaacuccgugaccagcuccaucgucaucacgagcggcgacggcaccaccucccccaucagcgagcacgacuaccagaucgggggcuacaccgagaagugggaguccggggugaaggacugcgugguccugcacagcuacuucacguccgacuacuaccagcuguacagcacccagcucuccaccgacaccggcguggagcacgugacguucuucaucuacaacaagaucgucgacgagcccgaggagcacgugcagauccacaccaucgacgggagcuccggcguggucaaccccgugauggagccgaucuacgacgagcccaccaccacgaccagcgugccccuguga

SEQ ID NO: 18641 - RNA, 828 nt, Artificial Sequence
  SARS-CoV-2__MT844023.1__ORF3a protein CDS gc
auggaccuguucaugcgcaucuucaccaucggcaccgugacgcucaagcagggggagaucaaguacgccacccccagcgacuucguccgggccaccgcgaccaucccgauccaggccucccugcccuucggcuggcugaucguggggguggcccuccuggccgucuuccagagcgccuccaagaucaucacgcugaagaagcgcuggcagcucgcgcugagcaagggcgugcacuucgugugcaaccugcuccugcuguucgucaccguguacucccaccuccugcugguggccgccgggcucgaggcccccuuccuguaccuguacgcgcucgucuacuuccugcagagcaucaacuucgugcggaucaucaugcgccuguggcucugcuggaagugccgguccaagaacccccugcuguacgacgccaacuacuuccucugcuggcacaccaacugcuacgacuacugcaucccguacaacagcgugaccuccagcaucgucaucacguccggcgacggcaccaccagccccaucuccgagcacgacuaccagaucgggggcuacaccgagaagugggagagcggggugaaggacugcgugguccugcacuccuacuucacgagcgacuacuaccagcuguacuccacccagcucagcaccgacaccggcguggagcacgugacguucuucaucuacaacaagaucgucgacgagcccgaggagcacgugcagauccacaccaucgacggguccagcggcguggucaaccccgugauggagccgaucuacgacgagcccaccaccacgaccagcgugccccuguga

SEQ ID NO: 18642 - RNA, 828 nt, Artificial Sequence
  SARS-CoV-2__MT844027.1__ORF3a protein CDS gc
auggaccuguucaugcgcaucuucaccaucggcaccgugacgcucaagcagggggagaucaaggacgccacccccagcgacuucguccgggccaccgcgaccaucccgauccaggccucccugcccuucggcuggcugaucguggggguggcccuccuggccgucuuccacagcgccuccaagaucaucacgcugaagaagcgcuggcagcucgcgcugagcaagggcgugcacuucgugugcaaccugcuccugcuguucgucaccguguacucccaccuccugcugguggccgccgggcucgaggcccccuuccuguaccuguacgcgcucgucuacuuccugcagagcaucaacuucgugcggaucaucaugcgccuguggcucugcuggaagugccgguccaagaacccccugcuguacgacgccaacuacuuccucugcuggcacaccaacugcuacgacuacugcaucccguacaacagcgugaccuccagcaucgucaucacguccggcgacggcaccaccagccccaucuccgagcacgacuaccagaucgggggcuacaccgagaagugggagagcggggugaaggacugcgugguccugcacuccuacuucacgagcgacuacuaccagcuguacuccgcccagcucagcaccgacaccggcguggagcacgugaccuucuucaucuacaacaagaucgucgacgagcccgaggagcacgugcagauccacacgaucgacggguccagcggcguggucaaccccgugauggagccgaucuacgacgagcccaccaccaccacgagcgugccccuguga

SEQ ID NO: 18643 - RNA, 828 nt, Artificial Sequence
  SARS-CoV-2__MT844038.1__ORF3a protein CDS gc
auggaccuguucaugcgcaucuucaccaucggcaccgugacgcucaagcagggggagaucaaggacgccacccccagcgacuucguccgggccaccgcgaccaucccgauccaggccucccugcccuucggcuggcugaucguggggguggcccuccuggccgucuuccagagcgccuccaagaucaucacgcugaagaagcgcuggcagcucgcgcugagcaagggcguguacuucgugugcaaccugcuccugcuguucgucaccguguacucccaccuccugcugguggccgccgggcucgaggcccccuuccuguaccuguacgcgcucgucuacuuccugcagagcaucaacuucgugcggaucaucaugcgccuguggcucugcuggaagugccgguccaagaacccccugcuguacgacgccaacuacuuccucugcuggcacaccaacugcuacgacuacugcaucccguacaacagcgugaccuccagcaucgucaucacguccggcgacggcaccaccagccccaucuccgagcacgacuaccagaucgggggcuacaccgagaagugggagagcggggugaaggacugcgugguccugcacuccuacuucacgagcgacuacuaccagcuguacuccacccagcucagcaccgacaccggcguggagcacgugacguucuucaucuacaacaagaucgucgacgagcccgaggagcacgugcagauccacaccaucgacggguccagcggcguggucaaccccgugauggagccgaucuacgacgagcccaccaccacgaccagcgugccccuguga

SEQ ID NO: 18644 - RNA, 828 nt, Artificial Sequence
  SARS-CoV-2__MT844046.1__ORF3a protein CDS gc
auggaccuguucaugcgcaucuucaccaucggcaccgugacgcucaagcagggggagaucaaggacgccacccccagcgacuucguccgggccaccgcgaccaucccgauccaggccucccugcccuucggcuggcugaucguggggguggcccuccuggccgucuuccacagcgccuccaagaucaucacgcugaagaagcgcuggcagcucgcgcugagcaagggcgugcacuucgugugcaaccugcuccugcuguucgucaccuucuacucccaccuccugcugguggccgccgggcucgaggcccccuuccuguaccuguacgcgcucguguacuuccugcagagcaucaacuucguccggaucaucaugcgccuguggcucugcuggaagugccgguccaagaacccccugcuguacgacgccaacuacuuccucugcuggcacaccaacugcuacgacuacugcaucccguacaacagcgugaccuccagcaucgugaucacguccggcgacggcaccaccagccccaucuccgagcacgacuaccagaucgggggcuacaccgagaagugggagagcggggucaaggacugcguggugcugcacuccuacuucacgagcgacuacuaccagcuguacuccacccagcucagcaccgacaccggcgucgagcacgugacguucuucaucuacaacaagaucguggacgagcccgaggagcacguccagauccacaccaucgacggguccagcggcguggugaaccccgucauggagccgaucuacgacgagcccaccaccacgaccagcgugccccuguga

SEQ ID NO: 18645 - RNA, 828 nt, Artificial Sequence
  SARS-CoV-2__MT831129.1__ORF3a protein CDS gc
auggaccuguucaugcgcaucuucaccaucggcaccgugacgcucaagcagggggagaccaaggacgccacccccagcgacuucguccgggccaccuccacgaucccgauccaggcgagccugcccuucggcuggcugaucguggggguggcccuccuggccgucuuccaguccgccagcaagaucaucacccugaagaagcgcuggcagcucgcccuguccaagggcgugcacuucgugugcaaccugcuccugcuguucgucaccguguacagccaccuccugcugguggcggccgggcucgaggcccccuuccuguaccuguacgcccucgucuacuuccugcaguccaucaacuucgugcggaucaucaugcgccuguggcucugcuggaagugccggagcaagaacccccugcuguacgacgcgaacuacuuccucugcuggcacaccaacugcuacgacuacugcaucccguacaacuccgugacgagcuccaucgucaucaccagcggcgacggcaccaccucccccaucagcgagcacgacuaccagaucgggggcuacacggagaagugggaguccggggugaaggacugcgugguccugcacagcuacuucaccuccgacuacuaccagcuguacagcacccagcucuccaccgacacgggcguggagcacgugaccuucuucaucuacaacaagaucgucgacgagcccgaggagcacgugcagauccacaccaucgacgggagcagcggcguggucaaccccgugauggagccgaucuacgacgagcccaccacgaccaccuccgugccccuguga

SEQ ID NO: 18646 - RNA, 828 nt, Artificial Sequence
  SARS-CoV-2__MT831140.1__ORF3a protein CDS gc
auggaccuguucaugcgcaucuucaccaucggcaccgugacgcucaagcagggggagaccaaggacgccacccccagcgacuucguccgggccaccgcgacgaucccgauccaggccucccugcccuucggcuggcugaucguggggguggcccuccuggccgucuuccagagcgccuccaagaucaucacccugaagaagcgcuggcagcucgcgcugagcaagggcgugcacuucgugugcaaccugcuccugcuguucgucaccguguacucccaccuccugcugguggccgccgggcucgaggcccccuuccuguaccuguacgcgcucgucuacuuccugcagagcaucaacuucgugcggaucaucaugcgccuguggcucugcuggaagugccgguccaagaacccccugcuguacgacgccaacuacuuccucugcuggcacaccaacugcuacgacuacugcaucccguacaacagcgugacguccagcaucgucaucaccuccggcgacggcaccaccagccccaucuccgagcacgacuaccagaucgggggcuacacggagaagugggagagcggggugaaggacugcgugguccugcacuccuacuucaccagcgacuacuaccagcuguacuccacccagcucagcaccgacacgggcguggagcacgugaccuucuucaucuacaacaagaucgucgacgagcccgaggagcacgugcagauccacaccaucgacggguccagcggcguggucaaccccgugauggagccgaucuacgacgagcccaccacgaccaccagcgugccccuguga

SEQ ID NO: 18647 - RNA, 828 nt, Artificial Sequence
  SARS-CoV-2__MT831162.1__ORF3a protein CDS gc
auggaccuguucaugcgcaucuucaccaucggcaccgugacgcucaagcagggggagaucaaggacgccacccccagcgacuucguccgggccaccgcgaccaucccgauccaggccucccugcccuucggcuggcugaucgugagcguggcccuccuggccgucuuccacuccgccagcaagaucaucacgcugaagaagcgcuggcagcucgcgcuguccaagggggugcacuucgugugcaaccugcuccugcuguucgucaccguguacagccaccuccugcugguggccgccggccucgaggcccccuuccuguaccuguacgcgcucgucuacuuccugcaguccaucaacuucgugcggaucaucaugcgccuguggcucugcuggaagugccggagcaagaacccccugcuguacgacgccaacuacuuccucugcuggcacaccaacugcuacgacuacugcaucccguacaacuccgugaccagcuccaucgucaucacgagcggggacggcaccaccucccccaucagcgagcacgacuaccagaucggcggguacaccgagaagugggaguccggcgugaaggacugcgugguccugcacagcuacuucacguccgacuacuaccagcuguacagcacccagcucuccaccgacaccgggguggagcacgugacguucuucaucuacaacaagaucgucgacgagcccgaggagcacgugcagauccacaccaucgacggcagcagcgggguggucaaccccgugauggagccgaucuacgacgagcccaccaccacgaccuccgugccccuguga

SEQ ID NO: 18648 - RNA, 828 nt, Artificial Sequence
  SARS-CoV-2__MT831177.1__ORF3a protein CDS gc
auggaccuguucaugcgcaucuucaccaucggcaccgugacgcucaagcagggggagaucaaggacgccacccccagcgacuucguccgggccaccgcgaccaucccgauccaggccucccugcccuucggcuggcugaucguggggguggcccuccuggccgucuuccagagcgccuccaagaucaucacgcugaagaagcgcuggcagcucgcgcugagcaagggcgugcacuucgugugcaaccugcuccugcuguucgucaccguguacucccaccuccugcugguggccgccgggcucgaggcccccuuccuguaccuguacgcgcucgucuacuuccugcagagcaucaacuucgugcggaucaucaugcgccuguggcucugccggaagugccgcuccaagaacccccugcuguacgacgccaacuacuuccucugcuggcacaccaacugcuacgacuacugcaucccguacaacagcgugaccuccagcaucgucaucacguccggcgacggcaccaccagccccaucuccgagcacgacuaccagaucgggggcuacaccgagaagugggagagcggggugaaggacugcgugguccugcacuccuacuucacgagcgacuacuaccagcuguacuccacccagcucagcaccgacaccggcguggagcacgugacguucuucaucuacaacaagaucgucgacgagcccgaggagcacgugcagauccacaccaucgacggguccagcggcguggucaaccccgugauggagccgaucuacgacgagcccaccaccacgaccagcgugccccuguga

SEQ ID NO: 18649 - RNA, 828 nt, Artificial Sequence
  SARS-CoV-2__MT831190.1__ORF3a protein CDS gc
auggaccuguucaugcgcaucuucaccaucggcaccgugacgcucaagcaggacgagaucaaggacgccacccccagcgacuucguccgggccaccgcgaccaucccgauccaggccucccugcccuucggguggcugaucgugggcguggcccuccuggccgucuuccagagcgccuccaagaucaucacgcugaagaagcgcuggcagcucgcgcugagcaagggggugcacuucgugugcaaccugcuccugcuguucgucaccguguacucccaccuccugcugguggccgccggccucgaggcccccuuccuguaccuguacgcgcucgucuacuuccugcagagcaucaacuucgugcggaucaucaugcgccuguggcucugcuggaagugccgguccaagaacccccugcuguacgacgccaacuacuuccucugcuggcacaccaacugcuacgacuacugcaucccguacaacagcgugaccuccagcaucgucaucacguccggggacggcaccaccagccccaucuccgagcacgacuaccagaucggcggguacaccgagaagugggagagcggcgugaaggacugcgugguccugcacuccuacuucacgagcgacuacuaccagcuguacuccacccagcucagcaccgacaccgggguggagcacgugacguucuucaucuacaacaagaucgucgacgagcccgaggagcacgugcagauccacaccaucgacggcuccagcgggguggucaaccccgugauggagccgaucuacgacgagcccaccaccacgaccagcgugccccuguga

SEQ ID NO: 18650 - RNA, 828 nt, Artificial Sequence
  SARS-CoV-2__MT831578.1__ORF3a protein CDS gc
auggaccuguucaugcgcaucuucaccaucggcaccgugacgcucaagcagggggagaucaaggacgccacccccagcgacuucguccgggccaccgcgaccaucccgauccaggccucccugcccuucggcuggcugaucguggggguggcccuccuggccgucuuccagagcgccuccaagaucaucacgcugaagaagcgcuggcagcucgcgcugagcaagggcgugcacuucgugugcaaccugcuccugcuguucgucaccguguacucccaccuccugcugguggccgucgggcucgaggcccccuuccuguaccuguacgcccucguguacuuccugcagagcaucaacuucgugcggaucaucaugcgccuguggcucugcuggaagugccgguccaagaacccccugcuguacgacgcgaacuacuuccucugcuggcacaccaacugcuacgacuacugcaucccguacaacagcgucaccuccagcaucgugaucacguccggcgacggcaccaccagccccaucuccgagcacgacuaccagaucgggggcuacaccgagaagugggagagcggggugaaggacugcgucgugcugcacuccuacuucacgagcgacuacuaccagcuguacuccacccagcucagcaccgacaccggcguggagcacgucacguucuucaucuacaacaagaucguggacgagcccgaggagcacgugcagauccacaccaucgacggguccagcggcgucgugaaccccgugauggagccgaucuacgacgagcccaccaccacgaccagcgucccccuguga

SEQ ID NO: 18651 - RNA, 828 nt, Artificial Sequence
  SARS-CoV-2__MT831593.1__ORF3a protein CDS gc
auggaccuguucaugcgcaucuucaccaucggcaccgugacgcucaagcagggggagaucaaggacgccacccccagcgacuucguccgggccaccgcgaccaucccgauccaggccucccugcccuucggcuggcugaucguggggguggcccuccuggccgucuuccacagcgccuccaagaucaucacgcugaagaagcgcuggcagcucgcgcugagcaagggcgugcacuucgugugcaaccugcuccugcuguucgucaccguguacucccaccuccugcugguggccgccgggcucgaggcccccuuccuguaccuguacgcgcucgucuacuuccugcagagcaucaacuucgugcggaucaucaugcgccuguggcucugcuggaagugccgguccaagaacccccugcuguacgacgccaacuacuuccucugcuggcacaccaacugcuacgacuacugcaucccguacaacagcgugaccuccagcaucgucaucacguccguggacggcaccaccagccccaucuccgagcacgacuaccagaucggcggguacaccgagaagugggagagcggcgugaaggacugcgucgugcugcacuccuacuucacgagcgacuacuaccagcuguacuccacccagcucagcaccgacaccgggguggagcacgucacguucuucaucuacaacaagaucguggacgagcccgaggagcacgugcagauccacaccaucgacggcuccagcggggucgugaaccccgugauggagccgaucuacgacgagcccaccaccacgaccagcgucccccuguga

SEQ ID NO: 18652 - RNA, 828 nt, Artificial Sequence
  SARS-CoV-2__MT831603.1__ORF3a protein CDS gc
auggaccuguucaugcgcaucuucaccaucggcaccgugacgcucaagcagggggagaucaaggacgccacccccagcgacuucguccgggccaccgcgaccaucccgauccaggccucccugcccuucggcuggcugaucguggggguggcccuccuggccgucuuccagagcgccuccaagaucaucacgcugaagaagcgcuggcagcucgcgcugagcaagggcgugcacuucgugugcaaccugcuccugcuguucgucaccguguacucccaccuccugcugguggccgccguccucgaggcccccuuccuguaccuguacgcgcucguguacuuccugcagagcaucaacuucgugcggaucaucaugcgccuguggcucugcuggaagugccgguccaagaacccccugcuguacgacgccaacuacuuccucugcuggcacaccaacugcuacgacuacugcaucccguacaacagcgucaccuccagcaucgugaucacguccggggacggcaccaccagccccaucuccgagcacgacuaccagaucggcggguacaccgagaagugggagagcggcgugaaggacugcgucgugcugcacuccuacuucacgagcgacuacuaccagcuguacuccacccagcucagcaccgacaccgggguggagcacgucacguucuucaucuacaacaagaucguggacgagcccgaggagcacgugcagauccacaccaucgacggcuccagcggggucgugaaccccgugauggagccgaucuacgacgagcccaccaccacgaccagcgucccccuguga

SEQ ID NO: 18653 - RNA, 828 nt, Artificial Sequence
  SARS-CoV-2__MT831635.1__ORF3a protein CDS gc
auggaccuguucaugcgcaucuucaccaucggcaccgugacgcucaagcagggggagaucaaggacgccacccccagcgacuucguccgggccaccgcgaccaucccgauccaggccucccugcccuucggcuggcugaucguggggguggcccuccuggccuucuuccacagcgccuccaagaucaucacgcugaagaagcgcuggcagcucgcgcugagcaagggcguccacuucgugugcaaccugcuccugcuguucgugaccgucuacucccaccuccugcugguggccgccgggcucgaggcccccuuccuguaccuguacgcgcucguguacuuccugcagagcaucaacuucguccggaucaucaugcgccuguggcucugcuggaagugccgguccaagaacccccugcuguacgacgccaacuacuuccucugcuggcacaccaacugcuacgacuacugcaucccguacaacagcgugaccuccagcaucgugaucacguccggcgacggcaccaccagccccaucuccgagcacgacuaccagaucgggggcuacaccgagaagugggagagcggggucaaggacugcguggugcugcacuccuacuucacgagcgacuacuaccagcuguacuccacccagcucagcaccgacaccggcgucgagcacgugacguucuucaucuacaacaagaucguggacgagcccgaggagcacguccagauccacaccaucgacggguccagcggcguggugaaccccgucauggagccgaucuacgacgagcccaccaccacgaccagcgugccccuguga

SEQ ID NO: 18654 - RNA, 828 nt, Artificial Sequence
  SARS-CoV-2__MT831646.1__ORF3a protein CDS gc
auggaccuguucaugcgcaucuucaccaucggcaccgugacgcucaagcagggggagaucaaggacgccacccccagcgacuucguccgggccaccgcgaccaucccgauccaggccucccugcccuucggcuggcugaucguggggguggcccuccuggccgucuuccagagcgccuccaagaucaucacgcugaagaagcgcuggcagcucgcgcugagcaagggcgugcacuucgugugcaaccugcuccugcuguucgucaccguguacucccaccuccugcugguggccgccgggcucgaggcccccuuccuguaccuguacgcgcucgucuacuuccugcagagcaucaacuucgugcggaucaucaugcgccuguggcucugcuggaagugccgguccaagaacccccugcuguacgacgccaacuacuuccucugcuggcacaccaacugcuacgacuacugcaucccguacaacagcgugaccuccagcaucgucaucacguccggcgacggcaccaccagccccaucuccgagcacgacuaccagaucgggggcuacaccgagaagugggagagcggggugaaggacugcgugguccugcacuccuacuucacgagcgacuacuaccagcuguacuccacccagcucagcaccgacaccggcuucgagcacgugacguucuucaucuacaacaagaucguggacgagcccgaggagcacguccagauccacaccaucgacggguccagcggcguggugaaccccgucauggagccgaucuacgacgagcccaccaccacgaccagcgugccccuguga

SEQ ID NO: 18655 - RNA, 828 nt, Artificial Sequence
  SARS-CoV-2__MT831682.1__ORF3a protein CDS gc
auggaccuguucaugcgcaucuucaccaucggcaccgugacgcucaagcagggggagaucaaggacgccacccccagcgacuucguccgggccaccgcgaccaucccgauccaggccucccugcccuucggcuggcugaucguggggguggcccuccuggccgucuuccagagcgccuccaagaucaucacgcugaagaagcgcuggcagcucgcgcugagcaagggcgugcacuucgugugcaaccugcuccugcuguucgucaccguguacucccaccuccugcugguggccgccgggcucgaggcccccuuccuguaccuguacgcgcucgucuacuuccugcagagcaucaacuucgugcggaucaucaugcgccuguggcucugcuggaagugccgguccaagaacccccugcuguacgacgccaacuacuuccucagcuggcacaccaacugcuacgacuacugcaucccguacaacuccgugaccagcuccaucgucaucacgagcggcgacggcaccaccucccccaucagcgagcacgacuaccagaucgggggcuacaccgagaagugggaguccggggugaaggacugcgugguccugcacagcuacuucacguccgacuacuaccagcuguacagcacccagcucuccaccgacaccggcguggagcacgugacguucuucaucuacaacaagaucgucgacgagcccgaggagcacgugcagauccacaccaucgacgggagcagcggcguggucaaccccgugauggagccgaucuacgacgagcccaccaccacgaccuccgugccccuguga

SEQ ID NO: 18656 - RNA, 828 nt, Artificial Sequence
  SARS-CoV-2__MT831729.1__ORF3a protein CDS gc
auggaccuguucaugcgcaucuucaccaucggcaccgugauccucaagcagggggagaucaaggacgccacgcccagcgacuucguccgggccaccgcgaccaucccgauccaggccucccugcccuucggcuggcugaucguggggguggcccuccuggccgucuuccacagcgccuccaagaucaucacccugaagaagcgcuggcagcucgcgcugagcaagggcgugcacuucgugugcaaccugcuccugcuguucgucacgguguacucccaccuccugcugguggccgccgggcucgaggcccccuuccuguaccuguacgcgcucgucuacuuccugcagagcaucaacuucgugcggaucaucaugcgccuguggcucugcuggaagugccgguccaagaacccccugcuguacgacgccaacuacuuccucugcuggcacaccaacugcuacgacuacugcaucccguacaacagcgugaccuccagcaucgucaucaccuccggcgacggcacgaccagccccaucuccgagcacgacuaccagaucgggggcuacaccgagaagugggagagcggggugaaggacugcgugguccugcacuccuacuucaccagcgacuacuaccagcuguacuccacgcagcucagcaccgacaccggcguggagcacgugaccuucuucaucuacaacaagaucgucgacgagcccgaggagcacgugcagauccacacgaucgacggguccagcggcguggucaaccccgugauggagccgaucuacgacgagcccaccaccaccacgagcgugccccuguga

SEQ ID NO: 18657 - RNA, 828 nt, Artificial Sequence
  SARS-CoV-2__MT831771.1__ORF3a protein CDS gc
auggaccuguucaugcgcaucuucaccaucggcaccgugacgcucaagcagggggagaucaaggacgccacccccagcgacuucguccgggccaccgcgaccaucccgauccaggccuccuuccccuucggcuggcugaucguggggguggcccugcucgccgucuuccagagcgccuccaagaucaucacgcugaagaagcgcuggcagcuggcgcucagcaagggcgugcacuucgugugcaaccugcugcuccuguucgucaccguguacucccaccuccugcugguggccgccgggcuggaggcccccuuccucuaccuguacgcgcuggucuacuuccuccagagcaucaacuucgugcggaucaucaugcgccuguggcugugcuggaagugccgguccaagaacccccuccuguacgacgccaacuacuuccugugcuggcacaccaacugcuacgacuacugcaucccguacaacagcgugaccuccagcaucgucaucacguccggcgacggcaccaccagccccaucuccgagcacgacuaccagaucgggggcuacaccgagaagugggagagcggggugaaggacugcgugguccuccacuccuacuucacgagcgacuacuaccagcuguacuccacccagcugagcaccgacaccggcguggagcacgugacguucuucaucuacaacaagaucgucgacgagcccgaggagcacgugcagauccacaccaucgacggguccagcggcguggucaaccccgugauggagccgaucuacgacgagcccaccaccacgaccagcgugccccucuga

SEQ ID NO: 18658 - RNA, 828 nt, Artificial Sequence
  SARS-CoV-2__MT831850.1__ORF3a protein CDS gc
auggaccuguucaugcgcaucuucaccaucggcaccgugacgcucaagcagggggagaucaaggacgccacccccagcgacuucguccgggccaccgcgaccaucccgauccaggccucccugcccuucggcuggcugaucguggggguggcccuccugacggucuuccacagcgccuccaagaucaucacccugaagaagcgcuggcagcucgcccugagcaagggcgugcacuucgugugcaaccugcuccugcuguucgucaccguguacucccaccuccugcugguggcggccgggcucgaggcccccuuccuguaccuguacgcccucgucuacuuccugcagagcaucaacuucgugcggaucaucaugcgccuguggcucugcuggaagugccgguccaagaacccccugcuguacgacgcgaacuacuuccucugcuggcacaccaacugcuacgacuacugcaucccguacaacagcgugacguccagcaucgucaucaccuccggcgacggcaccaccagccccaucuccgagcacgacuaccagaucgggggcuacacggagaagugggagagcggggugaaggacugcgugguccugcacuccuacuucaccagcgacuacuaccagcuguacuccacccagcucagcaccgacacgggcguggagcacgugaccuucuucaucuacaacaagaucgucgacgagcccgaggagcacgugcagauccacaccaucgacggguccagcggcguggucaaccccgugauggagccgaucuacgacgagcccaccacgaccaccagcgugccccuguga

SEQ ID NO: 18659 - RNA, 828 nt, Artificial Sequence
  SARS-CoV-2__MT833965.1__ORF3a protein CDS gc
auggaccuguucaugcgcaucuucaccaucggcaccgugacgcucaagcagggggagaucaaguacgccacccccagcgacuucguccgggccaccgcgaccaucccgauccaggccucccugcccuucggcuggcugaucguggggguggcccuccuggccgucuuccacagcgccuccaagaucaucacgcugaagaagcgcuggcagcucgcgcugagcaagggcgugcacuucgugugcaaccugcuccugcuguucgucaccguguacucccaccuccugcugguggccgccgggcucgaggcccccuuccuguaccuguacgcgcucgucuacuuccugcagagcaucaacuucgugcggaucaucaugcgccuguggcucugcuggaagugccgguccaagaacccccugcuguacgacgccaacuacuuccucugcuggcacaccaacugcuacgacuacugcaucccguacaacagcgugaccuccagcaucgucaucacguccggcgacggcaccaccagccccaucuccgagcacgacuaccagaucgggggcuacaccgagaagugggagagcggggugaaggacugcgugguccugcacuccuacuucacgagcgacuacuaccagcuguacuccacccagcucagcaccgacaccggcguggagcacgugacguucuucaucuacaacaagaucgucgacgagcccgaggagcacgugcagauccacaccaucgacggguccagcggcguggucaaccccgugauggagccgaucuacgacgagcccaccaccacgaccagcgugccccuguga

SEQ ID NO: 18660 - RNA, 828 nt, Artificial Sequence
  SARS-CoV-2__MT833976.1__ORF3a protein CDS gc
auggaccuguucaugcgcaucuucaccaucggcaccgugacgcucaagcagggggagaucaaggacgccacccccagcgacuucguccgggccaccgcgaccaucccgauccaggccucccugcccuucggcuggcugaucguggggguggcccuccuggccgucuuccagagcgccuccaagaucaucacgcugaagaagcgcuggcagcucgcgcugagcaagggcgugcacuucgugugcaaccugcuccugcuguuccucaccgucuacucccaccuccugcugguggccgccgggcuggaggcccccuuccuguaccucuacgcgcugguguacuuccugcagagcaucaacuucguccggaucaucaugcgccucuggcugugcuggaagugccgguccaagaacccccugcucuacgacgccaacuacuuccugugcuggcacaccaacugcuacgacuacugcaucccguacaacagcgugaccuccagcaucgugaucacguccggcgacggcaccaccagccccaucuccgagcacgacuaccagaucgggggcuacaccgagaagugggagagcggggucaaggacugcguggugcugcacuccuacuucacgagcgacuacuaccagcucuacuccacccagcugagcaccgacaccggcgucgagcacgugacguucuucaucuacaacaagaucguggacgagcccgaggagcacguccagauccacaccaucgacggguccagcggcguggugaaccccgucauggagccgaucuacgacgagcccaccaccacgaccagcgugccccuguga

SEQ ID NO: 18661 - RNA, 828 nt, Artificial Sequence
  SARS-CoV-2__MT833985.1__ORF3a protein CDS gc
auggaccuguucaugcgcaucuucaccaucggcaccgugacgcucaagcagggggagaucaaggacgccacccccagcgacuucguccgggccaccgcgaccaucccgauccaggccucccugcccuucggcuggcugaucguggggguggcccuccuggccgucuuccagagcgccuccaagaucaucacgcugaagaagcgcuggcagcucgcgcugagcaagggcgugcacuucgugugcaaccugcuccugcuguucgucaccguguacucccaccuccugcugguggccgccgggcucgaggcccccuuccuguaccuguacgcgcucgucuacuuccugcagagcaucaacuucgugcggaucaucaugcgccuguggcucugcuggaagugccgguccaagaacccccugcuguacgacgccaacuacuuccucugcuggcacaccaacugcuacgacuacugcaucccguacaacagcgugaccuccagcaucgucaucacguccggcgacggcaccaccauccccaucagcgagcacgacuaccagaucgggggcuacaccgagaagugggaguccggggugaaggacugcgugguccugcacagcuacuucacguccgacuacuaccagcuguacagcacccagcucuccaccgacaccggcguggagcacgugacguucuucaucuacaacaagaucgucgacgagcccgaggagcacgugcagauccacaccaucgacgggagcuccggcguggucaaccccgugauggagccgaucuacgacgagcccaccaccacgaccagcgugccccuguga

SEQ ID NO: 18662 - RNA, 828 nt, Artificial Sequence
  SARS-CoV-2__MT834019.1__ORF3a protein CDS gc
auggaccuguucaugcgcaucuucaccaucggcaccgugacgcucaagcagggggagaucaaggacgccacccccagcgacuucguccgggccaccgcgaccaucccgauccaggccucccugcccuucggcuggcugaucguggggguggcccuccuggccgucuuccagagcgccuccaagaucaucacgcugaagaagcgcuggcagcucgcgcugagcaagggcgugcacuucgugugcaaccugcuguuccuguucgucaccguguacucccaccuccuccugguggccgccgggcuggaggcccccuuccucuaccuguacgcgcuggucuacuuccuccagagcaucaacuucgugcggaucaucaugcgccuguggcugugcuggaagugccgguccaagaacccccuccuguacgacgccaacuacuuccugugcuggcacaccaacugcuacgacuacugcaucccguacaacagcgugaccuccagcaucgucaucacguccggcgacggcaccaccagccccaucuccgagcacgacuaccagaucgggggcuacaccgagaagugggagagcggggugaaggacugcgugguccuccacuccuacuucacgagcgacuacuaccagcuguacuccacccagcugagcaccgacaccggcguggagcacgugacguucuucaucuacaacaagaucgucgacgagcccgaggagcacgugcagauccacaccaucgacggguccagcggcguggucaaccccgugauggagccgaucuacgacgagcccaccaccacgaccagcgugccccucuga

SEQ ID NO: 18663 - RNA, 828 nt, Artificial Sequence
  SARS-CoV-2__MT834027.1__ORF3a protein CDS gc
auggaccuguucaugcgcaucuucaccaucggcaccgugacgcucaagcagggggagaccaaggacgccacccccagcgacuucguccgggccaccgcgacgaucccgauccaggccucccugcccuucggcuggcugaucguggggguggcccuccuggccgucuuccagagcgccuccaagaucaucacccugaagaagcgcuggcagcucgcgcugagcaagggcgugcacuucgugugcaaccugcuguuccuguucgucaccguguacucccaccuccuccugguggccgccgggcuggaggcccccuuccucuaccuguacgcgcuggucuacuuccuccagagcaucaacuucgugcggaucaucaugcgccuguggcugugcuggaagugccgguccaagaacccccuccuguacgacgccaacuacuuccugugcuggcacaccaacugcuacgacuacugcaucccguacaacagcgugacguccagcaucgucaucaccuccggcgacggcaccaccagccccaucuccgagcacgacuaccagaucgggggcuacacggagaagugggagagcggggugaaggacugcgugguccuccacuccuacuucaccagcgacuacuaccagcuguacuccacccagcugagcaccgacacgggcguggagcacgugaccuucuucaucuacaacaagaucgucgacgagcccgaggagcacgugcagauccacaccaucgacggguccagcggcguggucaaccccgugauggagccgaucuacgacgagcccaccacgaccaccagcgugccccucuga

SEQ ID NO: 18664 - RNA, 828 nt, Artificial Sequence
  SARS-CoV-2__MT834080.1__ORF3a protein CDS gc
auggaccuguucaugcgcaucuucaccaucggcaccgugacgcucaagcagggggagaucaaggacgccacccccagcgacuucguccgggccaccgcgaccaucccgauccaggcgccccugcccuucggcuggcugaucguggggguggcccuccuggccgucuuccacuccgccagcaagaucaucacgcugaagaagcgcuggcagcucgcccuguccaagggcgugcacuucgugugcaaccugcuccugcuguucgucaccguguacagccaccuccugcugguggccgccgggcucgaggcccccuuccuguaccuguacgcgcucgucuacuuccugcaguccaucaacuucgugcggaucaucaugcgccuguggcucugcuggaagugccggagcaagaacccgcugcuguacgacgccaacuacuuccucugcuggcacaccaacugcuacgacuacugcauccccuacaacuccgugaccagcuccaucgucaucacgagcggcgacggcaccaccucccccaucagcgagcacgacuaccagaucgggggcuacaccgagaagugggaguccggggugaaggacugcgugguccugcacagcuacuucacguccgacuacuaccagcuguacagcacccagcucuccaccgacaccggcguggagcacgugacguucuucaucuacaacaagaucgucgacgagcccgaggagcacgugcagauccacaccaucgacgggagcuccggcguggucaacccggugauggagcccaucuacgacgagcccaccaccacgaccagcgugccccuguga

SEQ ID NO: 18665 - RNA, 828 nt, Artificial Sequence
  SARS-CoV-2__MT834651.1__ORF3a protein CDS gc
auggaccuguucaugcgcaucuucaccaucggcaccgugacgcucaagcagggggagaucaaggacgccacccccagcgacuucguccgggccaccgcgaccaucccgauccaggccucccugcccuucggcuggcugaucguggggguggcccuccuggccgucuuccagagcgccuccaagaucaucacgcugaagaagcgcuggcagcucgcgcugagcaagggcgugcacuucgugugcaaccugcuccugcuguucgucaccguguacucccaccuccugcugguggccgccgggcucgaggcccccuuccuguaccuguacgcgcucgucuacuuccugcagagcaucaacuucgugcggaucaucaugcgccuguggcucugcuggaagugccgguccaagaacccccugcuguacgacgccaacuacuuccucugcuggcacaccaacugcuacgacuacugcaucccguacaacagcgugaccuccagcaucgucaucacguccggcgacggcaccaccagccccaucuccgagcacgacuaccagaucgggggcuacaccgagaagugggagagcggggugaaggacugcgugguccugcacuccuacuucacgagcgacuacuaccagcuguacuccacccagcucagcaccgacaccggcguggagcacgugacguucuucaucuacaacaagaucgucgacgggcccgaggagcacgugcagauccacaccaucgacggcuccagcggcguggucaaccccgugauggagccgaucuacgacgagcccaccaccacgaccagcgugccccuguga

SEQ ID NO: 18666 - RNA, 774 nt, Artificial Sequence
  SARS-CoV-2__MT834849.1__ORF3a protein CDS gc
auggaccuguucaugcgcaucuucaccaucggcaccgugacgcucaagcagggggagaucaaggacgccacccccagcgacuucguccgggccaccgcgaccaucccgauccaggccucccugcccuucggcuggcugaucguggggguggcccuccuggccgucuuccacagcgccuccaagaucaucacgcugaagaagcgcuggcagcucgcgcugagcaagggcgugcacuucgugugcaaccugcuccugcuguucgucaccguguacucccaccuccugcugguggccgccgggcucgaggcccccuuccuguaccuguacgcgcucgucuacuuccugcagagcaucaacuucgugcggaucaucaugcgccuguggcucugcuggaagugccgguccaagaacccccugcuguacgacgccaacuacuuccucugcuggcacaccaacugcuacgacuacugcaucccguacaacagcgugaccuccagcaucgucaucacguccggcgacggcaccaccagccccaucuccgagcacgacuaccagaucgggggcuacaccgagaagugggagagcggggugaaggacugcgugguccugcacuccuacuucacgagcgacuacuaccagcuguacuccacccagcucagcaccgacaccggcguggagcacgugacguucuucaucuacaacaagaucgucgacgagcccgaggagcacgugcagauccacaccaucgacggguccagcggcgugauccaguga

SEQ ID NO: 18667 - RNA, 828 nt, Artificial Sequence
  SARS-CoV-2__MT704820.1__ORF3a protein CDS gc
auggaccuguucaugcgcaucuucaccaucggcaccgugacgcucaagcagggggagaucaaggacgccacccccagcgacuucguccgggccaccgcgaccaucccgauccaggccucccugcccuucggcuggcugaucuucgggguggcccuccuggccguguuccagagcgccuccaagaucaucacgcugaagaagcgcuggcagcucgcgcugagcaagggcguccacuucgugugcaaccugcuccugcuguucgugaccgucuacucccaccuccugcugguggccgccgggcucgaggcccccuuccuguaccuguacgcgcucguguacuuccugcagagcaucaacuucguccggaucaucaugcgccuguggcucugcuggaagugccgguccaagaacccccugcuguacgacgccaacuacuuccucugcuggcacaccaacugcuacgacuacugcaucccguacaacagcgugaccuccagcaucgugaucacguccggcgacggcaccaccagccccaucuccgagcacgacuaccagaucgggggcuacaccgagaagugggagagcggggucaaggacugcguggugcugcacuccuacuucacgagcgacuacuaccagcuguacuccacccagcucagcaccgacaccggcgucgagcacgugacguucuucaucuacaacaagaucguggacgagcccgaggagcacguccagauccacaccaucgacggguccagcggcguggugaaccccgucauggagccgaucuacgacgagcccaccaccacgaccagcgugccccuguga

SEQ ID NO: 18668 - RNA, 819 nt, Artificial Sequence
  SARS-CoV-2__MT827206.1__ORF3a protein CDS gc
auggaccuguucaugcgcaucuucaccaucggcaccgugacgcucaagcagggggagaucaaggacgccacccccagcgacuucguccgggccaccgcgaccaucccgauccaggccucccugcccuucggcuggcugaucguggggguggcccuccuggccgucuuccacagcgccuccaagaucaucacgcugaagaagcgcuggcagcucgcgcugagcaagggcgugcacuucgugugcaaccugcuccugcuguucgucaccguguacucccaccuccugcugguggccgccgggcucgaggcccccuuccuguaccuguacgcgcucgucuacuuccugcagagcaucaacuucgugcggaucaucaugcgccuguggcucugcuggaagugccgguccaagaacccccugcuguacgacgccaacuacuuccucugcuggcacaccaacugcuacgacuacugcaucccguacaacagcgugaccuccagcaucgucaucacguccggcgacggcaccaccagccccaucuccgagcacgacuaccagaucgggggcuacaccgagaagugggagagcggggugaaggacugcgugguccugcacuccuacuucacgagcgacuacuaccagcuguacuccacccagcucagcaccgacaccggcguggagcacgugacguucuucaucuacaacaagaucgucgacgagcccgaggagcacgugcagauccacaccaucgacggguccagcggcguggucauggagcccaucuacgacgagccgaccaccacgaccagcgugccccuguga

SEQ ID NO: 18669 - RNA, 828 nt, Artificial Sequence
  SARS-CoV-2__MT827249.1__ORF3a protein CDS gc
auggaccuguucaugcgcaucuucaccaucggcaccgugacgcucaagcagggggagaucaaggacgccacccccagcgacuucguccgggccaccgcgaccaucccgauccaggccucccugcccuucggcuggcugaucguggggguggcccuccuggccgucuuccacagcgccuccaagaucaucacgcugaagaagcgcuggcagcucgcgcugagcaagggcauccacuucgugugcaaccugcuccugcuguucgugaccgucuacucccaccuccugcugguggccgccgggcucgaggcccccuuccuguaccuguacgcgcucguguacuuccugcagagcaucaacuucguccggaucaucaugcgccuguggcucugcuggaagugccgguccaagaacccccugcuguacgacgccaacuacuuccucugcuggcacaccaacugcuacgacuacugcaucccguacaacagcgugaccuccagcaucgugaucacguccggcgacggcaccaccagccccaucuccgagcacgacuaccagaucgggggcuacaccgagaagugggagagcggggucaaggacugcguggugcugcacuccuacuucacgagcgacuacuaccagcuguacuccacccagcucagcaccgacaccggcgucgagcacgugacguucuucaucuacaacaagaucguggacgagcccgaggagcacguccagauccacaccaucgacggguccagcggcguggugaaccccgucauggagccgaucuacgacgagcccaccaccacgaccagcgugccccuguga

SEQ ID NO: 18670 - RNA, 828 nt, Artificial Sequence
  SARS-CoV-2__MT821572.1__ORF3a protein CDS gc
auggaccuguucaugcgcaucuucaccaucggcaccgugacgcucaagcagggggagaucaaggacgccacccccagcgacuucguccgggccaccgcgaccaucccgauccaggccucccugcccuucggcuggcugaucguggggguggcccuccuggccgucuuccacagcgccuccaagaucaucacgcugaagaagcgcuggcagcucgcgcugagcaagggcgugcacuucgugugcaaccugcuccugcuguucgucaccguguacucccaccuccugcugguggccgccgggcucgaggcccccuuccuguaccuguacgcgcucgucuacuuccugcagagcaucaacuucgugcggaucaucaugcgccuguggcucugcuggaagugccgguccaagaacccccugcuguacgacgccaacuacuuccucugcuggcacaccaacugcuacgacuacugcaucccguacaacagcgugaccuccagcaucgucaucacguccggcgacggcaccaccagccccaucuccgagcacgacuaccagaucgggggcuacaccgagaagugggagagcggggugaaggacugcgugguccugcacuccuacuucgccagcgacuacuaccagcuguacuccacgcagcucagcaccgacaccggcguggagcacgugaccuucuucaucuacaacaagaucgucgacgagcccgaggagcacgugcagauccacacgaucgacggguccagcggcguggucaaccccgugauggagccgaucuacgacgagcccaccaccaccacgagcgugccccuguga

SEQ ID NO: 18671 - RNA, 828 nt, Artificial Sequence
  SARS-CoV-2__MT821581.1__ORF3a protein CDS gc
auggaccuguucaugcgcaucuucaccaucggcaccgugacgcucaagcagggggagaucaaggacgccacccccagcgacuucguccgggccaccgcgaccaucccgauccaggccucccugcccuucggcuggcugaucguggggguggcccuccuggccgucuuccagagcgccuccaagaucaucacgcugaagaagcgcuggcagcucgcgcugagcaagggcgugcacuucgugugcaaccugcuccugcuguucgucaccguguacucccaccuccugcugguggccgccgggcucgaggcccccuuccuguaccuguacgcgcucgucuacuuccugcagagcaucaacuucgugcggaucaucaugcgccuguggcucugccggaagugccgcuccaagaacccccugcuguacgacgccaacuacuuccucugcuggcacaccaacugcuacgacuacugcaucccguacaacagcgugaccuccagcaucgucaucacguccggcgacggcaccaccagccccaucuccgagcacgacuaccagaucgggggcuacaccgagaagugggagagcggggugaaggacugcgugguccugcacuccuacuucacgagcgacuacuaccagcuguacuccacccagcucagcaccgacaccggcguggagcacgugacguucuucaucuacaacaagaucgucgacgagcccgaggagcacgugcagauccacaccaucgacggguccagcggcguggucaaccccgugauggagcugaucuacgacgagccgaccaccacgaccagcgugccccuguga

SEQ ID NO: 18672 - RNA, 828 nt, Artificial Sequence
  SARS-CoV-2__MT821673.1__ORF3a protein CDS gc
auggaccuguucaugcgcaucuucaccaucggcaccgugacgcucaagcagggggagaucaaggacgccacccccagcgacuucguccgggccaccgcgaccaucccgauccaggccucccugcccuucggcuggcugaucguggggguggcccuccuggccgucuuccagagcgccuccaagaucaucacgcugaagaagcgcuggcagcucgcgcugagcaagggcgugcacuucgugugcaaccugcuccugcuguucgucaccguguacucccaccuccugcugguggccgccgggcucgaggcccccuuccuguaccuguacgcgcucgucuacuuccugcagagcaucaacuucgugcggaucaucaugaugcuguggcucugcuggaagugccgcuccaagaacccccugcuguacgacgccaacuacuuccucugcuggcacaccaacugcuacgacuacugcaucccguacaacagcgugaccuccagcaucgucaucacguccggcgacggcaccaccagccccaucuccgagcacgacuaccagaucgggggcuacaccgagaagugggagagcggggugaaggacugcgugguccugcacuccuacuucacgagcgacuacuaccagcuguacuccacccagcucagcaccgacaccggcguggagcacgugacguucuucaucuacaacaagaucgucgacgagcccgaggagcacgugcagauccacaccaucgacggguccagcggcguggucaaccccgugauggagccgaucuacgacgagcccaccaccacgaccagcgugccccuguga

SEQ ID NO: 18673 - RNA, 828 nt, Artificial Sequence
  SARS-CoV-2__MT821764.1__ORF3a protein CDS gc
auggaccuguucaugcgcaucuucaccaucggcaccgugacgcucaagcagggggagaucaaggacgccacccccagcgacuucguccgggccaccgcgaccaucccgauccaggccucccugcccuucggcuggcugaucguggggguggcccuccuggccgucuuccagagcgccuccaagaucaucacgcugaagaagcgcuggcagcucgcgcugagcaagggcgugcacuucgugugcaaccugcuccugcuguucgucaccguguacucccaccuccugcugguggccgccgggcucgaggcccccuuccuguaccuguacgcgcucgucuacuuccugcagagcaucaacuucgugcggaucaucaugcgccuguggcucugcuggaagugccgguccaagaacccccugcuguacgacgccaacuacuuccucugcuggcacaccaacugcuacgacuacugcaucccguacaacagccugaccuccagcaucgugaucacguccggcgacggcaccaccagccccaucuccgagcacgacuaccagaucgggggcuacaccgagaagugggagagcggggucaaggacugcguggugcugcacuccuacuucacgagcgacuacuaccagcucuacuccacccagcugagcaccgacaccggcgucgagcacgugacguucuucaucuacaacaagaucguggacgagcccgaggagcacguccagauccacaccaucgacggguccagcggcguggugaaccccgucauggagccgaucuacgacgagcccaccaccacgaccagcgugccccuguga

SEQ ID NO: 18674 - RNA, 828 nt, Artificial Sequence
  SARS-CoV-2__MT820461.1__ORF3a protein CDS gc
auggaccuguucaugcgcaucuucaccaucggcaccgugacgcucaagcagggggagaucaaggacgccacccccagcgacuucguccgggccaccgcgaccaucccgauccaggccucccugcccuucggcuggcugaucguggggguggcccuccuggccgucuuccagagcgccuccaagaucaucacgcugaagaagcgcuggcagcucgcgcugagcgagggcgugcacuucgugugcaaccugcuccugcuguucgucaccguguacucccaccuccugcugguggccgccgggcucgaggcccccuuccuguaccuguacgcgcucgucuacuuccugcagagcaucaacuucgugcggaucaucaugcgccuguggcucugcuggaagugccgguccaagaacccccugcuguacgacgccaacuacuuccucugcuggcacaccaacugcuacgacuacugcaucccguacaacagcgugaccuccagcaucgucaucacguccggcgacggcaccaccagccccaucuccgagcacgacuaccagaucgggggcuacaccgagaagugggagagcggggugaaggacugcgugguccugcacuccuacuucacgagcgacuacuaccagcuguacuccacccagcucagcaccgacaccggcguggagcacgugacguucuucaucuacaacaagaucgucgacgagcccgaggagcacgugcagauccacaccaucgacggguccagcggcguggucaaccccgugauggagccgaucuacgacgagcccaccaccacgaccagcgugccccuguga

SEQ ID NO: 18675 - RNA, 828 nt, Artificial Sequence
  SARS-CoV-2__MT820489.1__ORF3a protein CDS gc
auggaccuguucaugcgcaucuucaccaucggcaccgugacgcucaagcagggggagaucaaggacgccacccccagcgacuucguccgggccaccgcgaccaucccgauccaggccucccugcccuucggcuggcugaucguggggguggcccuccuggccgucuuccacagcgccuccaagaucaucacgcugaagaagcgcuggcagcucgcgcugagcaagggcgugcacuucgugugcaaccugcuccugcuguucgucaccguguacucccaccuccugcugguggccgccgggcucgaggcccccuuccuguaccuguacgcgcucgucuacuuccugcagagcaucaacuucgugcggaucaucaugcgccuguggcucugcuggaagugccgguccaagaacccccugcuguacgacgccaacuacuuccucugcuggcacaccaacugcuacgacuacugcaucccguacaacagcgugaccucccugaucgucaucacgagcggcgacggcaccaccucccccaucagcgagcacgacuaccagaucgggggcuacaccgagaagugggaguccggggugaaggacugcgugguccugcacagcuacuucacguccgacuacuaccagcucuacagcacccagcuguccaccgacaccggcguggagcacgugacguucuucaucuacaacaagaucgucgacgagcccgaggagcacgugcagauccacaccaucgacgggagcuccggcguggucaaccccgugauggagccgaucuacgacgagcccaccaccacgaccagcgugccccuguga

SEQ ID NO: 18676 - RNA, 828 nt, Artificial Sequence
  SARS-CoV-2__MT810504.1__ORF3a protein CDS gc
auggaccuguucaugcgcaucuucaccaucggcaccgugacgcucaagcagggggagaucaaggacgccacccccagcgacuucguccgggccaccgcgaccauccugauccaggccucccugccguucggcuggcucaucguggggguggcccugcuggccgucuuccacagcgccuccaagaucaucacgcucaagaagcgcuggcagcuggcgcugagcaagggcgugcacuucgugugcaaccuccugcugcuguucgucaccguguacucccaccuccugcucguggccgccgggcuggaggcccccuuccuguaccucuacgcgcuggucuacuuccugcagagcaucaacuucgugcggaucaucaugcgccucuggcugugcuggaagugccgguccaagaacccccugcucuacgacgccaacuacuuccugugcuggcacaccaacugcuacgacuacugcauccccuacaacagcgugaccuccagcaucgucaucacguccggcgacggcaccaccagcccgaucuccgagcacgacuaccagaucgggggcuacaccgagaagugggagagcggggugaaggacugcgugguccugcacuccuacuucacgagcgacuacuaccagcucuacuccacccagcugagcaccgacaccggcguggagcacgugacguucuucaucuacaacaagaucgucgacgagcccgaggagcacgugcagauccacaccaucgacggguccagcggcguggucaaccccgugauggagcccaucuacgacgagccgaccaccacgaccagcgugccccuguga

SEQ ID NO: 18677 - RNA, 828 nt, Artificial Sequence
  SARS-CoV-2__MT810687.1__ORF3a protein CDS gc
auggaccuguucaugcgcaucuucaccaucggcaccgugacgcucaagcagggggagaucaaggacgccacccccagcgacuucguccgggccaccgcgaccaucccgauccaggccucccugcccuucggcuggcugaucguggggguggcccuccuggccgucuuccagagcgccuccaagaucaucacgcugaagaagcgcuggcagcucgcgcugagcaagggcgugcacuucgugugcaaccugcuccugcuguucgucaccguguacucccaccuccugcugguggccgccgggcucgaggcccccuuccuguaccuguacgcgcucgucuacuuccugcagagcaucaacuucgugcggaucaucaugcgccuguggcucugcuggaagugccgguccaagaacccccugcuguacgacgccaacuacuuccucugcuggcacaccaacugcuacgacuacugcaucccguacaacagcgugaccuccagcaucgucaucacguccggcgacggcaccaccagccccaucuccgagcacgaccaccagaucgggggcuacaccgagaagugggagagcggggugaaggacugcgugguccugcacuccuacuucacgagcgacuacuaccagcuguacuccacccagcucagcaccgacaccggcguggagcacgugacguucuucaucuacaacaagaucgucgacgagcccgaggagcacgugcagauccacaccaucgacggguccagcggcguggucaaccccgugauggagccgaucuacgacgagcccaccaccacgaccagcgugccccuguga

SEQ ID NO: 18678 - RNA, 828 nt, Artificial Sequence
  SARS-CoV-2__MT810721.1__ORF3a protein CDS gc
auguaccuguucaugcgcaucuucaccaucggcaccgugacgcucaagcagggggagaucaaggacgccacccccagcgacuucguccgggccaccgcgaccaucccgauccaggccucccugcccuucggcuggcugaucguggggguggcccuccuggccgucuuccagagcgccuccaagaucaucacgcugaagaagcgcuggcagcucgcgcugagcaagggcgugcacuucgugugcaaccugcuccugcuguucgucaccguguacucccaccuccugcugguggccgccgggcucgaggcccccuuccuguaccuguacgcgcucgucuacuuccugcagagcaucaacuucgugcggaucaucaugcgccuguggcucugcuggaagugccgguccaagaacccccugcuguacgacgccaacuacuuccucugcuggcacaccaacugcuacgacuacugcaucccguacaacagcgugaccuccagcaucgucaucacguccggcgacggcaccaccagccccaucuccgagcacgacuaccagaucgggggcuacaccgagaagugggagagcggggugaaggacugcgugguccugcacuccuacuucacgagcgacuacuaccagcuguacuccacccagcucagcaccgacaccggcguggagcacgugacguucuucaucuacaacaagaucgucgacgagcccgaggagcacgugcagauccacaccaucgacggguccagcggcguggucaaccccgugauggagccgaucuacgacgagcccaccaccacgaccagcgugccccuguga

SEQ ID NO: 18679 - RNA, 828 nt, Artificial Sequence
  SARS-CoV-2__MT810727.1__ORF3a protein CDS gc
auggaccuguucaugcgcaucuucaccaucggcaccgugacgcucaagcagggggagaucaaggacgccacccccagcgacuucguccgggccaccgcgaccaucccgauccaggccucccugcccuucggcuggcugaucguggggguggcccuccuggccgucuuccacagcgccuccaagaucaucacgcugaagaagcgcuggcagcucgcgcugagcaagggcgugcacuucgugugcaaccugcuccugcuguucgucaccguguacucccaccuccugcugguggccgccgggcucgaggcccccuuccuguaccuguacgcgcucgucuacuuccugcagagcaucaacuucgugcggaucaucaugcgccuguggcucugcuggaagugccgguccaagaacccccugcuguacgacgccaacuacuuccucugcuggcacaccaacugcuacgacuacugcaucccguacaacagcgugaccuccagcaucgucaucacguccggcgacggcaccaccagccccaucuccgagcacgacuaccagaucgggggcuacaccgagaagugggagagcggggugaaggacugcgugguccugcacuccuacuucacgagcgacuacuaccagcuguacuccacccagcucagcaccgacaccggcguggagcacgugacguucuucaucuacaacaagaucgucgacgagcccgaggagcacgugcagauccacaccaucgacggguccagcggcguggucaaccccgugauggagccgaucuacgacgagcccaccaccacgaccaucgugccccuguga

SEQ ID NO: 18680 - RNA, 828 nt, Artificial Sequence
  SARS-CoV-2__MT810789.1__ORF3a protein CDS gc
auggaccuguucaugcgcaucuucaccaucggcaccgugacgcucaagcagggggagaucaaggacgccacccccagcgacuucguccgggccaccgcgaccaucccgauccaggccucccugcccuucggcuggcugaucguggggguggcccuccuggccgucuuccagagcgccuccaagaucaucacgcugaagaagcgcuggcagcucgcgcugagcaagggcgugcacuucgugugcaaccugcuccugcuguucgucaccguguacucccaccuccugcugguggccgccgggcucgaggcccccuuccuguaccuguacguccucguguacuuccugcagagcaucaacuucgugcggaucaucaugcgccuguggcucugcuggaagugccgguccaagaacccccugcuguacgacgcgaacuacuuccucugcuggcacaccaacugcuacgacuacugcaucccguacaacagcgucaccuccagcaucgugaucacguccggcgacggcaccaccagccccaucuccgagcacgacuaccagaucgggggcuacaccgagaagugggagagcggggugaaggacugcgucgugcugcacuccuacuucacgagcgacuacuaccagcuguacuccacccagcucagcaccgacaccggcguggagcacgucacguucuucaucuacaacaagaucguggacgagcccgaggagcacgugcagauccacaccaucgacggguccagcggcgucgugaaccccgugauggagccgaucuacgacgagcccaccaccacgaccagcgucccccuguga

SEQ ID NO: 18681 - RNA, 828 nt, Artificial Sequence
  SARS-CoV-2__MT810827.1__ORF3a protein CDS gc
auggaccuguucaugcgcaucuucaccaucggcaccgugacgcucaagcagggggagaucaaggacgccacccccagcgacuucguccgggccaccgcgaccaucccgauccaggccucccugcccuucggcuggcugaucguggggguggcccuccuggccgucuuccacagcgccuccaagaucaucacgcugaagaagcgcuggcagcucgcgcugagcaagggcgugcacuucgugugcaaccugcuccugcuguucgucaccguguacucccaccuccugcugguggccgccgggcucgaggcccccuuccuguaccuguacgcgcucgucuacuuccugcagagcaucaacuucgugaagaucaucaugcggcuguggcucugcuggaagugccgcuccaagaacccccugcuguacgacgccaacuacuuccucugcuggcacaccaacugcuacgacuacugcaucccguacaacagcgugaccuccagcaucgucaucacguccggcgacggcaccaccagccccaucuccgagcacgacuaccagaucgggggcuacaccgagaagugggagagcggggugaaggacugcgugguccugcacuccuacuucacgagcgacuacuaccagcuguacuccacccagcucagcaccgacaccggcguggagcacgugacguucuucaucuacaacaagaucgucgacgagcccgaggagcacgugcagauccacaccaucgacggguccagcggcguggucaaccccgugauggagccgaucuacgacgagcccaccaccacgaccagcgugccccuguga

SEQ ID NO: 18682 - RNA, 828 nt, Artificial Sequence
  SARS-CoV-2__MT810843.1__ORF3a protein CDS gc
auggaccuguucaugcgcaucuucaccaucggcaccgugacgcucaagcagggggagaucaaggacgccacccccagcgacuucguccgggccaccgcgaccaucccgauccaggccucccugcccuucggcuggcugaucguggggguggcccuccuggccgucuuccagagcgccuccaagaucaucacgcugaagaagcgcuggcagcucgcgcugagcaagggcgugcacuucgugugcaaccugcuccugcuguucgucaccguguacucccaccuccugcugguggccgccgggcucgaggcccccuuccuguaccuguacgcgcucgucuacuuccugcagagcaucaacuucgugcggaucaucaugcgccuguggcucugcuggaagugccgguccaagaacccccugcuguacgacgccaacuacuuccucugcuggcacaccaacugcuacgacuacugcaucccguacaacagcgugaccucccugaucgucaucacgagcggcgacggcaccaccucccccaucagcgagcacgacuaccagaucgggggcuacaccgagaagugggaguccggggugaaggacugcgugguccugcacagcuacuucacguccgacuacuaccagcucuacagcacccagcuguccaccgacaccggcguggagcacgugacguucuucaucuacaacaagaucgucgacgagcccgaggagcacgugcagauccacaccaucgacgggagcuccggcguggucaaccccgugauggagccgaucuacgacgagcccaccaccacgaccagcgugccccuguga

SEQ ID NO: 18683 - RNA, 828 nt, Artificial Sequence
  SARS-CoV-2__MT810882.1__ORF3a protein CDS gc
auggaccuguucaugcgcaucuucaccaucggcaccgugacgcucaagcagggggagaucaaggacgccacccccagcgacuucguccgggccaccgcgaccaucccgauccaggccucccugcccuucggcuggcugaucguggggguggcccuccuggccgucuuccacagcgccuccaagaucaucacgcugaagaagcgcuggcagcucgcgcugagcaagggcgugcaguucgugugcaaccugcuccugcuguucgucaccguguacucccaccuccugcugguggccgccgggcucgaggcccccuuccuguaccuguacgcgcucgucuacuuccugcagagcaucaacuucgugcggaucaucaugcgccuguggcucugcuggaagugccgguccaagaacccccugcuguacgacgccaacuacuuccucugcuggcacaccaacugcuacgacuacugcaucccguacaacagcgugaccuccagcaucgucaucacguccggcgacggcaccaccagccccaucuccgagcacgacuaccagaucgggggcuacaccgagaagugggagagcggggugaaggacugcgugguccugcacuccuacuucacgagcgacuacuaccagcuguacuccacccagcucagcaccgacaccggcguggagcacgugacguucuucaucuacaacaagaucgucgacgagcccgaggagcacgugcagauccacaccaucgacggguccagcggcguggucaaccccgugauggagccgaucuacgacgagcccaccaccacgaccagcgugccccuguga

SEQ ID NO: 18684 - RNA, 828 nt, Artificial Sequence
  SARS-CoV-2__MT810900.1__ORF3a protein CDS gc
auggaccuguucaugcgcaucuucaccaucggcaccgugacgcucaagcagggggagaucaaggacgccacccccagcgacuucguccgggccaccgcgaccaucccgauccaggccucccugcccuucggcuggcugaucguggggguggcccuccuggccgucuuccacagcgccuccaagaucaucacgcugaagaagcgcuggcagcucgcgcugagcaagggcgugcacuucgugugcaaccugcuccugcuguucgucaccguguacucccaccuccugcugguggccgccgggcucgaggcccccuuccuguaccuguacgcgcucgucuacuuccugcagagcaucaacuucgugcggaucaucaugcgccuguggcucugcuggaagugccgguccaagaacccccugcuguacgacgccaacuacuuccucugcuggcacaccaacugcuacgacuacugcaucccguacaacagcgugaccuccagcaucgucaucacguccggcgacggcaccaccagccccaucuccgagcacgacuaccagaucgggggcuacaccgagaagugggagagcgggcugaaggacugcguggugcugcacuccuacuucacgagcgacuacuaccagcucuacuccacccagcugagcaccgacaccggcgucgagcacgugacguucuucaucuacaacaagaucguggacgagcccgaggagcacguccagauccacaccaucgacggguccagcggcguggugaaccccgucauggagccgaucuacgacgagcccaccaccacgaccagcgugccccuguga

SEQ ID NO: 18685 - RNA, 828 nt, Artificial Sequence
  SARS-CoV-2__MT810942.1__ORF3a protein CDS gc
auggaccuguucaugcgcaucuucaccaucggcaccgugacgcucaagcagggggagaucaaggacgccacccccagcgacuucguccgggccaccgcgaccaucccgauccaggccucccugcccuucggcuggcugaucguggggguggcccuccuggccggcuuccagagcgccuccaagaucaucacgcugaagaagcgcuggcagcucgcgcugagcaaggggguccacuucgugugcaaccugcuccugcuguucgugaccgucuacucccaccuccugcugguggccgccggccucgaggcccccuuccuguaccuguacgcgcucguguacuuccugcagagcaucaacuucguccggaucaucaugcgccuguggcucugcuggaagugccgguccaagaacccccugcuguacgacgccaacuacuuccucugcuggcacaccaacugcuacgacuacugcaucccguacaacagcgugaccuccagcaucgugaucacguccggcgacgggaccaccagccccaucuccgagcacgacuaccagaucggcggguacaccgagaagugggagagcggcgucaaggacugcguggugcugcacuccuacuucacgagcgacuacuaccagcuguacuccacccagcucagcaccgacaccggggucgagcacgugacguucuucaucuacaacaagaucguggacgagcccgaggagcacguccagauccacaccaucgacggcuccagcggcguggugaaccccgucauggagccgaucuacgacgagcccaccaccacgaccagcgugccccuguga

SEQ ID NO: 18686 - RNA, 828 nt, Artificial Sequence
  SARS-CoV-2__MT810985.1__ORF3a protein CDS gc
auggaccuguucaugcgcaucuucaccaucggcaccgugacgcucaagcagggggagaucaaggacgccacgccccuggacuucguccgggccaccgcgaccaucccgauccaggccagccugcccuucggcuggcucaucguggggguggcccugcuggccgucuuccaguccgccagcaagaucaucacccucaagaagcgcuggcagcuggcgcuguccaagggcgugcacuucgugugcaaccuccugcugcuguucgucaccguguacagccaccuccugcucguggccgccgggcuggaggcccccuuccuguaccucuacgcgcuggucuacuuccugcaguccaucaacuucgugcggaucaucaugcgccucuggcugugcuggaagugccggagcaagaacccccugcucuacgacgccaacuacuuccugugcuggcacaccaacugcuacgacuacugcaucccguacaacuccgugaccagcuccaucgucaucacgagcggcgacggcaccaccucccccaucagcgagcacgacuaccagaucgggggcuacaccgagaagugggaguccggggugaaggacugcgugguccugcacagcuacuucacguccgacuacuaccagcucuacagcacccagcuguccaccgacaccggcguggagcacgugacguucuucaucuacaacaagaucgucgacgagcccgaggagcacgugcagauccacaccaucgacgggagcuccggcguggucaaccccgugauggagccgaucuacgacgagcccaccaccacgaccagcgugccccuguga

SEQ ID NO: 18687 - RNA, 828 nt, Artificial Sequence
  SARS-CoV-2__MT811010.1__ORF3a protein CDS gc
auggaccuguucaugcgcaucuucaccaucggcaccgugacgcucaagcagggggagaucaaggacgccacccccagcgacuucguccgggccaccgcgaccaucccgauccaggccucccugcuguucggcuggcucaucguggggguggcccugcuggccgucuuccagagcgccuccaagaucaucacgcucaagaagcgcuggcagcuggcgcugagcaagggcgugcacuucgugugcaaccuccugcugcuguucgucaccguguacucccaccuccugcucguggccgccgggcuggaggcccccuuccuguaccucuacgcgcuggucuacuuccugcagagcaucaacuucgugcggaucaucaugcgccucuggcugugcuggaagugccgguccaagaacccccugcucuacgacgccaacuacuuccugugcuggcacaccaacugcuacgacuacugcauccccuacaacagcgugaccuccagcaucgucaucacguccggcgacggcaccaccagcccgaucuccgagcacgacuaccagaucgggggcuacaccgagaagugggagagcggggugaaggacugcgugguccugcacuccuacuucacgagcgacuacuaccagcucuacuccacccagcugagcaccgacaccggcguggagcacgugacguucuucaucuacaacaagaucgucgacgagcccgaggagcacgugcagauccacaccaucgacggguccagcggcguggucaaccccgugauggagcccaucuacgacgagccgaccaccacgaccagcgugccccuguga

SEQ ID NO: 18688 - RNA, 828 nt, Artificial Sequence
  SARS-CoV-2__MT811252.1__ORF3a protein CDS gc
auggaccuguucaugcgcaucuucaccaucggcaccgugacgcucaagcagggggagaucaaggacgccacccccagcgacuucguccgggccaccgcgaccaucccgauccaggccucccugcccuucggcuggcugaucguggggguggcccuccuggccgucuuccagagcgccuccaagaucaucacgcugaagaagcgcuggcagcucgcgcugagcaagggcgugcacuucgugugcaaccugcuccugcuguucgucaccguguacucccaccuccugcugguggccgccgggcucgaggcccccuuccuguaccuguacgcgcucgucuacuuccugcagagcaucaacuucgugcggaucaucaugcgccuguggcucugcuggaagugccgguccaagaacccccugcuguacgacgccaacuacuuccucugcuggcacaccaacugcuacgacuacugcaucccguacaacagcgugaccuccagcaucgucaucacguccggcgacggcaccaccagccccaucuccgagcacgacuaccagaucgggggcuacaccgagaagugggagagcggggugaaggacugcgugguccugcacuccuacuucacgagcgacuacuaccagcuguacuccacccagcucagcaccgacaccggcguggagcacgugacguucuucaucuacaacaagaucgucgacgagcccgaggagcacgugcagauccacaccaucgacggguccagcggcguggucaaccccgugauggagccgaucuacgacgagcccaagaccaccacgagcgugccccuguga

SEQ ID NO: 18689 - RNA, 828 nt, Artificial Sequence
  SARS-CoV-2__MT811259.1__ORF3a protein CDS gc
auggaccuguucaugcgcaucuucaccaucggcaccgugacgcucaagcagggggagaucaaggacgccacccccagcgacuucguccgggccaccgcgaccaucccgauccaggccucccugcccuucggcuggcugaucguggggguggcccuccuggccgucuuccacagcgccuccaagaucaucacgcugaagaagcgcuggcagcucgcgcugagcaagggcgugcacuucgugugcaaccugcuccugcuguucgucaccguguacucccaccuccugcugguggccgccgggcucgaggcccccuuccuguaccuguacgcgcucgucuacuuccugcagagcaucaacuucgugcggaucaucaugcgccuguggcucugcuggaagugccgguccaagaacccccugcuguacgacgccaacuacuuccucugcuggcacaccaacugcuacgacuacugcaucccguacaacagcgugaccuucuccaucgucaucacgagcggcgacggcaccaccucccccaucagcgagcacgacuaccagaucgggggcuacaccgagaagugggaguccggggugaaggacugcgugguccugcacagcuacuucacguccgacuacuaccagcuguacagcacccagcucuccaccgacaccggcguggagcacgugacguucuucaucuacaacaagaucgucgacgagcccgaggagcacgugcagauccacaccaucgacgggagcuccggcguggucaaccccgugauggagccgaucuacgacgagcccaccaccacgaccagcgugccccuguga

SEQ ID NO: 18690 - RNA, 828 nt, Artificial Sequence
  SARS-CoV-2__MT811301.1__ORF3a protein CDS gc
auggaccuguucaugcgcaucuucaccaucggcaccgugacgcucaagcagggggagaucaaggacgccacccccagcgacuucguccgggccaccgcgaccaucccgauccaggccucccugcccuucggcuggcugaucguggggguggcccuccuggccgucuuccagagcgccuccaagaucaucacgcugaagaagcgcuggcagcucgcgcugagcaagggcgugcacuucgugugcaaccugcuccugcuguucgucaccguguacucccaccuccugcugguggccgccgggcucgaggcccccuuccuguaccuguacgcgcucgucuacuuccugcagagcaucaacuucgugcggaucaucaugcgccuguggcucugcuggaagugccgguccaagaacccccugcuguacgacgccaacuacuucuucugcuggcacaccaacugcuacgacuacugcaucccguacaacagcgugaccuccagcaucgucaucacguccggcgacggcaccaccagccccaucuccgagcacgacuaccagaucgggggcuacaccgagaagugggagagcggggugaaggacugcgugguccuccacuccuacuucacgagcgacuacuaccagcuguacuccacccagcugagcaccgacaccggcguggagcacgugacguucuucaucuacaacaagaucgucgacgagcccgaggagcacgugcagauccacaccaucgacggguccagcggcguggucaaccccgugauggagccgaucuacgacgagcccaccaccacgaccagcgugccccucuga

SEQ ID NO: 18691 - RNA, 828 nt, Artificial Sequence
  SARS-CoV-2__MT811420.1__ORF3a protein CDS gc
auggaccuguucaugcgcaucuucaccaucggcaccgugacgcucaagcagggggagaucaaggacgccacccccagcgacuucguccgggccaccgcgaccaucccgauccaggccucccugcccuucggcuggcugaucguggggguggcccuccuggccgucuuccagagcgccuccaagaucaucacgcugaagaagcgcuggcagcucgcgcugagcaagggcgugcacuucgugugcaaccugcuccugcuguucgucaccguguacucccaccuccugcugguggccgccgggcucgaggcccccuuccuguaccuguacgcgcucgucuacuuccugcagagcaucaacuucgugcggaucaucaugcgccuguggcucugcugcaagugccgguccaagaacccccugcuguacgacgccaacuacuuccucugcuggcacaccaacugcuacgacuacugcaucccguacaacagcgugaccuccagcaucgucaucacguccggcgacggcaccaccagccccaucuccgagcacgacuaccagaucgggggcuacaccgagaagugggagagcggggugaaggacugcgugguccugcacuccuacuucacgagcgacuacuaccagcuguacuccacccagcucagcaccgacaccggcguggagcacgugacguucuucaucuacaacaagaucgucgacgagcccgaggagcacgugcagauccacaccaucgacggguccagcggcguggucaaccccgugauggagccgaucuacgacgagcccaccaccacgaccagcgugccccuguga

SEQ ID NO: 18692 - RNA, 828 nt, Artificial Sequence
  SARS-CoV-2__MT811464.1__ORF3a protein CDS gc
auggaccuguucaugcgcaucuucaccaucggcaccgugacgcucaagcagggggagaucaaggacgccacccccagcgacuucguccgggccaccgcgaccaucccgauccaggccucccugcccuucggcuggcugaucguggggguggcccuccuggccgucuuccagagcgccuccaagaucaucacgcugaagaagcgcuggcagcucgcgcugagcaagggcgugcacuucgugugcaaccugcuccugcuguucgucaccguguacucccaccuccugcugguggccgccgggcucgaggcccccuuccuguaccuguacgcgcucgucuacuuccugcagagcaucaacuucgugcggaucaucaugcgccuguggcucugcuggaagugccgguccaagaacccccugcuguacgacgccaacuacuuccucugcuggcacaccaacugcuacgacuacugcaucccgcacaacagcgugaccuccagcaucgucaucacguccggcgacggcaccaccagccccaucuccgagcacgacuaccagaucgggggcuacaccgagaagugggagagcggggugaaggacugcgugguccugcacuccuacuucacgagcgacuacuaccagcuguacuccacccagcucagcaccgacaccggcguggagcacgugacguucuucaucuacaacaagaucgucgacgagcccgaggagcacgugcagauccacaccaucgacggguccagcggcguggucaaccccgugauggagccgaucuacgacgagcccaccaccacgaccagcgugccccuguga

SEQ ID NO: 18693 - RNA, 828 nt, Artificial Sequence
  SARS-CoV-2__MT811495.1__ORF3a protein CDS gc
auggaccuguucaugcgcaucuucaccaucggcaccgugacgcucaagcagggggagaucaaggacgccacccccagcgacuucguccgggccaccgcgaccaucccgauccaggccucccugcccuucggcuggcugaucguggggguggcccuccuggccgucuuccacagcgccuccaagaucaucacgcugaagaagcgcuggcagcucgcgcugagcaagggcgugcacuucgugugcaaccugcuccugcuguucgucaccguguacucccaccuccugcugguggccgccgggcucgaggcccccuuccuguaccuguacgcgcucgucuacuuccugcagagcaucaacuucgugcggaucaucaugcgccuguggcucugcuggaagugccgguccaagaacccccugcuguacgacgccuacuacuuccucugcuggcacaccaacugcuacgacuacugcaucccguacaacagcgugaccuccagcaucgucaucacguccggcgacggcaccaccagccccaucuccgagcacgacuaccagaucgggggcuacaccgagaagugggagagcggggugaaggacugcgugguccugcacuccuacuucacgagcgacuacuaccagcuguacuccacccagcucagcaccgacaccggcguggagcacgugacguucuucaucuacaacaagaucgucgacgagcccgaggagcacgugcagauccacaccaucgacggguccagcggcguggucaaccccgugauggagccgaucuacgacgagcccaccaccacgaccagcgugccccuguga

SEQ ID NO: 18694 - RNA, 828 nt, Artificial Sequence
  SARS-CoV-2__MT811505.1__ORF3a protein CDS gc
auggaccuguucaugcgcaucuucaccaucggcaccgugacgcucaagcagggggagaucaaggacgccacccccagcgacuucguccgggccaccgcgaccaucccgauccaggccucccugcccuucggcuggcugaucguggggguggcccuccuggccgucuuccagagcgccuccaagaucaucacgcugaagaagcgcuggcagcucgcgcugagcaagggcgugcacuucgugugcaaccugcuccugcuguucgucaccguguacucccaccuccugcugguggccgccgggcucgaggcccccuuccuguaccuguacgcgcuccuguacuuccugcagagcaucaacuucguccggaucaucaugcgccucuggcugugcuggaagugccgguccaagaacccccugcucuacgacgccaacuacuuccugugcuggcacaccaacugcuacgacuacugcaucccguacaacagcgugaccuccagcaucgugaucacguccggcgacggcaccaccagccccaucuccgagcacgacuaccagaucgggggcuacaccgagaagugggagagcggggucaaggacugcguggugcugcacuccuacuucacgagcgacuacuaccagcucuacuccacccagcugagcaccgacaccggcgucgagcacgugacguucuucaucuacaacaagaucguggacgagcccgaggagcacguccagauccacaccaucgacggguccagcggcguggugaaccccgucauggagccgaucuacgacgagcccaccaccacgaccagcgugccccuguga

SEQ ID NO: 18695 - RNA, 828 nt, Artificial Sequence
  SARS-CoV-2__MT811513.1__ORF3a protein CDS gc
auggaccuguucaugcgcaucuucaccaucggcaccgugacgcucaagcagggggagaucaaggacgccacccccagcgacuucguccgggccaccgcgaccaucccgauccaggccucccugcccuucggcuggcugaucguggggguggcccuccuggccgucuuccagagcgccuccaagaucaucacgcugaagaagcgcuggcagcucgcgcugagcaagggcgugcacuucgugugcaaccugcuccugcuguucgucaccguguacucccaccuccugcugguggccgccgggcucgaggcccccuuccuguaccuguacgcgcucgucuacuuccugcagagcaucaacuucgugcggaucaucaugcgccuguggcucugcuggaagugccgguccaagaacccccugcuguacgacgccaacuacuuccucugcuggcacaccaacugcuacgacuacugcaucccguacaacagcgugaccuccagcaucgucaucacguccggcgacggcaccaccagccccaucuccgagcacgacuaccagaucgggggcuacaccgagaagugggagagcggggugaaggacugcgugguccugcacuccuacuucacgagcgacuacuaccagcuguacuccacccagcucagcaccgacaccggcguggagcacgugacguucuucaucuacaacaagaucgucgacgagcccgaggagcacgugcagauccacaccaucgacggguccagcggcguggucaacccccugauggagccgaucuacgacgagcccaccaccacgaccagcgugccccuguga

SEQ ID NO: 18696 - RNA, 828 nt, Artificial Sequence
  SARS-CoV-2__MT811520.1__ORF3a protein CDS gc
auggaccuguucaugcgcaucuucaccaucggcaccgugacgcucaagcagggggagaucaaggacgccacccccagcgacuucguccgggccaccgcgaccaucccgauccaggccucccugcccuucggcuggcugaucguggggguggcccuccuggccgucuuccagagcgccuccaagaucaucacgcugaagaagcgcuggcagcucgcgcugagcaagggcgugcacuucgugugcaaccugcuccugcuguucgucaccguguacucccaccuccugcugguggccgccuuccucgaggcccccuuccuguaccuguacgcgcucgucuacuuccugcagagcaucaacuucgugcggaucaucaugcgccuguggcucugcuggaagugccgguccaagaacccccugcuguacgacgccaacuacuuccucugcuggcacaccaacugcuacgacuacugcaucccguacaacagcgugaccuccagcaucgucaucacguccggggacggcaccaccagccccaucuccgagcacgacuaccagaucggcggguacaccgagaagugggagagcggcgugaaggacugcgugguccugcacuccuacuucacgagcgacuacuaccagcuguacuccacccagcucagcaccgacaccgggguggagcacgugacguucuucaucuacaacaagaucgucgacgagcccgaggagcacgugcagauccacaccaucgacggcuccagcgggguggucaaccccgugauggagccgaucuacgacgagcccaccaccacgaccagcgugccccuguga

SEQ ID NO: 18697 - RNA, 828 nt, Artificial Sequence
  SARS-CoV-2__MT811526.1__ORF3a protein CDS gc
auggaccuguucaugcgcaucuucaccaucggcaccgugacgcucaagcagggggagaucaaggacgccacccccagcgacuucguccgggccaccgcgaccaucccgauccaggccucccugcccuucggcuggcugaucguggggguggcccuccuggccgucuuccagagcgccuccaagaucaucacgcugaagaagcgcuggcagcucgcgcugagcaagggcgugcacuucgugugcaaccugcuccugcuguucgucaccguguacucccaccuccugcugguggccgccgggcucgaggcccccuuccuguaccuguacgcgcucgucuacuuccugcagagcauccacuucgugcggaucaucaugcgccuguggcucugcuggaagugccgguccaagaacccccugcuguacgacgccaacuacuuccucugcuggcacaccaacugcuacgacuacugcaucccguacaacagcgugaccuccagcaucgucaucacguccggcgacggcaccaccagccccaucuccgagcacgacuaccagaucgggggcuacaccgagaagugggagagcggggugaaggacugcgugguccugcacuccuacuucacgagcgacuacuaccagcuguacuccacccagcucagcaccgacaccggcguggagcacgugacguucuucaucuacaacaagaucgucgacgagcccgaggagcacgugcagauccacaccaucgacggguccagcggcguggucaaccccgugauggagccgaucuacgacgagcccaccaccacgaccagcgugccccuguga

SEQ ID NO: 18698 - RNA, 828 nt, Artificial Sequence
  SARS-CoV-2__MT811535.1__ORF3a protein CDS gc
auggaccuguucaugcgcaucuucaccaucggcaccgugacgcucaagcagggggagaucaaggacgccacccccagcgacuucguccgggccaccgcgaccaucccgauccaggccucccugcccuucggcuggcugaucguggggguggcccuccuggccgucuuccagagcgccuccaagaucaucacgcugaagaagcgcuggcagcucgcgcugagcaagggcgugcacuucgugugcaaccugcuccugcuguucgucaccguguacucccaccuccugcugguggccgccgggcucgaggcccccuuccuguaccuguacgcgcucgucuacuuccugcagagcaucaacuucgugcggaucaucaugcgccuguggcucugcuggaagugccgguccaagaacccccugcuguacgacgccaacuacuuccucugcuggcacaccaacugcuacgacuacugcaucccguacaacagcgugaccuccagcaucgucaucacguccggcgacggcaccaccagccccaucuccgagcacgacuaccagaucgggggcuacaccgagaagugggagagcggggugaaggacugcgugguccugcacuccuacuucacgagcgacuacuaccagcuguacuccacccaguucagcaccgacaccggcguggagcacgugacguucuucaucuacaacaagaucgucgacgagcccgaggagcacgugcagauccacaccaucgacggguccagcggcguggucaaccccgugauggagccgaucuacgacgagcccaccaccacgaccagcgugccccucuga

SEQ ID NO: 18699 - RNA, 828 nt, Artificial Sequence
  SARS-CoV-2__MT811544.1__ORF3a protein CDS gc
auggaccuguucaugcgcaucuucaccaucggcaccgugacgcucaagcagggggagaucaaggacgccacccccagcgacuucguccgggccaccgcgaccacgccgauccaggccucccugcccuucggcuggcugaucguggggguggcccuccuggccgucuuccacagcgccuccaagaucaucacccugaagaagcgcuggcagcucgcgcugagcaagggcgugcacuucgugugcaaccugcuccugcuguucgucaccguguacucccaccuccugcugguggccgccgggcucgaggcccccuuccuguaccuguacgcgcucgucuacuuccugcagagcaucaacuucgugcggaucaucaugcgccuguggcucugcuggaagugccgguccaagaacccccugcuguacgacgccaacuacuuccucugcuggcacaccaacugcuacgacuacugcaucccguacaacagcgugacguccagcaucgucaucaccuccggcgacggcaccaccagccccaucuccgagcacgacuaccagaucgggggcuacacggagaagugggagagcggggugaaggacugcgugguccugcacuccuacuucaccagcgacuacuaccagcuguacuccacccagcucagcaccgacacgggcguggagcacgugaccuucuucaucuacaacaagaucgucgacgagcccgaggagcacgugcagauccacaccaucgacggguccagcggcguggucaaccccgugauggagccgaucuacgacgagcccaccacgaccaccagcgugccccuguga

SEQ ID NO: 18700 - RNA, 828 nt, Artificial Sequence
  SARS-CoV-2__MT811711.1__ORF3a protein CDS gc
auggaccuguucaugcgcaucuucaccaucggcaccgugacgcucaagcagggggagaucaaggacgccacccccagcgacuucguccgggccaccgcgaccaucccgauccaggccucccugcccuucggcuggcugaucguggggguggcccuccuggccgucuuccacagcgccuccaagaucaucacgcugaagaagcgcuggcagcucgcgcugagcaagggcgugcacuucgugugcaaccugcuccugcuguucgucaccguguacucccaccuccugcugguggccgccgggcucgaggcccccuuccuguaccuguacgcgcucgucuacuuccugcagagcaucaacuucgugcggaucaucaugcgccuguggcucugcuggaagugccgguccaagaacccccugcuguacgacgccaacuacuuccucugcuggcacaccaacugcuacgacuacugcaucccguacaacagcgugaccuccagcaucgucaucacguccggcgacggcaccaccagccccaucuccgagcacgacuaccagaucgggggcuacaccgagaagugggagagcggggugaaggacugcgugguccugcacuccuacuucacgagcgacuacuaccagcuguacuccacccagcucagcaccgacaccggcguggagcacgugacguucuucaucuacaacaagaucgucgacgagcccgaggagcacgugcagauccacaccaucgacggguccagcggcguggucaaccccgugauggagccgaucuacgacgagcccaccaccacgaccagccugccccuguga

SEQ ID NO: 18701 - RNA, 828 nt, Artificial Sequence
  SARS-CoV-2__MT811727.1__ORF3a protein CDS gc
auggaccuguucaugcgcaucuucaccaucggcaccgugacgcucaagcagggggagaucaaggacgccacccccagcgacuucguccgggccaccgcgaccaucccgauccaggccucccugcccuucggcuggcugaucguggggguggcccuccuggccgucuuccacagcgccuccaagaucaucacgcugaagaagcgcuggcagcucgcgcugagcaagggcgugcacuucgugugcaaccugcuccugcuguucgucaccguguacucccaccuccugcugguggccgccgggcucgaggcccccuuccuguaccuguacgcgcucgucuacuuccugcagagcaucaacuucgugcggaucaucaugcgccuguggcucugcuggaagugccgguccaagaacccccugcuguacgacgccaacuacuuccucugcuggcacaccaacugcuacgacuacugcgugccguacaacagcgucaccuccagcaucgugaucacguccggcgacggcaccaccagccccaucuccgagcacgacuaccagaucgggggcuacaccgagaagugggagagcggggugaaggacugcgucgugcugcacuccuacuucacgagcgacuacuaccagcuguacuccacccagcucagcaccgacaccggcguggagcacgucacguucuucaucuacaacaagaucguggacgagcccgaggagcacgugcagauccacaccaucgacggguccagcggcgucgugaaccccgugauggagccgaucuacgacgagcccaccaccacgaccagcgucccccuguga

SEQ ID NO: 18702 - RNA, 828 nt, Artificial Sequence
  SARS-CoV-2__MT806773.1__ORF3a protein CDS gc
auggaccuguucaugcgcaucuucaccaucggcaccgugacgcucaagcagggggagaucaaggacgccacccccagcgacuucguccgggccaccgcgaccaucccgauccaggccucccugcccuucggcuggcugaucguggggguggcccuccuggccgucuuccacagcgccuccaagaucaucacgcugaagaagcgcuggcagcucgcgcugagcaagggcgugcacuucgugugcaaccugcuccugcuguucgucaccguguacucccaccuccugcugguggccgccgggcucgaggcccccuuccuguaccuguacgcgcucgucuacuuccugcagagcaucaacuucgugcggaucaucaugcgccuguggcucugccugaagugccgguccaagaacccccugcucuacgacgccaacuacuuccugugcuggcacaccaacugcuacgacuacugcaucccguacaacagcgugaccuccagcaucgucaucacguccggcgacggcaccaccagccccaucuccgagcacgacuaccagaucgggggcuacaccgagaagugggagagcggggugaaggacugcgugguccugcacuccuacuucacgagcgacuacuaccagcucuacuccacccagcugagcaccgacaccggcguggagcacgugacguucuucaucuacaacaagaucgucgacgagcccgaggagcacgugcagauccacaccaucgacggguccagcggcguggucaaccccgugauggagccgaucuacgacgagcccaccaccacgaccagcgugccccuguga

SEQ ID NO: 18703 - RNA, 828 nt, Artificial Sequence
  SARS-CoV-2__MT806884.1__ORF3a protein CDS gc
auggaccuguucaugaccaucuucaccaucggcacggugacccucaagcagggggagaucaaggacgccacccccagcgacuucguccgcgccaccgcgacgaucccgauccaggccucccugcccuucggcuggcugaucguggggguggcccuccuggccgucuuccacagcgccuccaagaucaucacccugaagaagcgguggcagcucgcgcugagcaagggcgugcacuucgugugcaaccugcuccugcuguucgucaccguguacucccaccuccugcugguggccgccgggcucgaggcccccuuccuguaccuguacgcgcucgucuacuuccugcagagcaucaacuucgugcgcaucaucaugcggcugugccucugcuggaagugccgcuccaagaacccccugcuguacgacgccaacuacuuccucugcuggcacaccaacugcuacgacuacugcaucccguacaacagcgugacguccagcaucgucaucaccuccggcgacggcaccaccagccccaucuccgagcacgacuaccagaucgggggcuacacggagaagugggagagcggggugaaggacugcgugguccugcacuccuacuucaccagcgacuacuaccagcuguacuccacccagcucagcaccgacacgggcguggagcacgugaccuucuucaucuacaacaagaucgucgacgagcccgaggagcacgugcagauccacaccaucgacggguccagcggcguggucaaccccgugauggagccgaucuacgacgagcccaccacgaccaccagcgugccccuguga

SEQ ID NO: 18704 - RNA, 828 nt, Artificial Sequence
  SARS-CoV-2__MT800021.1__ORF3a protein CDS gc
auggaccuguucaugcgcaucuucaccaucggcaccgugacgcucaagcagggggagaucaaggacgccacccccagcgacuucguccgggccaccgcgaccaucccgauccaggccucccugcccuucggcuggcugaucguggggguggcccuccuggccgucuuccagagcgccuccaagaucaucacgcugaagaagaucuggcagcucgcgcugagcaagggcgugcacuucgugugcaaccugcuccugcuguucgucaccguguacucccaccuccugcugguggccgccgggcucgaggcccccuuccuguaccuguacgcgcucgucuacuuccugcagagcaucaacuucgugcgcaucaucaugcggcuguggcucugcuggaagugccgcuccaagaacccccugcuguacgacgccaacuacuuccucugcuggcacaccaacugcuacgacuacugcaucccguacaacagcgugaccuccagcaucgucaucacguccggcgacggcaccaccagccccaucuccgagcacgacuaccagaucgggggcuacaccgagaagugggagagcggggugaaggacugcgugguccugcacuccuacuucacgagcgacuacuaccagcuguacuccacccagcucagcaccgacaccggcguggagcacgugacguucuucaucuacaacaagaucgucgacgagcccgaggagcacgugcagauccacaccaucgacggguccagcggcguggucaaccccgugauggagccgaucuacgacgagcccaccaccacgaccagcgugccccuguga

SEQ ID NO: 18705 - RNA, 819 nt, Artificial Sequence
  SARS-CoV-2__MT800029.1__ORF3a protein CDS gc
auggaccuguucaugcgcaucuucaccaucggcaccgugacgcucaagcagaaggacgccacccccagcgacuucguccgggccaccgcgaccaucccgauccaggccucccugcccuucggguggcugaucgugggcguggcccuccuggccgucuuccagagcgccuccaagaucaucacgcugaagaagcgcuggcagcucgcgcugagcaagggggugcacuucgugugcaaccugcuccugcuguucgucaccguguacucccaccuccugcugguggccgccggccucgaggcccccuuccuguaccuguacgcgcucgucuacuuccugcagagcaucaacuucgugcggaucaucaugcgccuguggcucugcuggaagugccgguccaagaacccccugcuguacgacgccaacuacuuccucugcuggcacaccaacugcuacgacuacugcaucccguacaacagcgugaccuccagcaucgucaucacguccggggacggcaccaccagccccaucuccgagcacgacuaccagaucggcggguacaccgagaagugggagagcggcgugaaggacugcgugguccugcacuccuacuucacgagcgacuacuaccagcuguacuccacccagcucagcaccgacaccgggguggagcacgugacguucuucaucuacaacaagaucgucgacgagcccgaggagcacgugcagauccacaccaucgacggcuccagcgggguggucaaccccgugauggagccgaucuacgacgagcccaccaccacgaccagcgugccccuguga

SEQ ID NO: 18706 - RNA, 825 nt, Artificial Sequence
  SARS-CoV-2__MT800036.1__ORF3a protein CDS gc
auggaccuguucaugcgcaucuucaccaucggcaccgugacgcucaagcagggggagaucaaggacgccacccccagcgacuucguccgggccaccgcgaccaucccgauccaggccucccugcccuucggcuggcugaucguggggguggcccuccuggccgucuuccacagcgccuccaagaucaucacgcugaagaagcgcuggcagcucgcgcugagcaagggcgugcacuucgugugcaaccugcuccugcuguucgucaccguguacucccaccuccugcugguggccgccgggcucgaggcccccuuccuguaccuguacgcgcucgucuacuuccugcagagcaucaacuucgugcggaucaucaugcgccuguggcucugcuggaagugccgguccaagaacccccugcuguacgacgccaacuacuuccucugcuggcacaccaacugcuacgacuacugcaucccguacaacagcgugaccuccagcaucgucaucacguccggcgacggcaccaccagccccaucuccgagcacgacuaccagaucgggggcuacaccgagaagugggagagcggggugaaggacugcgugguccugcacuccuacuucacgagcgacuacuaccagcuguacuccacccagcucagcaccgacaccggcguggagcacgugacguucuucaucuacaacaagaucgucgacgagcccgaggagcacgugcagauccacaccaucgacggguccagcggcguggaccccgucauggagccgaucuacgacgagcccaccaccacgaccagcgugccccuguga

SEQ ID NO: 18707 - RNA, 828 nt, Artificial Sequence
  SARS-CoV-2__MT800050.1__ORF3a protein CDS gc
auggaccuguucaugcgcaucuucaccaucggcaccgugacgcucaagcagggggagauccaggacgccacccccagcgacuucguccgggccaccgcgaccaucccgauccaggccucccugcccuucggcuggcugaucguggggguggcccuccuggccgucuuccagagcgccuccaagaucaucacgcugaagaagcgcuggcagcucgcgcugagcaagggcgugcacuucgugugcaaccugcuccugcuguucgucaccguguacucccaccuccugcugguggccgccgggcucgaggcccccuuccuguaccuguacgcgcucgucuacuuccugcagagcaucaacuucgugcggaucaucaugcgccuguggcucugcuggaagugccgguccaagaacccccugcuguacgacgccaacuacuuccucugcuggcacaccaacugcuacgacuacugcaucccguacaacagcgugaccuccagcaucgucaucacguccggcgacggcaccaccagccccaucuccgagcacgacuaccagaucgggggcuacaccgagaagugggagagcggggugaaggacugcgugguccugcacuccuacuucacgagcgacuacuaccagcuguacuccacccagcucagcaccgacaccggcguggagcacgugacguucuucaucuacaacaagaucgucgacgagcccgaggagcacgugcagauccacaccaucgacggguccagcggcguggucaaccccgugauggagccgaucuacgacgagcccaccaccacgaccagcgugccccuguga

SEQ ID NO: 18708 - RNA, 828 nt, Artificial Sequence
  SARS-CoV-2__MT801003.1__ORF3a protein CDS gc
auggaccuguucaugcgcaucuucaccaucggcaccgugacgcucaagcagggggagaucaaggacgccacccccagcgacuucguccgggccaccgcgaccaucccgauccaggccucccugcccuucggcuggcugaucguggggguggcccuccuggccgucuuccacagcgccuccaagaucaucacgcugaagaagcgcuggcagcucgcguucagcaagggcgugcacuucgugugcaaccugcugcuccuguucgucaccguguacucccaccuccugcugguggccgccgggcuggaggcccccuuccucuaccuguacgcgcuggucuacuuccuccagagcaucaacuucgugcggaucaucaugcgccuguggcugugcuggaagugccgguccaagaacccccuccuguacgacgccaacuacuuccugugcuggcacaccaacugcuacgacuacugcaucccguacaacagcgugaccuccagcaucgucaucacguccggcgacggcaccaccagccccaucuccgagcacgacuaccagaucgggggcuacaccgagaagugggagagcggggugaaggacugcgugguccuccacuccuacuucacgagcgacuacuaccagcuguacuccacccagcugagcaccgacaccggcguggagcacgugacguucuucaucuacaacaagaucgucgacgagcccgaggagcacgugcagauccacaccaucgacggguccagcggcguggucaaccccgugauggagccgaucuacgacgagcccaccaccacgaccagcgugccccucuga

SEQ ID NO: 18709 - RNA, 828 nt, Artificial Sequence
  SARS-CoV-2__MT252720.1__ORF3a protein CDS gc
auggaccuguucaugcgcaucuucaccaucggcaccgugacgcucaagcagggggagaucaaggacgccacccccagcgacuucguccgggccaccgcgaccaucccgauccaggccucccugcccuucggcuggcugaucguggggguggcccuccuggccgucuuccagagcgccuccaagaucaucacgcugaagaagcgcuggcagcucgcgcugagcaagggcgugcacuucgugugcaaccugcuccugcuguucgucaccguguacucccaccuccugcugguggccgccgggcucgaggcccccuuccuguaccuguacgcgcucgucuacuuccugcagagcaucaacuucgugcggaucaucaugcgccuguggcucugcuggaagugccgguccaagaacccccugcuguacgacgccaacuacuuccucugcuggcacaccaacugcuacgacuacugcaucccguacaacagcgugaccuccagcaucgucaucacguccggcgacggcaccaccagccccaucuccgagcacgacuaccagaucgggggcuacaccgagaagugggagagcggggugaaggacugcgugguccugcacuccuacuucacgagcgacuacuaccagcuguacuccacccagcucagcaccgacaccggcguggagcacgugacguucuucaucuacaacaagaucgucgacgagcccgaggagcacgugcagauccacaccaucgacugcuccagcgggguggucaaccccgugauggagccgaucuacgacgagcccaccaccacgaccagcgugccccuguga

SEQ ID NO: 18710 - RNA, 828 nt, Artificial Sequence
  SARS-CoV-2__MT252817.1__ORF3a protein CDS gc
auggaccuguucaugcgcaucuucaccaucggcaccgugacgcucaagcagggggagaucaaggacgccacccccagcgacuucguccgggccaccgcgaccaucccgauccaggccucccugcccuucggcuggcugaucguggggguggcccuccuggccgucuuccagagcgccuccaagaucaucacgcugaagaagcgcuggcagcucgcgcugagcaagggcgugcacuucgugugcaaccugcuccugcuguucgucaccguguacucccaccuccugcugguggccgccgggcucgaggcccccuuccuguaccuguacgcgcucgucuacuuccugcagagcaucaacuucgugcggaucaucaugcgccuguggcucugcuggaagugccgguccaagaacccccugcuguacgacgccaacuacuuccucugcuggcacaccaacugcuacgacuacugcaucccguacaacagcgugaccuccagcaucgucaucacguccggcgacggcaccaccagccccaucuccgagcacgacuaccagaucgggggcuacaccgagaagugggagagcggggugaaggacugcgugguccugcacuccuacuucacgagcgacuacuaccagcuguacuccacccagcucagcaccgacaccggcguggagcacgugacguucuucaucuacaacaagaucgucgacgagcccgaggagcacgugcagauccacaccaucgacggguccagccgcguggucaaccccgugauggagccgaucuacgacgagcccaccaccacgaccagcgugccccuguga

SEQ ID NO: 18711 - RNA, 828 nt, Artificial Sequence
  SARS-CoV-2__MT795875.1__ORF3a protein CDS gc
auggaccuguucaugcgcaucuucaccaucggcaccgugacgcucaagcagggggagaucaaggacgccacccccagcgacuucguccgggccaccgcgaccaucccgauccaggccucccugcccuucggcuggcugaucguggggguggcccuccuggccgucuuccagagcgccuccaagaucaucacgcugaagaagcgcuggcagcucgcgcugagcaagggcgugcacuucgugugcaaccugcuccugcuguucgucaccguguacucccaccuccugcugguggccgccgggcucgaggcccccuuccuguaccuguacgcgcucgucuacuuccugcagagcaucaacuucgugcggaucaucaugcgccuguggcucugcuggaagugccgguccaagaacccccugcuguacgacgccaacuacuuccucugcuggcacaccaacugcuacgacuacugcaucccguacaacagcgugaccuccagcaucgucaucacguccugcgacggcaccaccagccccaucuccgagcacgacuaccagaucggcggguacaccgagaagugggagagcggcgugaaggacugcgugguccugcacuccuacuucacgagcgacuacuaccagcuguacuccacccagcucagcaccgacaccgggguggagcacgugacguucuucaucuacaacaagaucgucgacgagcccgaggagcacgugcagauccacaccaucgacggcuccagcgggguggucaaccccgugauggagccgaucuacgacgagcccaccaccacgaccagcgugccccuguga

SEQ ID NO: 18712 - RNA, 828 nt, Artificial Sequence
  SARS-CoV-2__MT795884.1__ORF3a protein CDS gc
auggaccuguucaugcgcaucuucaccaucggcaccgugacgcucaagcagggggagaucaaggacgccacccccagcgacuucguccgggccaccgcgaccaucccgauccaggccucccugcccuucggcuggcugaucguggggguggcccuccacgccgucuuccacagcgccuccaagaucaucacgcugaagaagcgcuggcagcuggcgcucagcaagggcgugcacuucgugugcaaccugcugcuccuguucgucaccguguacucccaccuccugcugguggccgccgggcuggaggcccccuuccucuaccuguacgcgcuggucuacuuccuccagagcaucaacuucgugcggaucaucaugcgccuguggcugugcuggaagugccgguccaagaacccccuccuguacgacgccaacuacuuccugugcuggcacaccaacugcuacgacuacugcaucccguacaacagcgugaccuccagcaucgucaucacguccggcgacggcaccaccagccccaucuccgagcacgacuaccagaucgggggcuacaccgagaagugggagagcggggugaaggacugcgugguccuccacuccuacuucacgagcgacuacuaccagcuguacuccacccagcugagcaccgacaccggcguggagcacgugacguucuucaucuacaacaagaucgucgacgagcccgaggagcacgugcagauccacaccaucgacggguccagcggcguggucaaccccgugauggagccgaucuacgacgagcccaccaccacgaccagcgugccccucuga

SEQ ID NO: 18713 - RNA, 828 nt, Artificial Sequence
  SARS-CoV-2__MT797760.1__ORF3a protein CDS gc
auggaccuguucaugcgcaucuucaccaucggcaccgugacgcucaagcagggggagaucaaggacgccacccccagcgacuucguccgggccaccgcgaccaucccgauccaggccucccugcccuucggcugguucaucguggggguggcccugcucgccgucuuccacagcgccuccaagaucaucacgcugaagaagcgcuggcagcuggcgcucagcaagggcgugcacuucgugugcaaccugcugcuccuguucgucaccguguacucccaccuccugcugguggccgccgggcuggaggcccccuuccucuaccuguacgcgcuggucuacuuccuccagagcaucaacuucgugcggaucaucaugcgccuguggcugugcuggaagugccgguccaagaacccccuccuguacgacgccaacuacuuccugugcuggcacaccaacugcuacgacuacugcaucccguacaacagcgugaccuccagcaucgucaucacguccggcgacggcaccaccagccccaucuccgagcacgacuaccagaucgggggcuacaccgagaagugggagagcggggugaaggacugcgugguccuccacuccuacuucacgagcgacuacuaccagcuguacuccacccagcugagcaccgacaccggcguggagcacgugacguucuucaucuacaacaagaucgucgacgagcccgaggagcacgugcagauccacaccaucgacggguccagcggcguggucaaccccgugauggagccgaucuacgacgagcccaccaccacgaccagcgugccccucuga

SEQ ID NO: 18714 - RNA, 828 nt, Artificial Sequence
  SARS-CoV-2__MT791915.1__ORF3a protein CDS gc
auggaccuguucaugcgcaucuucaccaucggcaccgugacgcucaagcagggggagaucaaggacagcacccccuccgacuucguccgggccaccgccaccaucccgauccaggcgagccugcccuucggcuggcugaucguggggguggcccuccuggccgucuuccaguccgccagcaagaucaucacgcugaagaagcgcuggcagcucgcccuguccaagggcgugcacuucgugugcaaccugcuccugcuguucgucaccguguacagccaccuccugcugguggcggccgggcucgaggcccccuuccuguaccuguacgcccucgucuacuuccugcaguccaucaacuucgugcggaucaucaugcgccuguggcucugcuggaagugccggagcaagaacccccugcuguacgacgcgaacuacuuccucugcuggcacaccaacugcuacgacuacugcaucccguacaacuccgugaccagcuccaucgucaucacgagcggcgacggcaccaccucccccaucagcgagcacgacuaccagaucgggggcuacaccgagaagugggaguccggggugaaggacugcgugguccugcacagcuacuucacguccgacuacuaccagcuguacagcacccagcucuccaccgacaccggcguggagcacgugacguucuucaucuacaacaagaucgucgacgagcccgaggagcacgugcagauccacaccaucgacgugagcagcggggucgugaaccccgugauggagccgaucuacgacgagcccaccaccacgaccuccgucccccuguga

SEQ ID NO: 18715 - RNA, 828 nt, Artificial Sequence
  SARS-CoV-2__MT791954.1__ORF3a protein CDS gc
auggaccuguucaugcgcaucuucaccaucggcaccgugacgcucaagcagggggagaucaaggacgccacccccagcgacuucguccgggccaccgcgaccaucccgauccaggccucccugcccuucggcuggcugaucguggggguggcccuccuggccgucuucuacagcgccuccaagaucaucacgcugaagaagcgcuggcagcucgcgcugagcaagggcgugcacuucgugugcaaccugcuccugcuguucgucaccguguacucccaccuccugcugguggccgccgggcucgaggcccccuuccuguaccuguacgcgcucgucuacuuccugcagagcaucaacuucgugcggaucaucaugcgccuguggcucugcuggaagugccgguccaagaacccccugcuguacgacgccaacuacuuccucugcuggcacaccaacugcuacgacuacugcaucccguacaacagcgugaccuccagcaucgucaucacguccggcgacggcaccaccagccccaucuccgagcacgacuaccagaucgggggcuacaccgagaagugggagagcggggugaaggacugcgugguccugcacuccuacuucacgagcgacuacuaccagcuguacuccacccagcucagcaccgacaccggcguggagcacgugacguucuucaucuacaacaagaucgucgacgagcccgaggagcacgugcagauccacaccaucgacggguccagcggcguggucaaccccgugauggagccgaucuacgacgagcccaccaccacgaccagcgugccccuguga

SEQ ID NO: 18716 - RNA, 828 nt, Artificial Sequence
  SARS-CoV-2__MT786802.1__ORF3a protein CDS gc
auggaccuguucaugcgcaucuucaccaucggcaccgugacgcucaagcagggggagaucaaggacgccacccccagcgacuucguccgggccaccgcgaccaucccgauccaggccucccugcccuucggcuggcugaucguggggguggcccuccuggccgucuuccacagcgccuccaagaucaucacgcugaagaagcgcuggcagcucgcgcugagcaagggcgugcacuucgugugcaaccugcuccugcuguucgucaccguguacucccaccuccugcugguggccgccgggcucgaggcccccuuccuguaccuguacgcgcucgucuacuuccugcagagcaucaacuucgugcggaucaucaugcgccuguggcucugcuggaagugccgguccaagaacccccugcuguacgacgccaacuacuuccucugcuggcacaccaacugcuacuacuacugcaucccguacaacagcgugaccuccagcaucgucaucacguccggcgacggcaccaccagccccaucuccgagcacgacuaccagaucgggggcuacaccgagaagugggagagcggggugaaggacugcgugguccugcacuccuacuucacgagcgacuacuaccagcuguacuccacccagcucagcaccgacaccggcguggagcacgugacguucuucaucuacaacaagaucgucgacgagcccgaggagcacgugcagauccacaccaucgacggguccagcggcguggucaaccccgugauggagccgaucuacgacgagcccaccaccacgaccagcgugccccuguga

SEQ ID NO: 18717 - RNA, 828 nt, Artificial Sequence
  SARS-CoV-2__MT786838.1__ORF3a protein CDS gc
auggaccuguucaugcgcaccuucaccaucggcacggugacccucaagcagggggagaucaaggacgccacccccagcgacuucguccgggccaccgcgacgaucccgauccaggccucccugcccuucggcuggcugaucguggggguggcccuccuggccgucuuccacagcgccuccaagaucaucacccugaagaagcgcuggcagcucgcgcugagcaagggcgugcacuucgugugcaaccugcuccugcuguucgucaccguguacucccaccuccugcugguggccgccgggcucgaggcccccuuccuguaccuguacgcgcucgucuacuuccugcagagcaucaacuucgugcggaucaucaugcgccuguggcucugcuggaagugccgguccaagaacccccugcuguacgacgccaacuacuuccucugcuggcacaccaacugcuacgacuacugcaucccguacaacagcgugacguccagcaucgucaucaccuccggcgacggcaccaccagccccaucuccgagcacgacuaccagaucgggggcuacacggagaagugggagagcggggugaaggacugcgugguccugcacuccuacuucaccagcgacuacuaccagcuguacuccacccagcucagcaccgacacgggcguggagcacgugaccuucuucaucuacaacaagaucgucgacgagcccgaggagcacgugcagauccacaccaucgacggguccagcggcguggucaaccccgugauggagccgaucuacgacgagcccaccacgaccaccagcgugccccuguga

SEQ ID NO: 18718 - RNA, 828 nt, Artificial Sequence
  SARS-CoV-2__MT786846.1__ORF3a protein CDS gc
auggaccuguucaugcgcaucuucaccaucggcaccgugacgcucaagcagggggagaucaaggacgccacccccagcgacuucguccgggccaccgcgaccaucccgauccaggccucccugcccuucggcuggcugaucguggggguggcccuccuggccgucuuccagagcgccuccaagaucaucacgcugaagaagcgcuggcagcucgcgcugagcaagggcgugcacuucgugugcaaccugcuccugcuguucgucaccguguacucccaccuccugcugguggccgccgggcucgaggcccccuuccuguaccuguacgcgcucgucuacuuccugcagagcaucaacuucgugcggaucaucaugcgccuguggcucugcuggaagugccgguccaagaacccccugcuguacgacgccuacuacuuccucugcuggcacaccaacugcuacgacuacugcaucccguacaacagcgugaccuccagcaucgucaucacguccggcgacggcaccaccagccccaucuccgagcacgacuaccagaucgggggcuacaccgagaagugggagagcggggugaaggacugcgugguccugcacuccuacuucacgagcgacuacuaccagcuguacuccacccagcucagcaccgacaccggcguggagcacgugacguucuucaucuacaacaagaucgucgacgagcccgaggagcacgugcagauccacaccaucgacggguccagcggcguggucaaccccgugauggagccgaucuacgacgagcccaccaccacgaccagcgugccccuguga

SEQ ID NO: 18719 - RNA, 828 nt, Artificial Sequence
  SARS-CoV-2__MT789712.1__ORF3a protein CDS gc
auggaccuguucaugcgcaucuucaccaucggcaccgugacgcucaagcagggggagaucaaggacgccacccccagcgacuucguccgggccaccgcgaccaucccgauccaggccucccugcccuucggcuggcugaucguggggguggcccuccuggccgucuuccagagcgccuccaagaucaucacgcugaagaagcgcuggcagcucgcgcugagcaagggcgugcacuucgugugcaaccugcuccugcuguucgucaccguguacucccaccuccuguucguggccgccgggcuggaggcccccuuccucuaccuguacgcgcuggucuacuuccuccagagcaucaacuucgugcggaucaucaugcgccuguggcugugcuggaagugccgguccaagaacccccuccuguacgacgccaacuacuuccugugcuggcacaccaacugcuacgacuacugcaucccguacaacagcgugaccuccagcaucgucaucacguccggcgacggcaccaccagccccaucuccgagcacgacuaccagaucgggggcuacaccgagaagugggagagcggggugaaggacugcgugguccuccacuccuacuucacgagcgacuacuaccagcuguacuccacccagcugagcaccgacaccggcguggagcacgugacguucuucaucuacaacaagaucgucgacgagcccgaggagcacgugcagauccacaccaucgacggguccagcggcguggucaaccccgugauggagccgaucuacgacgagcccaccaccacgaccagcgugccccucuga

SEQ ID NO: 18720 - RNA, 828 nt, Artificial Sequence
  SARS-CoV-2__MT782364.1__ORF3a protein CDS gc
auggaccuguucaugcgcaucuucaccaucggcaccgugacgcucaagcagugcgagaucaaggacgccacccccagcgacuucguccgggccaccgcgaccaucccgauccaggccucccugcccuucggguggcugaucgugggcguggcccuccuggccgucuuccacagcgccuccaagaucaucacgcugaagaagcgcuggcagcucgcgcugagcaagggggugcacuucgugugcaaccugcuccugcuguucgucaccguguacucccaccuccugcugguggccgccggccucgaggcccccuuccuguaccuguacgcgcucgucuacuuccugcagagcaucaacuucgugcggaucaucaugcgccuguggcucugcuggaagugccgguccaagaacccccugcuguacgacgccaacuacuuccucugcuggcacaccaacugcuacgacuacugcaucccguacaacagcgugaccuccagcaucgucaucacguccggggacggcaccaccagccccaucuccgagcacgacuaccagaucggcggguacaccgagaagugggagagcggcgugaaggacugcgugguccugcacuccuacuucacgagcgacuacuaccagcuguacuccacccagcucagcaccgacaccgggguggagcacgugacguucuucaucuacaacaagaucgucgacgagcccgaggagcacgugcagauccacaccaucgacggcuccagcgggguggucaaccccgugauggagccgaucuacgacgagcccaccaccacgaccagcgugccccuguga

SEQ ID NO: 18721 - RNA, 828 nt, Artificial Sequence
  SARS-CoV-2__MT776411.1__ORF3a protein CDS gc
auggaccuguucaugcgcaucuucaccaucggcaccgugacgcucaagcagggggagaucaaggacgccacccccagcgacuucguccgggccaccgcgaccaucccgauccaggccucccugcccuucggcuggcugaucguggggguggcccuccuggccgucuuccagagcgccuccaagaucaucacgcugaagaagcgcuggcagcucgcgcugagcaagggcgugcacuucgugugcaaccugcuccugcuguucgucaccguguacucccaccuccugcugguggccgccgggcucgaggcccccuuccuguaccuguacgcgcucgucuacuuccugcagagcaucaacuucgugcggaucaucaugcgccuguggcucugcuggaagugccgguccaagaacccccugcuguacgacgccaacuacuuccucugcuggcacaccaacugcuacgacuacugcaucccguacaacagcgugaccuccagcaucgucaucacguccggcgacggcaccaccagccccaucuccgagcacgacuaccagaucgggggcuacaccgagaagugggagagcggggugaaggacugcgugguccugcacuccuacuucacgagcgacuacuaccagcuguacuccacccagagcuccaccgacaccggcguggagcacgugacguucuucaucuacaacaagaucgucgacgagcccgaggagcacgugcagauccacaccaucgacgggagcagcggcguggucaaccccgugauggagccgaucuacgacgagcccaccaccacgaccuccgugccccucuga

SEQ ID NO: 18722 - RNA, 828 nt, Artificial Sequence
  SARS-CoV-2__MT776420.1__ORF3a protein CDS gc
auggaccuguucaugcgcaucuucaccaucggcaccgugacgcucaagcagggggagaucaaggacgccacccccagcgacuucguccgggccaccgagaccaucccgauccaggcgucccugcccuucggcuggcugaucguggggguggcccuccuggccgucuuccacagcgccuccaagaucaucacgcugaagaagcgcuggcagcucgcccugagcaagggcgugcacuucgugugcaaccugcuccugcuguucgucaccguguacucccaccuccugcugguggcggccgggcucgaggcccccuuccuguaccuguacgcccucgucuacuuccugcagagcaucaacuucgugcggaucaucaugcgccuguggcucugcuggaagugccgguccaagaacccccugcuguacgacgcgaacuacuuccucugcuggcacaccaacugcuacgacuacugcaucccguacaacagcgugaccuccagcaucgucaucacguccggcgacggcaccaccagccccaucuccgagcacgacuaccagaucgggggcuacaccgagaagugggagagcggggugaaggacugcgugguccugcacuccuacuucacgagcgacuacuaccagcuguacuccacccagcucagcaccgacaccggcguggagcacgugacguucuucaucuacaacaagaucgucgacgagcccgaggagcacgugcagauccacaccaucgacggguccagcggcguggucaaccccgugauggagccgaucuacgacgagcccaccaccacgaccagcgugccccuguga

SEQ ID NO: 18723 - RNA, 828 nt, Artificial Sequence
  SARS-CoV-2__MT772428.1__ORF3a protein CDS gc
auggaccuguucaugcgcaucuucaccaucggcaccgugacgcucaagcagggggagaucaaggacgccacccccagcgacuucguccgggccaccgcgaccaucccgauccaggccucccugcccuucggcuggcugaucguggggguggcccuccuggccgucuuccacagcgccuccaagaucaucacgcugaagaagcgcuggcagcucgcgcugagcaagggcgugcacuucgugugcaaccugcuccugcuguuccucaccgucuacucccaccuccugcugguggccgccgggcuggaggcccccuuccuguaccucuacgcgcugguguacuuccugcagagcaucaacuucguccggaucaucaugcgccucuggcugugcuggaagugccgguccaagaacccccugcucuacgacgccaacuacuuccugugcuggcacaccaacugcuacgacuacugcaucccguacaacagcgugaccuccagcaucgugaucacguccggcgacggcaccaccagccccaucuccgagcacgacuaccagaucgggggcuacaccgagaagugggagagcggggucaaggacugcguggugcugcacuccuacuucacgagcgacuacuaccagcucuacuccacccagcugagcaccgacaccggcgucgagcacgugacguucuucaucuacaacaagaucguggacgagcccgaggagcacguccagauccacaccaucgacggguccagcggcguggugaaccccgucauggagccgaucuacgacgagcccaccaccacgaccagcgugccccuguga

SEQ ID NO: 18724 - RNA, 828 nt, Artificial Sequence
  SARS-CoV-2__MT772496.1__ORF3a protein CDS gc
auggaccuguucaugcgcaucuucaccaucggcaccgugacgcucaagcagggggagaucaaggacgccacccccagcgacuucguccgggccaccgcgaccaucccgauccaggccucccugcccuucggcuggcugaucguggggguggcccuccuggccgucuuccacagcgccuccaagaucaucacgcugaagaagcgcuggcagcucgcgcugagcaagggcgugcacuucgugugcaaccugcuccugcuguucgucaccguguacucccaccuccugcugguggccgccgggcucgaggcccccuuccuguaccuguacgcgcucgucuacuuccugcagagcaucaacuucgugcggaucaucaugcgccuguggcucugcuggaagugccgguccaagaacccccugcuguacgacgccaacuacuuccucugcuggcacaccaacugcuacgacuacugcaucccguacaacagcgugaccuccagcaucgucaucacguccggcgacggcaccaccagccccaucuccgagcacgacuaccagaucgggggcuacaccgagaagugggagagcggggugaaggacugcgugguccugcacuccuacuucacgagcgacuacuaccagcuguacuccacccagcucagcaccgacaccggcguggagcacgugacguucuucaucuacaacaagaucgucgacgagcuggaggagcacgugcagauccacaccaucgacggguccagcggcguggucaaccccgugauggagcccaucuacgacgagccgaccaccacgaccagcgugccccuguga

SEQ ID NO: 18725 - RNA, 828 nt, Artificial Sequence
  SARS-CoV-2__MT772558.1__ORF3a protein CDS gc
auggaccuguucaugcgcaucuucaccaucggcaccgugacgcucaagcagggggagaucaaggacgccacccccagcgacuucguccgggccaccgcgaccaucccgauccaggccucccugcccuucggcuggcugaucguggggguggcccuccuggccgucuuccagagcgccuccaagaucaucacgcugaagaagcgcuggcagcucgcgcugagcaagggcgugcacuucgugugcaaccugcuccugcuguucgucaccguguacucccaccuccugcugguggccgccgggcucgaggcccccuuccuguaccuguacgcgcucgucuacuuccugcagagcaucaacuucgugcggaucaucaugcgccuguggcucugcuggaagugccgguccaagaacccccugcuguacgacgccaacuacuuccucugcuggcacaccaacugcuacgacuacugcaccccguacaacagcgugacguccagcaucgucaucaccuccggcgacggcaccaccagccccaucuccgagcacgacuaccagaucgggggcuacacggagaagugggagagcggggugaaggacugcgugguccugcacuccuacuucaccagcgacuacuaccagcuguacuccacccagcucagcaccgacacgggcguggagcacgugaccuucuucaucuacaacaagaucgucgacgagcccgaggagcacgugcagauccacaccaucgacggguccagcggcguggucaaccccgugauggagccgaucuacgacgagcccaccacgaccaccagcgugccccuguga

SEQ ID NO: 18726 - RNA, 828 nt, Artificial Sequence
  SARS-CoV-2__MT758203.1__ORF3a protein CDS gc
auggaccuguucaugcgcaucuucaccaucggcaccgugacgcucaagcagggggagaucaaggacgccacccccagcgacuucguccgggccaccgcgaccaucccgauccaggccucccugcgcuucggcuggcugaucguggggguggcccuccuggccgucuuccacagcgccuccaagaucaucacgcugaagaagcgguggcagcucgcgcugagcaagggcgugcacuucgugugcaaccugcuccugcuguucgucaccguguacucccaccuccugcugguggccgccgggcucgaggcccccuuccuguaccuguacgcgcucgucuacuuccugcagagcaucaacuucgugcgcaucaucaugcggcuguggcucugcuggaagugccgcuccaagaacccccugcuguacgacgccaacuacuuccucugcuggcacaccaacugcuacgacuacugcauccccuacaacagcgugaccuccagcaucgucaucacguccggcgacggcaccaccagcccgaucuccgagcacgacuaccagaucgggggcuacaccgagaagugggagagcggggugaaggacugcgugguccugcacuccuacuucacgagcgacuacuaccagcuguacuccacccagcucagcaccgacaccggcguggagcacgugacguucuucaucuacaacaagaucgucgacgagcccgaggagcacgugcagauccacaccaucgacggguccagcggcguggucaaccccgugauggagcccaucuacgacgagccgaccaccacgaccagcgugccccuguga

SEQ ID NO: 18727 - RNA, 828 nt, Artificial Sequence
  SARS-CoV-2__MT759820.1__ORF3a protein CDS gc
auggaccuguucaugcgcaucuucaccaucggcaccgugacgcucaagcagggggagaucaaggacagcacccccuccgacuucguccgggccaccgccaccaucccgauccaggcgagccugcccuucggcuggcugaucguggggguggcccuccuggccgucuuccaguccgccagcaagaucaucacgcugaagaagcgcuggcagcucgcccuguccaagggcgugcacuucgugugcaaccugcuccugcuguucgucaccguguacagccaccuccugcugguggcggccgggcucgaggcccccuuccuguaccuguacgcccucgucuacuuccugcaguccaucaacuucgugcggaucaucaugcgccuguggcucugcuggaagugccggagcaagaacccccugcuguacgacgcgaacuacuuccucugcuggcacaccaacugcuacgacuacugcaucccguacaacuccgugaccagcuccaucgucaucacgagcggcgacggcaccaccucccccaucagcgagcacgacuaccagaucgggggcuacaccgagaagugggaguccggggugaaggacugcgugguccugcacagcuacuucacguccgacuacuaccagcuguacagcacccagcucuccaccgacaccggcguggagcacgugacguucuucaucuacaacaagaucgucgacgagcccgaggagcacgugcagauccacaccaucgacgggagcagcggcguggucaaccccgugauggagccgaucuacgacgagcccaccaccacgaccuccgugccccuguga

SEQ ID NO: 18728 - RNA, 828 nt, Artificial Sequence
  SARS-CoV-2__MT762396.1__ORF3a protein CDS gc
auggaccuguucaugcgcaucuucaccaucggcaccgugacgcucaagcagggggagaucaaggacgccacccccagcgacuucguccgggccaccgcgaccaucccgaucgaggccucccugcccuucggcuggcugaucguggggguggcccuccuggccgucuuccagagcgccuccaagaucaucacgcugaagaagcgcuggcagcucgcgcugagcaagggcgugcacuucgugugcaaccugcuccugcuguucgucaccguguacucccaccuccugcugguggccgccgggcucgaggcccccuuccuguaccuguacgcgcucgucuacuuccugcagagcaucaacuucgugcggaucaucaugcgccuguggcucugcuggaagugccgguccaagaacccccugcuguacgacgccaacuacuuccucugcuggcacaccaacugcuacgacuacugcaucccguacaacagcgugaccuccagcaucgucaucacguccggcgacggcaccaccagccccaucuccgagcacgacuaccagaucgggggcuacaccgagaagugggagagcggggugaaggacugcgugguccugcacuccuacuucacgagcgacuacuaccagcuguacuccacccagcucagcaccgacaccggcguggagcacgugacguucuucaucuacaacaagaucgucgacgagcccgaggagcacgugcagauccacaccaucgacggguccagcggcguggucaaccccgugauggagccgaucuacgacgagcccaccaccacgaccagcgugccccuguga

SEQ ID NO: 18729 - RNA, 828 nt, Artificial Sequence
  SARS-CoV-2__MT762397.1__ORF3a protein CDS gc
auggaccuguucaugcgcaucuucaccaucggcaccgugacgcucaagcagggggagaucaaggacgccacccccagcgacuucguccgggccaccgcgaccaucccgauccaggccucccugcccuucggccugcucaucguggggguggcccugcuggccgucuuccagagcgccuccaagaucaucauccucaagaagcgcuggcagcuggcgcugagcaagggcgugcacuucgugugcaaccuccugcugcuguucgucacgguguacucccaccuccugcucguggccgccgggcuggaggcccccuuccuguaccucuacgcgcuggucuacuuccugcagagcaucaacuucgugcggaucaucaugcgccucuggcugugcuggaagugccgguccaagaacccccugcucuacgacgccaacuacuuccugugcuggcacaccaacugcuacgacuacugcaucccguacaacagcgugaccuccagcaucgucaucaccuccggcgacggcacgaccagccccaucuccgagcacgacuaccagaucgggggcuacaccgagaagugggagagcggggugaaggacugcgugguccugcacuccuacuucaccagcgacuacuaccagcucuacuccacgcagcugagcaccgacaccggcguggagcacgugaccuucuucaucuacaacaagaucgucgacgagcccgaggagcacgugcagauccacacgaucgacggguccagcggcguggucaaccccgugauggagccgaucuacgacgagcccaccaccaccacgagcgugccccuguga

SEQ ID NO: 18730 - RNA, 828 nt, Artificial Sequence
  SARS-CoV-2__MT762398.1__ORF3a protein CDS gc
auggaccuguucaugcgcaucuucaccaucggcaccgugacgcucaagcagggggagaucaaggacgccacccccagcgacuucguccgggccaccgcgaccaucccgauccaggccucccugcccuucggcuggcugaucguggggguggcccuccuggccgucuuccacagcgccuccaagaucaucacgcugaagaagcgcuggcagcucgcgcugagcaagggcgugcacuucgugugcaaccugcuccugcuguucgucaccguguacucccaccuccugcugguggccgccgggcucgagagccccuuccuguaccuguacgcccucgucuacuuccugcaguccaucaacuucgugcggaucaucaugcgccuguggcucugcuggaagugccggagcaagaacccccugcuguacgacgcgaacuacuuccucugcuggcacaccaacugcuacgacuacugcaucccguacaacuccgugaccagcuccaucgucaucacgagcggcgacggcaccaccucccccaucagcgagcacgacuaccagaucgggggcuacaccgagaagugggaguccggggugaaggacugcgugguccugcacagcuacuucacguccgacuacuaccagcuguacagcacccagcucuccaccgacaccggcguggagcacgugacguucuucaucuacaacaagaucgucgacgagcccgaggagcacgugcagauccacaccaucgacgggagcagcggcguggucaaccccgugauggagccgaucuacgacgagcccaccaccacgaccuccgugccccuguga

SEQ ID NO: 18731 - RNA, 828 nt, Artificial Sequence
  SARS-CoV-2__MT755838.1__ORF3a protein CDS gc
auggaccuguucaugcgcaucuucaccaucggcaccgugacgcucaagcagggggagaucaaggacgccacccccagcgacuucguccgggccaccgcgaccaucccgauccaggccucccugcccuucggcuggcugaucguggggguggcccuccuggccgucuuccagagcgccuccaagaucaucacgcugaagaagcgcuggcagcucgcgcugagcaagggcgugcacuucgugugcaaccugcuccugcuguucgucaccguguacucccaccuccugcugguggccgccgggcucgaggcccccuuccuguaccuguacgcgcucgucuacuuccugcagagcaucaacuucgugcggaucaucaugcgccuguggcucugcuggaagugccgguccaagaacccccugcuguacgacgccaacuacuuccucugcuggcacaccaacugcuacgacuacugcaucccguacaacagcgugaccuccagcaucgucaucacguccggcgacggcaccaccagccccaucuccgagcacgacuaccagaucgggugcuacaccgagaagugggagagcggcgugaaggacugcgugguccugcacuccuacuucacgagcgacuacuaccagcuguacuccacccagcucagcaccgacaccgggguggagcacgugacguucuucaucuacaacaagaucgucgacgagcccgaggagcacgugcagauccacaccaucgacggcuccagcgggguggucaaccccgugauggagccgaucuacgacgagcccaccaccacgaccagcgugccccuguga

SEQ ID NO: 18732 - RNA, 825 nt, Artificial Sequence
  SARS-CoV-2__MT755858.1__ORF3a protein CDS gc
auggaccuguucaugcgcaucuucaccaucggcaccgugacgcucaagcagggggagaucaaggacgccacccccagcgacuucguccgggccaccgcgaccaucccgauccaggccucccugcccuucggcuggcugaucguggggguggcccuccuggccgucuuccagagcgccuccaagaucaucacgcugaagaagcgcuggcagcucgcgcugagcaagggcgugcacuucgugugcaaccugcuccugcuguucgucaccguguacucccaccuccugcugguggccgccgggcucgaggcccccuuccuguaccuguacgcgcucgucuacuuccugcagagcaucaacuucgugcggaucaucaugcgccuguggcucugcuggaagugccgguccaagaacccccugcuguacgacgccaacuacuuccucugcuggcacaccaacugcuacgacuacugcaucccguacaacagcgugaccuccagcaucgucaucacguccggcgacggcaccaccagccccaucuccgagcacgacuaccagaucgggggcuacaccgagaagugggagagcggggugaaggacugcgugguccugcacuccuacuucacgagcgacuacuaccagcuguacuccacccagcucagcaccgacaccggcguggagcacgugacguucuucaucuacaacaagaucgucgacgagcccgaggagcacgugcagauccacaccaucgacggguccagcggcgugaaccccgucauggagccgaucuacgacgagcccaccaccacgaccagcgugccccuguga

SEQ ID NO: 18733 - RNA, 828 nt, Artificial Sequence
  SARS-CoV-2__MT755886.1__ORF3a protein CDS gc
auggaccuguucaugcgcaucuucaccaucggcaccgugacgcucaagcagggggagaucaaggacgccacccccagcgacuucguccgggccaccgcgaccaucccgauccaggccucccugcccuucggcuggcugaucgugggggugagccuccuggccgucuuccacuccgccagcaagaucaucacgcugaagaagcgcuggcagcucgcccuguccaagggcgugcacuucgugugcaaccugcuccugcuguucgucaccguguacagccaccuccugcugguggcggccgggcucgaggcccccuuccuguaccuguacgcccucgucuacuuccugcaguccaucaacuucgugcggaucaucaugcgccuguggcucugcuggaagugccggagcaagaacccccugcuguacgacgcgaacuacuuccucugcuggcacaccaacugcuacgacuacugcaucccguacaacuccgugaccagcuccaucgucaucacgagcggcgacggcaccaccucccccaucagcgagcacgacuaccagaucgggggcuacaccgagaagugggaguccggggugaaggacugcgugguccugcacagcuacuucacguccgacuacuaccagcuguacagcacccagcucuccaccgacaccggcguggagcacgugacguucuucaucuacaacaagaucgucgacgagcccgaggagcacgugcagauccacaccaucgacgggagcagcggcguggucaaccccgugauggagccgaucuacgacgagcccaccaccacgaccuccgugccccuguga

SEQ ID NO: 18734 - RNA, 828 nt, Artificial Sequence
  SARS-CoV-2__MT755897.1__ORF3a protein CDS gc
auggaccuguucaugcgcaucuucaccaucggcaccgugacgcucaagcagggggagaucaaggacgccacccccagcgacuucguccgggccaccgcgaccaucccgauccaggccucccugcccuucggcuggcugaucguggggguggcccuccuggccgucuuccacagcgccuccaagaucaucacgcugaagaagcgcuggcagcucgcgcugagcaagggcgugcacuucgugugcaaccugcuccugcuguucgucaccguguacucccaccuccugcugguggccagcgggcucgaggcccccuuccuguaccuguacgcccucgucuacuuccugcaguccaucaacuucgugcggaucaucaugcgccuguggcucugcuggaagugccggagcaagaacccccugcuguacgacgcgaacuacuuccucugcuggcacaccaacugcuacgacuacugcaucccguacaacuccgugaccagcuccaucgucaucacgagcggcgacggcaccaccucccccaucagcgagcacgacuaccagaucgggggcuacaccgagaagugggaguccggggugaaggacugcgugguccugcacagcuacuucacguccgacuacuaccagcuguacagcacccagcucuccaccgacaccggcguggagcacgugacguucuucaucuacaacaagaucgucgacgagcccgaggagcacgugcagauccacaccaucgacgggagcagcggcguggucaaccccgugauggagccgaucuacgacgagcccaccaccacgaccuccgugccccuguga

SEQ ID NO: 18735 - RNA, 828 nt, Artificial Sequence
  SARS-CoV-2__MT755899.1__ORF3a protein CDS gc
auggaccuguucaugcgcaucuucaccaucggcaccgugacgcucaagcagggggagaucaaggacgccacccccagcgacuucguccgggccaccgcgaccaucccgauccaggccucccugcccuucggcuggcugaucguggggguggcccuccuggccgucuuccacagcgccuccaagaucaucacgcugaagaagcgcuggcagcucgcgcugagcaagggcgugcacuucgugugcaaccugcuccugcuguucgucaccguguacucccaccuccugcugguggccgccgggcucgaggcccccuuccuguaccuguacgcgcucgucuacuuccugcagagcaucaacuucgugcggaucaucaugcgccuguggcucugcuggaagugccgguccaagaacccccugcuguacgacgccaacuacuuccucugcuggcacaccaacugcuacgacuacugcaucccguacaacagcgugaccuccagcaucgucaucacguccggcgacggcaccaccagccccaucuccgagcacgacuaccagaucgggggcuacaccgagaagugggagagcggggugaaggacugcgugguccugcacuccuacuucacgagcgacuacuaccagcuguaccccacccagcucuccaccgacaccggcguggagcacgugacguucuucaucuacaacaagaucgucgacgagcccgaggagcacgugcagauccacaccaucgacgggagcuccggcguggucaacccggugauggagcccaucuacgacgagcccaccaccacgaccagcgugccccuguga

SEQ ID NO: 18736 - RNA, 828 nt, Artificial Sequence
  SARS-CoV-2__MT755901.1__ORF3a protein CDS gc
auggaccuguucaugcgcaucuucaccaucggcaccgugacgcucaagcagggggagaucaaggacgccacccccagcgacuucguccgggccaccgcgaccaucccgauccaggccucccugcccuucggcuggcugaucguggggguggcccuccuggccgucuuccagagcgccuccaagaucaucacgcugaagaagcgcuggcagcucgcgcugagcaagggcgugcacuucgugugcaaccugcuccugcuguucgucaccguguacucccaccuccugcugguggccgccgggcucgaggcccccuuccuguaccuguacgcgcucgucuacuuccugcagagcaucaacuucgugcggaucaucaugcgccuguggcucugcuggaagugccgguccaagaacccccugcuguacgacgccaacuacuuccucugcuggcacaccaacugcuacgacuacugcaucccguacaacagcgugaccuccagcaucgucaucacguccggcgacggcaccaccagccccaucuccgagcacgacuaccagaucgggggcuacaccgagaaguggcagagcggggugaaggacugcgugguccugcacuccuacuucacgagcgacuacuaccagcuguacuccacccagcucagcaccgacaccggcguggagcacgugacguucuucaucuacaacaagaucgucgacgagcccgaggagcacgugcagauccacaccaucgacggguccagcggcguggucaaccccgugauggagccgaucuacgacgagcccaccaccacgaccagcgugccccuguga

SEQ ID NO: 18737 - RNA, 828 nt, Artificial Sequence
  SARS-CoV-2__MT757016.1__ORF3a protein CDS gc
auggaccuguucaugcgcaucuucaccaucggcaccgugacgcucaagcagggggagaucaaggacgccacccccagccacuucguccgggccaccgcgaccaucccgauccaggccucccugcccuucggcuggcugaucguggggguggcccuccuggccgucuuccacagcgccuccaagaucaucacgcugaagaagcgcuggcagcucgcgcugagcaagggcgugcacuucgugugcaaccugcuccugcuguucgucaccguguacucccaccuccugcugguggccgccgggcucgaggcccccuuccuguaccuguacgcgcucgucuacuuccugcagagcaucaacuucgugcggaucaucaugcgccuguggcucugcuggaagugccgguccaagaacccccugcuguacgacgccaacuacuuccucugcuggcacaccaacugcuacgacuacugcaucccguacaacagcgugaccuccagcaucgucaucacguccggcgacggcaccaccagccccaucuccgagcacgacuaccagaucgggggcuacaccgagaagugggagagcggggugaaggacugcgugguccugcacuccuacuucacgagcgacuacuaccagcuguacuccacccagcucagcaccgacaccggcuucgagcacgugacguucuucaucuacaacaagaucguggacgagcccgaggagcacguccagauccacaccaucgacggguccagcggcguggugaaccccgucauggagccgaucuacgacgagcccaccaccacgaccagcgugccccuguga

SEQ ID NO: 18738 - RNA, 828 nt, Artificial Sequence
  SARS-CoV-2__MT757040.1__ORF3a protein CDS gc
auggaccuguucaugcgcaucuucaccaucggcaccgugacgcucaagcagggggagaucaaggacgccacccccagcgacuucguccgggccaccgcgaccaucccgauccaggccucccugcccuucggcuggcugaucguggggguggcccuccuggccgucuuccacagcgccuccaagaucaucacgcugaagaagcgcuggcagcucgcgcugagcaagggcgugcacuucgugugcaaccugcuccugcuguucgucaccguguacucccaccuccugcugguggccgccgggcucgaggcccccuuccuguaccuguacgcgcucgucuacuuccugcagagcaucaacuucgugcggaucaucaugcgccuguggcucugcuggaagugccgguccaagaacccccugcuguacgacgccaacuacuuccucugcuggcacaccaacugcuacgacuacugcaucccguacaacagcgugaccuccagcaucgucaucacguccggcgacggcaccaccagccccaucuccgagcacgacuaccagaucgggggcuacaccgagaagugggagagcggggugaaggacugcgugguccugcacuccuacuucacgagcuacuacuaccagcuguacuccacccagcucagcaccgacaccggcguggagcacgugacguucuucaucuacaacaagaucgucgacgagcccgaggagcacgugcagauccacaccaucgacggguccagcggcguggucaaccccgugauggagccgaucuacgacgagcccaccaccacgaccagcgugccccuguga

SEQ ID NO: 18739 - RNA, 828 nt, Artificial Sequence
  SARS-CoV-2__MT745584.1__ORF3a protein CDS gc
auggaccuguucaugcgcaucuucaccaucggcaccgugacgcucaagcagggggagaucaaggacgccacccccagcgacuucguccgggccaccgcgaccaucccgauccaggccucccugcccuucggcuggcugaucguggggguggcccuccuggccgucuuccacagcgccuccaagaucaucacgcugaagaagcgcuggcagcucgcgcugagcaagggcgugcacuucgugugcaaccugcuccugcuguucgucaccguguacucccaccuccugcugguggccgccgggcucgaggcccccuuccuguaccuguacgcgcucgucuacuuccugcagagcaucaacuucgugcggaucaucaugcgccuguggcucugcuggaagugccgguccaagaacccccugcuguacgacgccaacuacuuccucugcuggcacaccaacugcuacgacuacugcaucccguacaacagcgugaccuccagcaucgucaucacguccggcgacggcaccaccagccccaucuccgagcacgacuaccagaucgggggcuacaccgagaagugggagagcggggugaaggacugcgugguccugcacuccuacuucacgagcgacuacuaccagcuguacuccacccagcucagcaccgacaccggccuggagcacgugacguucuucaucuacaacaagaucguggacgagcccgaggagcacguccagauccacaccaucgacggguccagcggcguggugaaccccgucauggagccgaucuacgacgagcccaccaccacgaccagcgugccccuguga

SEQ ID NO: 18740 - RNA, 828 nt, Artificial Sequence
  SARS-CoV-2__MT745651.1__ORF3a protein CDS gc
auggaccuguucaugcgcaucuucaccaucggcaccgugacgcucaagcagggggagaucaaggacagcacccccuccgacuucguccgggccaccgccaccaucccgauccaggcgagccugcccuucggcuggcugaucguggggguggcccuccuggccgucuuccacuccgccagcaagaucaucacgcugaagaagcgcuggcagcucgcccuguccaagggcgugcacuucgugugcaaccugcuccugcuguucgucaccguguacagccaccuccugcugguggcggccgggcucgaggcccccuuccuguaccuguacgcccucgucuacuuccugcaguccaucaacuucgugcggaucaucaugcgccuguggcucugcuggaagugccggagcaagaacccccugcuguacgacgcgaacuacuuccucugcuggcacaccaacugcuacgacuacugcaucccguacaacuccgugaccagcuccaucgucaucacgagcggcgacggcaccaccucccccaucagcgagcacgacuaccagaucgggggcuacaccgagaagugggaguccggggugaaggacugcgugguccugcacagcuacuucacguccgacuacuaccagcuguacagcacccagcucuccaccgacaccggcguggagcacgugacguucuucaucuacaacaagaucgucgacgagcccgaggagcacgugcagauccacaccaucgacgggagcagcggcguggucaaccccgugauggagccgaucuacgacgagcccaccaccacgaccuccgugccccuguga

SEQ ID NO: 18741 - RNA, 828 nt, Artificial Sequence
  SARS-CoV-2__MT745660.1__ORF3a protein CDS gc
auggaccuguucaugcgcaucuucaccaucggcaccgugacgcucaagcagggggagaucaaggacgccacccccagcgacuucguccgggccaccgcgaccaucccgauccaggccucccugcccuucggcuggcugaucguggggguggcccuccuggccgucuuccagagcgccuccaagaucaucacgcugaagaagcgcuggcagcucgcgcuguucaagggcgugcacuucgugugcaaccugcuccugcuguucgucaccguguacagccaccuccugcugguggccgccgggcucgaggcccccuuccuguaccuguacgcgcucgucuacuuccugcaguccaucaacuucgugcggaucaucaugcgccuguggcucugcuggaagugccggagcaagaacccccugcuguacgacgccaacuacuuccucugcuggcacaccaacugcuacgacuacugcaucccguacaacuccgugaccagcuccaucgucaucacgagcggcgacggcaccaccucccccaucagcgagcacgacuaccagaucgggggcuacaccgagaagugggaguccggggugaaggacugcgugguccugcacagcuacuucacguccgacuacuaccagcuguacagcacccagcucuccaccgacaccggcguggagcacgugacguucuucaucuacaacaagaucgucgacgagcccgaggagcacgugcagauccacaccaucgacgggagcuccggcguggucaaccccgugauggagccgaucuacgacgagcccaccaccacgaccagcgugccccuguga

SEQ ID NO: 18742 - RNA, 828 nt, Artificial Sequence
  SARS-CoV-2__MT745661.1__ORF3a protein CDS gc
auggaccuguucaugcgcaucuucaccaucggcaccgugacgcucaagcagggggagaucaaggacgccacccccagcgacuucguccgggccaccgcgaccaucccgauccaggccucccugcccuucggcuggcugaucguggggguggcccuccuggccgucuuccacagcgccuccaagaucaucacgcugaagaagcgcuggcagcucgcgcugagcaagggcgugcacuucgugugcaaccugcuccugcuguucgucaccguguacucccaccuccugcugguggccgccgggcucgaggcccccuuccuguaccuguacgcgcucgucuacuuccugcagagcaucaacuucgugcggaucaucaugcgccuguggcucugcuggaagugccgguccaagaacccccugcuguacgacgccaacuacuuccucugcuggcacaccaacugcuacgacuacugcaucccguacaacagcgugaccuccagcaucgucaucacguccggcgacggcaccaccagccccaucuccgagcacgacuaccagaucgggggcuacaccgagaagugggagagcggggugaaggacugcgugguccugcacuccuacuucacgagcgacuacuaccagcuguacuccacccagcucagcaccgacaccggcguggagcacgugacguucuucaucuacaacaagaucgucgacgagcccgaggagcacgugcagauccacaccaucgacggguccagcggcguggucaaccccgugaucgagccgaucuacgacgagcccaccaccacgaccagcgugccccuguga

SEQ ID NO: 18743 - RNA, 828 nt, Artificial Sequence
  SARS-CoV-2__MT745698.1__ORF3a protein CDS gc
auggaccuguucaugcgcaucuucaccaucggcaccgugacgcucaagcagggggagaucaaggacgccacccccagcgacuucguccgggccaccgcgaccaucccgauccaggccucccugcccuucggcuggcugaucguggggguggcccuccuggccgucuuccagagcgccuccaagaucaucacgcugaagaagcgcuggcagcucgcgcugagcaagggcgugcacuucgugugcaaccugcuccugcuguucgucaccguguacucccaccuccugcugguggccgccgggcucgaggcccccuuccuguaccuguacgcgcucgucuacuuccugcagagcaucaacuucgugcggaucaucaugcgccuguggcucugcuggaagugccgguccaagaacccccugcuguacgacgccaacuacuuccucugcuggcacaccaacugcuacgacuacugcaucccguacaacagcgugaccuccagcaucgucaucacguccggcgacggcaccaccagcuccaucagcgagcacgacuaccagaucgggggcuacaccgagaagugggaguccggggugaaggacugcgugguccugcacagcuacuucacguccgacuacuaccagcuguacagcacccagcucuccaccgacaccggcguggagcacgugacguucuucaucuacaacaagaucgucgacgagcccgaggagcacgugcagauccacaccaucgacgggagcagcggcguggucaaccccgugauggagcccaucuacgacgagccgaccaccacgaccuccgugccccuguga

SEQ ID NO: 18744 - RNA, 828 nt, Artificial Sequence
  SARS-CoV-2__MT745711.1__ORF3a protein CDS gc
auggaccuguucaugcgcaucuucaccaucggcaccgugacgcucaagcagggggagaucaaggacgccacccccagcgacuucguccgggccaccgcgaccaucccgauccaggccucccugcccuucggcuggcugaucguggggguggcccuccuggccggcuuccacagcgccuccaagaucaucacgcugaagaagcgcuggcagcucgcgcugagcaaggggguccacuucgugugcaaccugcuccugcuguucgugaccgucuacucccaccuccugcugguggccgccggccucgaggcccccuuccuguaccuguacgcgcucguguacuuccugcagagcaucaacuucguccggaucaucaugcgccuguggcucugcuggaagugccgguccaagaacccccugcuguacgacgccaacuacuuccucugcuggcacaccaacugcuacgacuacugcaucccguacaacagcgugaccuccagcaucgugaucacguccggcgacgggaccaccagccccaucuccgagcacgacuaccagaucggcggguacaccgagaagugggagagcggcgucaaggacugcguggugcugcacuccuacuucacgagcgacuacuaccagcuguacuccacccagcucagcaccgacaccggggucgagcacgugacguucuucaucuacaacaagaucguggacgagcccgaggagcacguccagauccacaccaucgacggcuccagcggcguggugaaccccgucauggagccgaucuacgacgagcccaccaccacgaccagcgugccccuguga

SEQ ID NO: 18745 - RNA, 831 nt, Artificial Sequence
  SARS-CoV-2__MT748758.1__ORF3a protein CDS gc
auggaccuguucaugcgcaucuucaccaucggcaccgugacgcucaagcagggggagaucaaggacgccacccccagcgacuucguccgggccaccgcgaccaucccgauccaggccucccugcccuucggcuggcugaucguggggguggcccuccuggccgucuuccagagcgccuccaagaucaucacgcugaagaagcgcuggcagcucgcgcugagcaagggcgugcacuucgugugcaaccugcuccugcuguucgucaccguguacucccaccuccugcugguggccgccggggaccucgaggcccccuuccuguaccuguacgcgcucgucuacuuccugcagagcaucaacuucgugcggaucaucaugcgccuguggcucugcuggaagugccgguccaagaacccccugcuguacgacgccaacuacuuccucugcuggcacaccaacugcuacgacuacugcaucccguacaacagcgugaccuccagcaucgucaucacguccggcgacggcaccaccagccccaucuccgagcacgacuaccagaucgggggcuacaccgagaagugggagagcggggugaaggacugcgugguccugcacuccuacuucacgagcgacuacuaccagcuguacuccacccagcucagcaccgacaccggcguggagcacgugacguucuucaucuacaacaagaucgucgacgagcccgaggagcacgugcagauccacaccaucgacggguccagcggcguggucaaccccgugauggagccgaucuacgacgagcccaccaccacgaccagcgugccccuguga

SEQ ID NO: 18746 - RNA, 828 nt, Artificial Sequence
  SARS-CoV-2__MT750023.1__ORF3a protein CDS gc
auggaccuguucaugcgcaucuucaccaucggcaccgugacgcucaagcagggggagaucaaggacgccacgccccuggacuucguccgggccaccgcgaccaucccgauccaggccagccugcccuucggcuggcucaucguggggguggcccugcuggccgucuuccacuccgccagcaagaucaucacccucaagaagcgcuggcagcuggcgcuguccaagggcgugcacuucgugugcaaccuccugcugcuguucgucaccguguacagccaccuccugcucguggccgccgggcuggaggcccccuuccuguaccucuacgcgcuggucuacuuccugcaguccaucaacuucgugcggaucaucaugcgccucuggcugugcuggaagugccggagcaagaacccccugcucuacgacgccaacuacuuccugugcuggcacaccaacugcuacgacuacugcaucccguacaacuccgugaccagcuccaucgucaucacgagcggcgacggcaccaccucccccaucagcgagcacgacuaccagaucgggggcuacaccgagaagugggaguccggggugaaggacugcgugguccugcacagcuacuucacguccgacuacuaccagcucuacagcacccagcuguccaccgacaccggcguggagcacgugacguucuucaucuacaacaagaucgucgacgagcccgaggagcacgugcagauccacaccaucgacgggagcuccggcguggucaaccccgugauggagccgaucuacgacgagcccaccaccacgaccagcgugccccuguga

SEQ ID NO: 18747 - RNA, 828 nt, Artificial Sequence
  SARS-CoV-2__MT750069.1__ORF3a protein CDS gc
auggaccuguucaugcgcaucuucaccaucggcaccgugacgcucaagcagggggagaucaaggacgccacccccagcgacuucguccgggccaccgcgaccaucccgauccaggccucccugcccuucggcuggcugaucguggggguggcccuccuggccgucuuccagagcgccuccaagaucaucacgcugaagaagcgcuggcagcucgcgcugagcaagggcgugcacuucgugugcaaccugcuccugcuguucgucaccguguacucccaccuccugcugguggccgccgggcucgagagccccuuccuguaccuguacgcccucgucuacuuccugcaguccaucaacuucgugcggaucaucaugcgccuguggcucugccugaagugccggagcaagaacccccugcucuacgacgcgaacuacuuccugugcuggcacaccaacugcuacgacuacugcaucccguacaacuccgugaccagcuccaucgucaucacgagcggcgacggcaccaccucccccaucagcgagcacgacuaccagaucgggggcuacaccgagaagugggaguccggggugaaggacugcgugguccugcacagcuacuucacguccgacuacuaccagcucuacagcacccagcuguccaccgacaccggcguggagcacgugacguucuucaucuacaacaagaucgucgacgagcccgaggagcacgugcagauccacaccaucgacgggagcagcggcguggucaaccccgugauggagccgaucuacgacgagcccaccaccacgaccuccgugccccuguga

SEQ ID NO: 18748 - RNA, 828 nt, Artificial Sequence
  SARS-CoV-2__MT750475.1__ORF3a protein CDS gc
auggaccuguucaugcgcaucuucaccaucggcaccgugacgcucaagcagggggagaucaaggacgccacccccagcgacuucguccgggccaccgcgaccaucccgauccaggccucccugcccuucggcuggcugaucguggggguggcccuccuggccgucuuccagagcgccuccaagaucaucacgcugaagaagcgcuggcagcucgcgcugagcaagggcgugcacuucgugugcaaccugcuccugcuguucgucaccguguacucccaccuccugcugguggccgccgggcucgaggcccccuuccuguaccuguacgcgcucgucuacuuccugcagagcaucaacuucgugcggaucaucaugcgccuguggcucugcuggaagugccgguccaagaacccccugcuguacgacgccaacuacuuccucugcuggcacaccaacugcuacgacuacugcaucccguacaacagcgugaccuccagcaucgucaucacguccggcgacggcaccaccagccccaucuccgagcacgacuaccagaucgggggcuacaccgagaagugggagagcggggugaaggacugcgugguccugcacuccuacuucacgagcgacuacuaccagcuguacuccacccagcucagcaccgacaccggcguggagcacgugacguucuucaucuacaacaagaucgccgacgagcccgaggagcacguccagauccacaccaucgacggguccagcggcguggugaaccccgucauggagccgaucuacgacgagcccaccaccacgaccagcgugccccuguga

SEQ ID NO: 18749 - RNA, 828 nt, Artificial Sequence
  SARS-CoV-2__MT740384.1__ORF3a protein CDS gc
auggaccuguucaugcgcaucuucaccaucggcaccgugacgcucaagcagggggagaucaaggacgccacccccagcgacuucguccgggccaccgcgaccaucccgauccaggccucccugcccuucggcuggcugaucguggggguggcccuccuggccgucuuccagagcgccuccaagaucaucacgcugaagaagcgcuggcagcucgcgcugagcaagggcgugcacuucgugugcaaccugcuccugcuguucgucaccguguacucccaccuccugcugguggccgccgggcucgaggcccccuuccuguaccuguacgcgcucgucuacuuccugcagagcaucaacuucgugcggaucaucaugcgccuguggcucugcuggaagugccgguccaagaacccccugcuguacgacgccaacuacuuccucugcuggcacaccaacugcuacgacuacugcaucccguacaacagcgugaccuccagcaucgucaucacguccguggacggcaccaccagccccaucuccgagcacgacuaccagaucggcggguacaccgagaagugggagagcggcgugaaggacugcgucgugcugcacuccuacuucacgagcgacuacuaccagcuguacuccacccagcucagcaccgacaccgggguggagcacgucacguucuucaucuacaacaagaucguggacgagcccgaggagcacgugcagauccacaccaucgacggcuccagcggggucgugaaccccgugauggagccgaucuacgacgagcccaccaccacgaccagcgucccccuguga

SEQ ID NO: 18750 - RNA, 828 nt, Artificial Sequence
  SARS-CoV-2__MT740401.1__ORF3a protein CDS gc
auggaccuguucaugcgcaucuucaccaucggcaccgugacgcucaagcagggggagaucaaggacgccacccccagcgacuucguccgggccaccgcgaccaucccgauccaggccucccugcccuucggcuggcugaucguggggguggcccuccuggccgucuuccagagcgccuccaagaucaucacgcugaagaagcgcuggcagcucgcgcugagcaagggcgugcacuucgugugcaaccugcuccugcuguucgucaccguguacucccaccuccugcugguggccgccgggcucgaggcccccuuccuguaccuguacgcgcucgucuacuuccugcagagcaucaacuucgugcggaucaucaugcgccuguggcucugcuggaagugccgguccaagaacccccugcuguacgacgccaacuacuuccucugcuggcacaccaacugcuacgacuacugcaucccguacaacagcgugaccuccagcaucgucaucacguccggcgacggcaccaccagccccaucuccgagcacgacuaccagaucgggggcuacaccgagaagugggagagcggggugaaggacugcgugguccugcacuccuacuucacgagcgacuacuaccagcuguacuccacccagcucaacaccgacaccggcguggagcacgugacguucuucaucuacaacaagaucgucgacgagcccgaggagcacgugcagauccacaccaucgacgggagcuccggcguggucaaccccgugauggagccgaucuacgacgagcccaccaccacgaccagcgugccccuguga

SEQ ID NO: 18751 - RNA, 828 nt, Artificial Sequence
  SARS-CoV-2__MT740438.1__ORF3a protein CDS gc
auggaccuguucaugcgcaucuucaccaucggcaccgugacgcucaagcagggggagaucaaggacgccacccccagcgacuucguccgggccaccgcgaccaucccgauccaggccucccugcccuucggcuggcugaucguggggaucgcccuccuggccguguuccagagcgccuccaagaucaucacgcugaagaagcgcuggcagcucgcgcugagcaagggcguccacuucgugugcaaccugcuccugcuguucgugaccgucuacucccaccuccugcugguggccgccgggcucgaggugcccuuccuguaccuguacgcccucgucuacuuccugcagagcaucaacuucgugcggaucaucaugcgccuguggcucugcuggaagugccgguccaagaacccccugcuguacgacgcgaacuacuuccucugcuggcacaccaacugcuacgacuacugcaucccguacaacagcgugaccuccagcaucgucaucacguccggcgacggcaccaccagccccaucuccgagcacgacuaccagaucgggggcuacaccgagaagugggagagcggggugaaggacugcgugguccugcacuccuacuucacgagcgacuacuaccagcuguacuccacccagcucagcaccgacaccggcguggagcacgugacguucuucaucuacaacaagaucgucgacgagcccgaggagcacgugcagauccacaccaucgacggguccagcggcguggucaaccccgugauggagccgaucuacgacgagcccaccaccacgaccagcgugccccuguga

SEQ ID NO: 18752 - RNA, 828 nt, Artificial Sequence
  SARS-CoV-2__MT740478.1__ORF3a protein CDS gc
auggaccuguucaugcgcaucuucaccaucggcaccgugacgcucaagcagggggagaucaaggacgccacccccagcgacuucguccgggccaccgcgaccaucccgaucgaggccucccugcccuucggcuggcugaucguggggguggcccuccuggccgucuuccagagcgccuccaagaucaucacgcugaagaagcgcuggcagcucgcgcugagcaagggcguguacuucgugugcaaccugcuccugcuguucgucaccguguacucccaccuccugcugguggccgccgggcucgaggcccccuuccuguaccuguacgcgcucgucuacuuccugcagagcaucaacuucgugcggaucaucaugcgccuguggcucugcuggaagugccgguccaagaacccccugcuguacgacgccaacuacuuccucugcuggcacaccaacugcuacgacuacugcaucccguacaacagcgugaccuccagcaucgucaucacguccggcgacggcaccaccagccccaucuccgagcacgacuaccagaucgggggcuacaccgagaagugggagagcggggugaaggacugcgugguccugcacuccuacuucacgagcgacuacuaccagcuguacuccacccagcucagcaccgacaccggcguggagcacgugacguucuucaucuacaacaagaucgucgacgagcccgaggagcacgugcagauccacaccaucgacggguccagcggcguggucaaccccgugauggagccgaucuacgacgagcccaccaccacgaccagcgugccccuguga

SEQ ID NO: 18753 - RNA, 828 nt, Artificial Sequence
  SARS-CoV-2__MT740485.1__ORF3a protein CDS gc
auggaccuguucaugcgcaucuucaccaucggcaccgugacgcucaagcagggggagaucaaggacgccacccccagcgacuucguccgggccaccgcgaccaucccgauccaggccucccugcccuucggcuggcugaucguggggguggcccuccugagcgucuuccacuccgccagcaagaucaucacgcugaagaagcgcuggcagcucgcccuguccaagggcgugcacuucgugugcaaccugcuccugcuguucgucaccguguacagccaccuccugcugguggcggccgggcucgaggcccccuuccuguaccuguacgcccucgucuacuuccugcaguccaucaacuucgugcggaucaucaugcgccuguggcucugcuggaagugccggagcaagaacccccugcuguacgacgcgaacuacuuccucugcuggcacaccaacugcuacgacuacugcaucccguacaacuccgugaccagcuccaucgucaucacgagcggcgacggcaccaccucccccaucagcgagcacgacuaccagaucgggggcuacaccgagaagugggaguccggggugaaggacugcgugguccugcacagcuacuucacguccgacuacuaccagcuguacagcacccagcucuccaccgacaccggcguggagcacgugacguucuucaucuacaacaagaucgucgacgagcccgaggagcacgugcagauccacaccaucgacgggagcagcggcguggucaaccccgugauggagccgaucuacgacgagcccaccaccacgaccuccgugccccuguga

SEQ ID NO: 18754 - RNA, 828 nt, Artificial Sequence
  SARS-CoV-2__MT740717.1__ORF3a protein CDS gc
auggaccuguucaugcgcaucuucaccaucggcaccgugacgcucaagcagggggagaucaaggacgccacccccagcgacuucguccgggccaccgcgaccaucccgauccaggccucccugcccuucggcuggcugaucguggggguggcccuccuggccgucuuccacagcgccuccaagaucaucacgcugaagaagcgcuggcagcucgcgcugagcaagggcgugcacuucgugugcaaccugcuccugcuguucgucaccguguacucccaccuccugcugguggccgccgggcucgaggcccccuuccuguaccuguacgcgcucgucuacuuccugcagagcaucaacuucgugcggaucaucaugcgccuguggcucugcuggaagugccuguccaagaacccccugcucuacgacgccaacuacuuccugugcuggcacaccaacugcuacgacuacugcaucccguacaacagcgugaccuccagcaucgucaucacguccggcgacggcaccaccagccccaucuccgagcacgacuaccagaucgggggcuacaccgagaagugggagagcggggugaaggacugcgugguccugcacuccuacuucacgagcgacuacuaccagcucuacuccacccagcugagcaccgacaccggcguggagcacgugacguucuucaucuacaacaagaucgucgacgagcccgaggagcacgugcagauccacaccaucgacggguccagcggcguggucaaccccgugauggagccgaucuacgacgagcccaccaccacgaccagcgugccccuguga

SEQ ID NO: 18755 - RNA, 828 nt, Artificial Sequence
  SARS-CoV-2__MT740923.1__ORF3a protein CDS gc
auggaccuguucaugcgcaucuucaccaucggcaccgugacgcucaagcagggggagaucaaggacgccacccccagcgacuucguccgggccaccgcgaccaucccgauccaggccucccugcccuucggcuggcugaucguggggguggcccuccuggccgucuuccagagcgccuccaagaucaucacgcugaagaagcgcuggcagcucgcgcugagcaagggcgugcacuucgugugcaaccugcuccugcuguucgucaccguguacucccaccuccugcugguggccgccgggcucgaggcccccuuccuguaccuguacgcgcucgucuacuuccugcagagcaucaacuucgugcggaucaucaugcgccuguggcucugcuggaagugccgguccaagaacccccugcuguacgacgccaacuacuuccucugcuggcacaucaacugcuacgacuacugcaucccguacaacagcgugaccuccagcaucgucaucaccuccggcgacggcacgaccagccccaucuccgagcacgacuaccagaucgggggcuacaccgagaagugggagagcggggugaaggacugcgugguccugcacuccuacuucaccagcgacuacuaccagcuguacuccacgcagcucagcaccgacaccggcguggagcacgugaccuucuucaucuacaacaagaucgucgacgagcccgaggagcacgugcagauccacacgaucgacggguccagcggcguggucaaccccgugauggagccgaucuacgacgagcccaccaccaccacgagcgugccccuguga

SEQ ID NO: 18756 - RNA, 828 nt, Artificial Sequence
  SARS-CoV-2__MT734046.1__ORF3a protein CDS gc
auggaccuguucaugcgcaucuucaccaucggcaccgugacgcucaagcagggggagaucaaggacgccacccccagcgacuucguccgggccaccgcgaccaucccgauccaggccucccugcccuucggcuggcugaucguggggguggcccuccuggccgucuuccagagcgccuccaagaucaucacgcugaagaagcgcuggcagcucgcgcugagcaagggcgugcacuucgugugcaaccugcuccugcuguucgucaccguguacucccaccuccugcugguggccagcgggcucgaggcccccuuccuguaccuguacgcccucgucuacuuccugcaguccaucaacuucgugcggaucaucaugcgccuguggcucugcuggaagugccggagcaagaacccccugcuguacgacgcgaacuacuuccucugcuggcacaccaacugcuacgacuacugcaucccguacaacuccgugaccagcuccaucgucaucacgagcggcgacggcaccaccucccccaucagcgagcacgacuaccagaucgggggcuacaccgagaagugggaguccggggugaaggacugcgugguccugcacagcuacuucacguccgacuacuaccagcuguacagcacccagcucuccaccgacaccggcguggagcacgugacguucuucaucuacaacaagaucgucgacgagcccgaggagcacgugcagauccacaccaucgacgggagcagcggcguggucaaccccgugauggagccgaucuacgacgagcccaccaccacgaccuccgugccccuguga

SEQ ID NO: 18757 - RNA, 828 nt, Artificial Sequence
  SARS-CoV-2__MT706205.1__ORF3a protein CDS gc
auggaccuguucaugcgcaucuucaccaucggcaccgugacgcucaagcagggggagaucaaggacgccacccccagcgacuucguccgggccaccgcgaccaucccgauccaggccucccugcccuucggcuggcugaucguggggguggcccuccuggccgucuuccacagcgccuccaagaucaucacgcugaagaagcgcuggcagcucgcgcugagcaagggcgugcacuucgugugcaaccugcuccugcuguucgucaccguguacucccaccuccugcugguggccaccgggcucgaggcccccuuccuguaccuguacgcccucgucuacuuccugcagagcaucaacuucgugcggaucaucaugcgccuguggcucugcuggaagugccgguccaagaacccccugcuguacgacgcgaacuacuuccucugcuggcacaccaacugcuacgacuacugcaucccguacaacagcgugacguccagcaucgucaucaccuccggcgacggcaccaccagccccaucuccgagcacgacuaccagaucgggggcuacacggagaagugggagagcggggugaaggacugcgugguccugcacuccuacuucaccagcgacuacuaccagcuguacuccacccagcucagcaccgacacgggcguggagcacgugaccuucuucaucuacaacaagaucgucgacgagcccgaggagcacgugcagauccacaccaucgacggguccagcggcguggucaaccccgugauggagccgaucuacgacgagcccaccacgaccaccagcgugccccuguga

SEQ ID NO: 18758 - RNA, 828 nt, Artificial Sequence
  SARS-CoV-2__MT706248.1__ORF3a protein CDS gc
auggaccuguucaugcgcaucuucaccaucggcaccgugacgcucaagcagggggagaucaaggacgccacccccagcgacuucguccgggccaccgcgaccaucccgauccaggccucccugcccuucggcuggcugaucguggggguggcccuccuggccgucuuccagagcgccuccaagaucaucacgcugaagaagcgcuggcagcucgcgcugagcaagggcgugcacuucgugugcaaccugcuccugcuguucgucaccguguacucccaccuccugcugguggccgccgggcucgaggcccccuuccuguaccuguacgcgcucgucuacuuccugcagagcaucaacuucgugcggaucaucaugcgccuguggcucugcuggaagugccgguccaagaacccccugcuguacgacgccaacuacuuccucugcuggcacaccaacugcuacgacuacugcaucccguacaacagcgugaccuccagcaucgucaucacguccggcgacggcaccaccagccccaucuccgagcacgacuaccagaucgggggcuacaccgagaagugggagagcggggugaaggacugcgugguccugcacuccuacuucacgagcgacuacuaccagcuguacuccacccagcucagcaccgacaccggcguggagcacgugacguucuucaucuacaacaagaucgucgacgagcccgaggagcacgugcagauccacaccaucgacggguccagcggcguggucaaccccgugauggagccgaucuacgacgagcugaccaccacgaccagcgugccccuguga

SEQ ID NO: 18759 - RNA, 828 nt, Artificial Sequence
  SARS-CoV-2__MT706263.1__ORF3a protein CDS gc
auggaccuguucaugcgcaucuucaccaucggcaccgugacgcucaagcagggggagaucaaggacgccacccccagcgacuucguccgggccaccgcgaccaucccgauccaggccucccugcccuucggcuggcugaucguggggguggcccuccuggccgucuuccagagcgccuccaagaucaucacgcugaagaagcgcuggcagcucgcgcugagcaagggcgugcacuucgugugcaaccugcuccugcuguucgucaccguguacucccaccuccugcugguggccgccgggcucgaggcccccuuccuguaccuguacgcgcucgucuacuuccugcagagcaucaacuucgugcggaucaucaugcgccuguggcucugcuggaagugccgguccaagaacccccugcuguacgacgccaacuacuuccucugcuggcacaccaacugcuacgacuacugcaucccguacaacagcgugaccuccagcaucgucaucacguccggcgacggcaccaccagccccaucuccgagcacgacuaccagaucgggggcuacaccgagaagugggagagcgggaucaaggacugcguggugcugcacuccuacuucacgagcgacuacuaccagcuguacuccacccagcucagcaccgacaccggcgucgagcacgugacguucuucaucuacaacaagaucguggacgagcccgaggagcacguccagauccacaccaucgacggguccagcggcguggugaaccccgucauggagccgaucuacgacgagcccaccaccacgaccagcgugccccuguga

SEQ ID NO: 18760 - RNA, 828 nt, Artificial Sequence
  SARS-CoV-2__MT706326.1__ORF3a protein CDS gc
auggaccuguucaugcgcaucuucaccaucggcaccgugacgcucaagcagggggagaucaaggacgccacccccagcgacuucguccgggccaccgcgaccaucccgauccaggccucccugcccuucggcuggcugaucguggggguggcccuccuggccgucuuccagagcgccuccaagaucaucacgcugaagaagcgcuggcagcucgcgcugagcaagggcgugcacuucgugugcaaccugcuccugcuguucgucaccguguacucccaccuccugcugguggccgccgggcucgaggcccccuuccuguaccuguacgcgcucgucuacuuccugcagagcaucaacuucgugcggaucaucaugcgccuguggcucugcuggaagugccuguccaagaacccccugcucuacgacgccaacuacuuccugugcuggcacaccaacugcuacgacuacugcaucccguacaacagcgugaccuccagcaucgucaucacguccggcgacggcaccaccagccccaucuccgagcacgacuaccagaucgggggcuacaccgagaagugggagagcggggugaaggacugcgugguccugcacuccuacuucacgagcgacuacuaccagcucuacuccacccagcugagcaccgacaccggcguggagcacgugacguucuucaucuacaacaagaucgucgacgagcccgaggagcacgugcagauccacaccaucgacggguccagcggcguggucaaccccgugauggagccgaucuacgacgagcccaccaccacgaccagcgugccccuguga

SEQ ID NO: 18761 - RNA, 828 nt, Artificial Sequence
  SARS-CoV-2__MT706405.1__ORF3a protein CDS gc
auggaccuguucaugcgcaucuucaccaucggcaccgugacgcucaagcagggggagaucaaggacgccacccccagcgacuucguccgggccaccgcgaccaucccgauccagacgucccugcccuucggcuggcugaucguggggguggcccuccuggccgucuuccagagcgccuccaagaucaucacccugaagaagcgcuggcagcucgcccugagcaagggcgugcacuucgugugcaaccugcuccugcuguucgucaccguguacucccaccuccugcugguggcggccgggcucgaggcccccuuccuguaccuguacgcccucgucuacuuccugcagagcaucaacuucgugcggaucaucaugcgccuguggcucugcuggaagugccgguccaagaacccccugcuguacgacgcgaacuacuuccucugcuggcacaccaacugcuacgacuacugcaucccguacaacagcgugacguccagcaucgucaucaccuccggcgacggcaccaccagccccaucuccgagcacgacuaccagaucgggggcuacacggagaagugggagagcggggugaaggacugcgugguccugcacuccuacuucaccagcgacuacuaccagcuguacuccacccagcucagcaccgacacgggcguggagcacgugaccuucuucaucuacaacaagaucgucgacgagcccgaggagcacgugcagauccacaccaucgacggguccagcggcguggucaaccccgugauggagccgaucuacgacgagcccaccacgaccaccagcgugccccuguga

SEQ ID NO: 18762 - RNA, 828 nt, Artificial Sequence
  SARS-CoV-2__MT683408.1__ORF3a protein CDS gc
auggaccuguucaugcgcaucuucaccaucggcaccgugauccucaagcagggggagaucaaggacgccacgcccagcgacuucguccgggccaccgcgaccaucccgauccaggccucccugcccuucggcuggcugaucguggggguggcccuccuggccgucuuccagagcgccuccaagaucaucacccugaagaagcgcuggcagcucgcgcugagcaagggcgugcacuucgugugcaaccugcuccugcuguucgucacgguguacucccaccuccugcugguggccgccgggcucgaggcccccuuccuguaccuguacgcgcucgucuacuuccugcagagcaucaacuucgugcggaucaucaugcgccuguggcucugcuggaagugccgguccaagaacccccugcuguacgacgccaacuacuuccucugcuggcacaccaacugcuacgacuacugcaucccguacaacagcgugaccuccagcaucgucaucaccuccggcgacggcacgaccagccccaucuccgagcacgacuaccagaucgggggcuacaccgagaagugggagagcggggugaaggacugcgugguccugcacuccuacuucaccagcgacuacuaccagcuguacuccacgcagcucagcaccgacaccggcguggagcacgugaccuucuucaucuacaacaagaucgucgacgagcccgaggagcacgugcagauccacacgaucgacggguccagcggcguggucaaccccgugauggagccgaucuacgacgagcccaccaccaccacgagcgugccccuguga

SEQ ID NO: 18763 - RNA, 828 nt, Artificial Sequence
  SARS-CoV-2__MT679156.1__ORF3a protein CDS gc
auggaccuguucaugcgcaucuucaccaucggcaccgugacgcucaagcagggggagaucaaggacgccacccccagcgacuucguccgggccaccgcgaccaucccgauccaggccucccugcccuucggcuggcugaucguggggguggcccuccuggccgucuuccacagcgccuccaagaucaucacguucaagaagcgcuggcagcuggcgcucagcaagggcgugcacuucgugugcaaccugcugcuccuguucgucaccguguacucccaccuccugcugguggccgccgggcuggaggcccccuuccucuaccuguacgcgcuggucuacuuccuccagagcaucaacuucgugcggaucaucaugcgccuguggcugugcuggaagugccgguccaagaacccccuccuguacgacgccaacuacuuccugugcuggcacaccaacugcuacgacuacugcaucccguacaacagcgugaccuccagcaucgucaucacguccggcgacggcaccaccagccccaucuccgagcacgacuaccagaucgggggcuacaccgagaagugggagagcggggugaaggacugcgugguccuccacuccuacuucacgagcgacuacuaccagcuguacuccacccagcugagcaccgacaccggcguggagcacgugacguucuucaucuacaacaagaucgucgacgagcccgaggagcacgugcagauccacaccaucgacggguccagcggcguggucaaccccgugauggagccgaucuacgacgagcccaccaccacgaccagcgugccccucuga

SEQ ID NO: 18764 - RNA, 828 nt, Artificial Sequence
  SARS-CoV-2__MT611448.1__ORF3a protein CDS gc
auggaccuguucaugcgcaucuucaccaucggcaccgugacgcucaagcagggggagaucaaggacgccacccccagcgacuucguccgggccaccgcgaccaucccgauccaggccucccugcccuucggcuggcugaucguggggguggcccuccuggccgucuuccacagcgccuccaagaucaucacgcugaagaagcgcuggcagcucgcgcugagcaagggcgugcacuucgugugcaaccugcuccugcuguucgucaccguguacucccaccuccugcugguggccgccgggcucgaggcccccuuccuguaccuguacgcgcucgucuacuuccugcagagcaucaacuucgugcggaucaucaugcgccuguggcucugcuggaagugccgguccaagaacccccugcuguacgacgccaacuacuuccucugcuggcacaccaacugcuacgacuacugcaucccguacaacagcgugaccuccagcaucgucaucacguccggcgacggcaccaccagccccaucuccgaguacgacuaccagaucgggggcuacaccgagaagugggagagcggggugaaggacugcgugguccugcacuccuacuucacgagcgacuacuaccagcuguacuccacccagcucagcaccgacaccggcguggagcacgugacguucuucaucuacaacaagaucgucgacgagcccgaggagcacgugcagauccacaccaucgacggguccagcggcguggucaaccccgugauggagccgaucuacgacgagcccaccaccacgaccagcgugccccuguga

SEQ ID NO: 18765 - RNA, 828 nt, Artificial Sequence
  SARS-CoV-2__MT614601.1__ORF3a protein CDS gc
auggaccuguucaugcgcaucuucaccaucggcaccgugacgcucaagcagggggagaucaaggacgccacccccagcgacuucguccgggccaccgcgaccaucccgauccaggccucccugcccuucggcuggcugaucguggggguggcccuccuggccuucuuccagagcgccuccaagaucaucacgcugaagaagcgcuggcagcucgcgcugagcaagggcguccacuucgugugcaaccugcuccugcuguucgugaccgucuacucccaccuccugcugguggccgccgggcucgaggcccccuuccuguaccuguacgcgcucguguacuuccugcagagcaucaacuucguccggaucaucaugcgccuguggcucugcuggaagugccgguccaagaacccccugcuguacgacgccaacuacuuccucugcuggcacaccaacugcuacgacuacugcaucccguacaacagcgugaccuccagcaucgugaucacgcugggcgacggcaccaccucccccaucagcgagcacgacuaccagaucgggggcuacaccgagaagugggaguccggggucaaggacugcguggugcugcacagcuacuucacguccgacuacuaccagcucuacagcacccagcuguccaccgacaccggcgucgagcacgugacguucuucaucuacaacaagaucguggacgagcccgaggagcacguccagauccacaccaucgacgggagcuccggcguggugaaccccgucauggagccgaucuacgacgagcccaccaccacgaccagcgugccccuguga

SEQ ID NO: 18766 - RNA, 828 nt, Artificial Sequence
  SARS-CoV-2__MT675289.1__ORF3a protein CDS gc
auggaccuguucaugcgcaucuucaccaucggcaccgugacgcucaagcagggggagaucaaggacgccacccccagcgacuucguccgggccaccgcgaccaucccgauccaggccucccugcccuucggcuggcugaucguggggguggcccuccuggccgucuuccagagcgccuccaagaucaucacgcugaagaagcgcuggcagcucgcgcugagcaagggcgugcacuucgugugcaaccugcuccugcuguucgccaccgucuacucccaccuccugcugguggccgccgggcucgaggcgcccuuccuguaccuguacgcccucguguacuuccugcagagcaucaacuucguccggaucaucaugcgccuguggcucugcuggaagugccgguccaagaacccccugcuguacgacgccaacuacuuccucugcuggcacaccaacugcuacgacuacugcaucccguacaacagcgugaccuccagcaucgugaucacguccggcgacggcaccaccagccccaucuccgagcacgacuaccagaucgggggcuacaccgagaagugggagagcggggucaaggacugcguggugcugcacuccuacuucacgagcgacuacuaccagcuguacuccacccagcucagcaccgacaccggcgucgagcacgugacguucuucaucuacaacaagaucguggacgagcccgaggagcacguccagauccacaccaucgacguguccagcgggguggucaaccccgugauggagccgaucuacgacgagcccaccaccacgaccagcgugccccuguga

SEQ ID NO: 18767 - RNA, 828 nt, Artificial Sequence
  SARS-CoV-2__MT664169.1__ORF3a protein CDS gc
auggaccuguucaugcgcaucuucaccaucggcaccgugacgcucaagcagggggagaucaaggacgccacccccagcgacuucguccgggccaccgcgaccaucccgauccaggccucccugcccuucggcuggcugaucguggggguggcccuccuggccgucuuccagagcgccuccaagaucaucacgcugaacaagcgcuggcagcucgcgcugagcaagggcgugcacuucgugugcaaccugcuccugcuguucgucaccguguacucccaccuccugcugguggccgccgggcucgaggcccccuuccuguaccuguacgcgcucgucuacuuccugcagagcaucaacuucgugcggaucaucaugcgccuguggcucugcuggaagugccgguccaagaacccccugcuguacgacgccaacuacuuccucugcuggcacaccaacugcuacgacuacugcaucccguacaacagcgugaccuccagcaucgucaucacguccggcgacggcaccaccagccccaucuccgagcacgacuaccagaucgggggcuacaccgagaagugggagagcggggugaaggacugcgugguccugcacuccuacuucacgagcgacuacuaccagcuguacuccacccagcucagcaccgacaccggcguggagcacgugacguucuucaucuacaacaagaucgucgacgagcccgaggagcacgugcagauccacaccaucgacggguccagcggcguggucaaccccgugauggagccgaucuacgacgagcccaccaccacgaccagcgugccccuguga

SEQ ID NO: 18768 - RNA, 828 nt, Artificial Sequence
  SARS-CoV-2__MT653097.1__ORF3a protein CDS gc
auggaccuguucaugcgcaucuucaccaucggcaccgugacgcucaagcagggggagaucaaggacgccacccccagcgacuucguccgggccaccgcgaccaucccgauccaggccucccugcccuucggcuggcugaucguggggguggcccuccuggccgucuuccagagcgccuccaagaucaucacgcugaagaagcgcuggcagcucgcgcugagcaagggcgugcacuucgugugcaaccugcuccugcuguucgucaccguguacucccaccuccugcugguggccgccgggcucgaggcccccuuccuguaccuguacgcgcucgucuacuuccugcagagcaucaacuucgugcggaucaucaugcgccuguggcucugcuggaagugccgguccaagaacccccugcuguacgacgccaacuacuuccucugcuggcacaccaacugcuacgacuacugcaucccguacaacagcgugaccuccagcaucgucaucacguccggcgacggcaccaccagccccaucuccgagcacgacuaccagaucgggggcuacaccgagaagugggagagcggggugaaggacugcgugguccugcacuccuacuucacgagcgacuacuaccagcuguacuccacccagcucagcaccgacaccggcguggagcacgugaucuucuucaucuacaacaagaucgucgacgagcccgaggagcacgugcagauccacacgaucgacggguccagcggcguggucaaccccgugauggagccgaucuacgacgagcccaccaccaccacgagcgugccccuguga

SEQ ID NO: 18769 - RNA, 828 nt, Artificial Sequence
  SARS-CoV-2__MT655750.1__ORF3a protein CDS gc
auggaccuguucaugcgcaucuucaccaucggcaccgugacgcucaagcagggggagaucaaggacgccacccccagcgacuucguccgggccaccgcgaccaucccgauccaggccucccugcccuucggcuggcugaucguggggguggcccuccuggccgucuuccagagcgccuccaagaucaucacgcugaagaagcgccggcagcucgcgcugagcaagggcgugcacuucgugugcaaccugcuccugcuguucgucaccguguacucccaccuccugcugguggccgccgggcucgaggcccccuuccuguaccuguacgcgcucgucuacuuccugcagagcaucaacuucgugcgcaucaucaugcggcuguggcucugcuggaagugccgcuccaagaacccccugcuguacgacgccaacuacuuccucugcuggcacaccaacugcuacgacuacugcaucccguacaacagcgugaccuccagcaucgucaucacguccggcgacggcaccaccagccccaucuccgagcacgacuaccagaucgggggcuacaccgagaagugggagagcggggugaaggacugcgugguccugcacuccuacuucacgagcgacuacuaccagcuguacuccacccagcucagcaccgacaccggcguggagcacgugacguucuucaucuacaacaagaucgucgacgagcccgaggagcacgugcagauccacaccaucgacggguccagcggcguggucaaccccgugauggagccgaucuacgacgagcccaccaccacgaccagcgugccccuguga

SEQ ID NO: 18770 - RNA, 828 nt, Artificial Sequence
  SARS-CoV-2__MT646053.1__ORF3a protein CDS gc
auggaccuguucaugcgcaucuucaccaucggcaccgugacgcucaagcgcggggagaucaaggacgccacccccagcgacuucguccgggccaccgcgaccaucccgauccaggccucccugcccuucggcuggcugaucguggggguggcccuccuggccgucuuccagagcgccuccaagaucaucacgcugaagaagcgguggcagcucgcgcugagcaagggcgugcacuucgugugcaaccugcuccugcuguucgucaccguguacucccaccuccugcugguggccgccgggcucgaggcccccuuccuguaccuguacgcgcucgucuacuuccugcagagcaucaacuucgugcgcaucaucaugcggcuguggcucugcuggaagugccgcuccaagaacccccugcuguacgacgccaacuacuuccucugcuggcacaccaacugcuacgacuacugcaucccguacaacagcgugaccuccagcaucgucaucacguccggcgacggcaccaccagccccaucuccgagcacgacuaccagaucgggggcuacaccgagaagugggagagcggggugaaggacugcgugguccugcacuccuacuucacgagcgacuacuaccagcuguacuccacccagcucagcaccgacaccggcguggagcacgugacguucuucaucuacaacaagaucgucgacgagcccgaggagcacgugcagauccacaccaucgacggguccagcggcguggucaaccccgugauggagccgaucuacgacgagcccaccaccacgaccagcgugccccuguga

SEQ ID NO: 18771 - RNA, 828 nt, Artificial Sequence
  SARS-CoV-2__MT641689.1__ORF3a protein CDS gc
auggaccuguucaugcgcaucuucaccaucggcaccgugacgcucaagcagggggagaucaaggacgccacccccagcgacuucguccgggccaccgcgaccaucccgauccaggccucccugcccuucggcuggcugaucguggggguggcccuccuggccgucuuccacagcgccuccaagaucaucacgcugaagaagcgcuggcagcucgcgcugagcaagggcgugcacuucgugugcaaccugcuccugcuguucgucaccguguacucccaccuccugcugguggccgccgggcucgaggcccccuuccuguaccuguacgcgcucgucuacuuccugcagagcaucaacuucgugcggaucaucaugcgccuguggcucugcuggaagugccgguccaagaacccccugcuguacgacgccaacuacuuccucugcuggcacaccaacugcuacgacuacugcaucccguacaacagcgugaccuccagcaucgucaucacguccggcgacggcaccaccagccccaucuccgagcacgacuaccagaucgggggcuacaccgagaagugggagagcggggugaaggacugcgugguccugcacuccuacuucacgagcgacuacuaccagcuguacuccacccagcucagcaccgacaccggcguggagcacgugacguucuucaucuacaacaagaucgucgacgagcccgaggagcacgugcagauccacaccaucgacggguccagcggcguggucaaccccgugauggagagcaucuacgacgagccgaccaccacgaccuccgugccccuguga

SEQ ID NO: 18772 - RNA, 828 nt, Artificial Sequence
  SARS-CoV-2__MT641720.1__ORF3a protein CDS gc
auggaccuguucaugcgcaucuucaccaucggcaccgugacgcucaagcagggggagaucaaggacgccacccccagcgacuucguccgggccaccgcgaccaucccgauccaggccucccugcccuucggcuggcugaucguggggguggcccuccuggccgucuuccacagcgccuccaagaucaucacgcugaagaagcgcuggcagcucgcgcugagccggggcgugcacuucgugugcaaccugcuccugcuguucgucaccguguacucccaccuccugcugguggccgccgggcucgaggcccccuuccuguaccuguacgcgcucgucuacuuccugcagagcaucaacuucgugcgcaucaucaugcggcuguggcucugcuggaagugccgcuccaagaacccccugcuguacgacgccaacuacuuccucugcuggcacaccaacugcuacgacuacugcaucccguacaacagcgugaccuccagcaucgucaucacguccggcgacggcaccaccagccccaucuccgagcacgacuaccagaucgggggcuacaccgagaagugggagagcggggugaaggacugcgugguccugcacuccuacuucacgagcgacuacuaccagcuguacuccacccagcucagcaccgacaccggcguggagcacgugacguucuucaucuacaacaagaucgucgacgagcccgaggagcacgugcagauccacaccaucgacggguccagcggcguggucaaccccgugauggagccgaucuacgacgagcccaccaccacgaccagcgugccccuguga

SEQ ID NO: 18773 - RNA, 828 nt, Artificial Sequence
  SARS-CoV-2__MT641737.1__ORF3a protein CDS gc
auggaccuguucaugcgcaucuucaccaucggcaccgugacgcucaagcagggggagaucaaggacgccacccccagcgacuucguccgggccaccgcgaccaucccgauccaggccucccugcccuucggcuggcugaucguggggguggcccuccuggccgucuuccagagcgccuccaagaucaucacgcugaagaagcgccuccagcuggcgcugagcaagggcgugcacuucgugugcaaccuccugcugcuguucgucaccguguacucccaccuccugcucguggccgccgggcuggaggcccccuuccuguaccucuacgcgcuggucuacuuccugcagagcaucaacuucgugcggaucaucaugcgccucuggcugugcuggaagugccgguccaagaacccccugcucuacgacgccaacuacuuccugugcuggcacaccaacugcuacgacuacugcaucccguacaacagcgugaccuccagcaucgucaucacguccggcgacggcaccaccagccccaucuccgagcacgacuaccagaucgggggcuacaccgagaagugggagagcggggugaaggacugcgugguccugcacuccuacuucacgagcgacuacuaccagcucuacuccacccagcugagcaccgacaccggcguggagcacgugacguucuucaucuacaacaagaucgucgacgagcccgaggagcacgugcagauccacaccaucgacguguccagcggggucgugaaccccgugauggagccgaucuacgacgagcccaccaccacgaccagcgucccccuguga

SEQ ID NO: 18774 - RNA, 828 nt, Artificial Sequence
  SARS-CoV-2__MT641741.1__ORF3a protein CDS gc
auggaccuguucaugcgcaucuucaccaucggcaccgugacgcucaagcagggggagaucaaggacgccacccccagcgacuucguccgggccaccgcgaccaucccgauccaggccucccugcccuucggcuggcugaucguggggguggcccuccuggccgucuuccagagcgccuccaagaucaucacgcugaagaagcgcuggcagcucgcgcugcccaagggcgugcacuucgugugcaaccugcuccugcuguucgucaccguguacagccaccuccugcugguggccgccgggcucgaggcccccuuccuguaccuguacgcgcucgucuacuuccugcaguccaucaacuucgugcggaucaucaugcgccuguggcucugcuggaagugccggagcaagaacccgcugcuguacgacgccaacuacuuccucugcuggcacaccaacugcuacgacuacugcauccccuacaacuccgugaccagcuccaucgucaucacgagcggcgacggcaccaccucccccaucagcgagcacgacuaccagaucgggggcuacaccgagaagugggaguccggggugaaggacugcgugguccugcacagcuacuucacguccgacuacuaccagcuguacagcacccagcucuccaccgacaccggcguggagcacgugacguucuucaucuacaacaagaucgucgacgagcccgaggagcacgugcagauccacaccaucgacgggagcuccggcguggucaacccggugauggagcccaucuacgacgagcccaccaccacgaccagcgugccccuguga

SEQ ID NO: 18775 - RNA, 828 nt, Artificial Sequence
  SARS-CoV-2__MT642138.1__ORF3a protein CDS gc
auggaccuguucaugcgcaucuucaccaucggcaccgugacgcucaagcagggggagaucaaggacgccacccccagcgacuucguccgggccaccgcgaccaucccgauccaggccucccugcccuucggcuggcugaucguggggguggcccuccuggccgucuuccacagcgccuccaagaucaucacgcugaagaagcgcuggcagcucgcgcugagcaagggcgugcacuucgugugcaaccugcuccugcuguucgucaccguguacucccaccuccugcugguggccgccgggcucgaggcccccuuccuguaccuguacgcgcucgucuacuuccugcagagcaucaacuucgugcggaucaucaugcgccuguggcucugcuggaagugccgguccaagaacccccugcuguacgacgccaacuacuuccucugcuggcacaccaacugcuacgacuacugcaucccguacaacagcgugaccuccagcaucgucaucacguccggcgacggcaccaccagccccaucuccgagcacgacuaccagaucgggggcuacaccgagaagcgcgagagcggggugaaggacugcgugguccugcacuccuacuucacgagcgacuacuaccagcuguacuccacccagcucagcaccgacaccggcguggagcacgugacguucuucaucuacaacaagaucgucgacgagcccgaggagcacgugcagauccacaccaucgacggguccagcggcguggucaaccccgugauggagccgaucuacgacgagcccaccaccacgaccagcgugccccuguga

SEQ ID NO: 18776 - RNA, 828 nt, Artificial Sequence
  SARS-CoV-2__MT642186.1__ORF3a protein CDS gc
auggaccuguucaugcgcaucuucaccaucggcaccgugacgcucaagcagggggagaucaaggacgccacccugagcgacuucguccgggccaccgcgaccauccccauccaggccucccugccguucggcuggcucaucguggggguggcccugcuggccgucuuccacagcgccuccaagaucaucacgcucaagaagcgcuggcagcuggcgcugagcaagggcgugcacuucgugugcaaccuccugcugcuguucgucaccguguacucccaccuccugcucguggccgccgggcuggaggcccccuuccuguaccucuacgcgcuggucuacuuccugcagagcaucaacuucgugcggaucaucaugcgccucuggcugugcuggaagugccgguccaagaacccccugcucuacgacgccaacuacuuccugugcuggcacaccaacugcuacgacuacugcauccccuacaacagcgugaccuccagcaucgucaucacguccggcgacggcaccaccagcccgaucuccgagcacgacuaccagaucgggggcuacaccgagaagugggagagcggggugaaggacugcgugguccugcacuccuacuucacgagcgacuacuaccagcucuacuccacccagcugagcaccgacaccggcguggagcacgugacguucuucaucuacaacaagaucgucgacgagcccgaggagcacgugcagauccacaccaucgacggguccagcggcguggucaaccccgugauggagcccaucuacgacgagccgaccaccacgaccagcgugccccuguga

SEQ ID NO: 18777 - RNA, 828 nt, Artificial Sequence
  SARS-CoV-2__MT642305.1__ORF3a protein CDS gc
auggaccuguucaugcgcaucuucaccaucggcaccgugacgcucaagcagggggagaucaaggacgccacccccagcgacuucguccgggccaccgcgaccaucccgauccaggccucccugcccuucggcuggcugaucguggggguggcccuccuggccgucuuccagagcgccuccaagaucaucacgcugaagaagcgcuggcagcucgcgcugagcaagggcgugcacuucgugugcaaccugcuccugcuguucgccaccgucuacucccaccuccugcugguggccgccgggcucgaggcgcccuuccuguacuucuacgcccugguguacuuccuccagagcaucaacuucguccggaucaucaugcgccuguggcugugcuggaagugccgguccaagaacccccuccuguacgacgccaacuacuuccugugcuggcacaccaacugcuacgacuacugcaucccguacaacagcgugaccuccagcaucgugaucacgcucggcgacggcaccaccucccccaucagcgagcacgacuaccagaucgggggcuacaccgagaagugggaguccggggucaaggacugcguggugcugcacagcuacuucacguccgacuacuaccagcuguacagcacccagcucuccaccgacaccggcgucgagcacgugacguucuucaucuacaacaagaucguggacgagcccgaggagcacguccagauccacaccaucgacgugagcuccgggguggucaaccccgugauggagccgaucuacgacgagcccaccaccacgaccagcgugccccuguga

SEQ ID NO: 18778 - RNA, 828 nt, Artificial Sequence
  SARS-CoV-2__MT642307.1__ORF3a protein CDS gc
auggaccuguucaugcgcaucuucaccaucggcaccgugacgcucaagcagggggagaucaaggacgccacccccagcgacuucguccgggccaccgcgaccaucccgauccaggccuccauccccuucggcuggcugaucguggggguggcccugcucgccgucuuccagagcgccuccaagaucaucacgcugaagaagcgcuggcagcuggcgcucagcaagggcgugcacuucgugugcaaccugcugcuccuguucgucaccguguacucccaccuccugcugguggccgccgggcuggaggcccccuuccucuaccuguacgcgcuggucuacuuccuccagagcaucaacuucgugcggaucaucaugcgccuguggcugugcuggaagugccgguccaagaacccccuccuguacgacgccaacuacuuccugugcuggcacaccaacugcuacgacuacugcaucccguacaacagcgugaccuccagcaucgucaucacguccggcgacggcaccaccagccccaucuccgagcacgacuaccagaucgggggcuacaccgagaagugggagagcggggugaaggacugcgugguccuccacuccuacuucacgagcgacuacuaccagcuguacuccacccagcugagcaccgacaccggcguggagcacgugacguucuucaucuacaacaagaucgucgacgagcccgaggagcacgugcagauccacaccaucgacggguccagcggcguggucaaccccgugauggagccgaucuacgacgagcccaccaccacgaccagcgugccccucuga

SEQ ID NO: 18779 - RNA, 828 nt, Artificial Sequence
  SARS-CoV-2__MT642356.1__ORF3a protein CDS gc
auggaccuguucaugcgcaucuucaccaucggcaccgugacgcucaagcagggggagaucaaggacgccacccccagcgacuucguccgggccaccgcgaccaucccgauccaggccucccugcccuucggcuggcugaucguggggguggcccuccuggccgucuuccagagcgccuccaagaucaucacgcugaagaagcgcuggcagcucgcgcugagcaagggcgugcacuucgugugcaaccugcuccugcuguucgucaccguguacucccaccuccugcugguggccgccgggcucgaggcccccuuccuguaccuguacgcgcucgucuacuuccugcagagcaucaacuucgugcggaucaucaugcgccuguggcucugcuggaagugccgguccaagaacccccugcuguacgacgccaacuacuuccucugcuggcacaccaacugcuacgacuacugcaucccguacaacagcgugaccuccagcaucgucaucacguccggcgacggcaccaccagccccaucuccgagcacgacuaccagaucgggggcuacaccgagaagugggagagcggggugaaggacugcgugguccugcacuccuacuucacgagcgacuacuaccagcuguacuccacccgccucagcaccgacaccggcguggagcacgugacguucuucaucuacaacaagaucgucgacgagcccgaggagcacgugcagauccacaccaucgacggguccagcggcguggucaaccccgugauggagccgaucuacgacgagcccaccaccacgaccagcgugccccuguga

SEQ ID NO: 18780 - RNA, 828 nt, Artificial Sequence
  SARS-CoV-2__MT642412.1__ORF3a protein CDS gc
auggaccuguucaugcgcaucuucaccaucggcaccgugacgcucaagcagggggagaucaaggacgccacccccagcgacuucguccgggccaccgcgaccaucccgauccaggccucccugcccuucggcuggcugaucguggggguggcccuccuggccgucuuccagagcgccuccaagaucaucacgcugaagaagcgcuggcagcucgcgcugagcaagggcgugcacuucgugugcaaccugcuccugcuguucgccaccgucuacucccaccuccugcugguggccgccgggcucgaggcgcccuuccuguaccuguacgcccucguguacuuccugcagagcaucaacuucguccggaucaucaugcgccuguggcucugcuggaagugccgguccaagaacccccugcuguacgacgccaacuacuuccucugcuggcacaccaacugcuacgacuacugcaucccguacaacagcgugaccuccagcaucgugaucacgcugggcgacggcaccaccucccccaucagcgagcacgacuaccagaucgggggcuacaccgagaagugggaguccggggucaaggacugcguggugcugcacagcuacuucacguccgacuacuaccagcucuacagcacccagcuguccaccgacaccggcgucgagcacgugacguucuucaucuacaacaagaucguggacgagcccgaggagcacguccagauccacaccaucgacgugagcuccgggguggucaaccccgugauggagccgaucuacgacgagcccaccaccacgaccagcgugccccuguga

SEQ ID NO: 18781 - RNA, 828 nt, Artificial Sequence
  SARS-CoV-2__MT635653.1__ORF3a protein CDS gc
auggaccuguucaugcgcaucuucaccaucggcaccgugacgcucaagcagggggagaucaaggacgccacccccagcgacuucguccgggccaccgcgaccaucccgauccaggccucccugcccuucggcuggcugaucguggggguggcccuccuggccgucuuccacagcgccuccaagaucaucacgcugaagaagcgcuggcagcucgcgcugagcaagggcgugcacuucgugugcaaccugcuccugcuguucgucaccguguacucccaccuccugcugguggccgccgggcucgaggcccccuuccuguaccuguacgcgcucgucuacuuccugcagagcaucaacuucgugcggaucaucaugcgccuguggcucugcuggaagugccgguccaagaacccccugcuguacgacgccaacuacuuccucugcuggcacaccaacugcuacgacuacugcaucccguacaacagcgugaccuccagcaucgucaucacguccggcgacggcaccaccagccccaucuccgagcacgacuaccacaucgggggcuacaccgagaagugggagagcggggugaaggacugcgugguccugcacuccuacuucacgagcgacugcuaccagcuguacuccacccagcucagcaccgacaccggcguggagcacgugacguucuucaucuacaacaagaucgucgacgagcccgaggagcacgugcagauccacaccaucgacggguccagcggcguggucaaccccgugauggagccgaucuacgacgagcccaccaccacgaccagcgugccccuguga

SEQ ID NO: 18782 - RNA, 828 nt, Artificial Sequence
  SARS-CoV-2__MT627609.1__ORF3a protein CDS gc
auggaccuguucaugcgcaucuucaccaucggcaccgugacgcucaagcagggggagaucaaggacgccacccccagcgacuucguccgggccaccgcgaccaucccgauccaggccucccugcccuucggcuggcugaucguggggguggcccuccuggccgucuuccagagcgccuccaagaucaucacgcugaagaagcgcuggcagcucgcgcugagcaagggcgugcacuucgugugcaaccugcuccugcuguucgucaccguguacucccaccuccugcugguggccgccgggcucgaggcccccuuccuguaccuguacgcgcucgucuacuuccugcagagcaucaacuucgugcggaucaucaugcgccuguggcucugcuggaagugccgguccaagaacccccugcuguacgacgccaacuacuuccucugcuggcacaccaacugcuacgacuacugcaucccguacaacagcgugaccuccagcaucgucaucacguccggcgacggcaccaccagccccaucuccgagcacgacuaccagaucgggggcuacaccgagaagugggagagcggggugaaggacugcaucgugcugcacuccuacuucacgagcgacuacuaccagcuguacuccacccagcucagcaccgacaccggcgucgagcacgugacguucuucaucuacaacaagaucguggacgagcccgaggagcacguccagauccacaccaucgacggguccagcggcguggugaaccccgucauggagccgaucuacgacgagcccaccaccacgaccagcgugccccuguga

SEQ ID NO: 18783 - RNA, 828 nt, Artificial Sequence
  SARS-CoV-2__MT627747.1__ORF3a protein CDS gc
auggaccuguucaugcgcaucuucaccaucggcaccgugacgcucaagcagggggagaucaaggacgccacccccagcgacuucguccgggccaccgcgaccaucccgauccaggccucccugcccuucggcuggcugaucguggggguggcccuccuggccgucuuccacagcgccuccaagaucaucacgcugaagaagcgcuggcagcucgcgcugagcaagggcgugcacuucgugugcaaccugcuccugcuguucgucaccguguacucccaccuccugcugguggccgccgggcucgaggcccccuuccuguaccuguacgcgcucgucuacuuccugcagagcaucaacuucgugcggaucaucaugcgccuguggcucugcuggaagugccgguccaagaacccccugcuguacgacgccaacuacuuccucugcuggcacaccaacugcuacgacuacugcaucccguacaacagcgugaccuccagcaucgucaucacguccggcgacggcaccaccagccccaucuccgagcacgacuaccagaucgggggcuacaccgagaagugggagagcggggugaaggacugcgugguccugcacuccuacuucacgagcgacuacuaccagcuguacuccacccagcucagcaccgacaccggcguggagcacgugacguucuucaucuacaacaagaucgucgacgagcccgaggagcacgugcagauccacaccaucgacggguccagcggcguggucaaccccgugauggagccgaucuacgacgagcccaccaccacgaucagcgugccccuguga

SEQ ID NO: 18784 - RNA, 828 nt, Artificial Sequence
  SARS-CoV-2__MT628095.1__ORF3a protein CDS gc
auggaccuguucaugcgcaucuucaccaucggcaccgugacgcucaagcagggggagaucaaggacgccacccccagcgacuucguccgggccaccgcgaccaucccgauccaggccucccugcccuucggcuggcugaucguggggguggcccuccuggccgucuuccagagcgccuccaagaucaucacgcugaagaagcgcuggcagcucgcgcugagcaagggcgugcacuucgugugcaaccugcuccugcuguucgucaccguguacucccaccuccugcugguggccgccgggcucgaggcccccuuccuguaccuguacgcgcucgucuacuuccugcagagcaucaacuucgugcggaucaucaugcgccuguggcucugcuggaagugccgguccaagaacccccugcuguacgacgccaacuacuuccucugcuggcacaccaacugcuacgacuacugcaucccguacaacagcgugaccuccagcaucgucaucacguccggcgacggcaccaccagccccaucuccgagcacgacuaccagaucgggggcuacaccgagaagugggagagcggggugaaggacugcgugguccugcacuccuacuucacgagcgacuacuaccagcuguacuccacccagcucagcaccgacaccggcguggagcacgugacguucuucaucuacaacaagaucgucgacgagcccgaggagcacgugcagauccacaccaucgacggguccagcggcguggucaaccccgugaaggagccgaucuacgacgagcccaccaccacgaccagcgugccccuguga

SEQ ID NO: 18785 - RNA, 828 nt, Artificial Sequence
  SARS-CoV-2__MT628180.1__ORF3a protein CDS gc
auggaccuguucaugcgcaucuucaccaucggcaccgugacgcucaagcagggggagaucaaggacgccacccccagcgacuucguccgggccaccgcgaccaucccgauccaggccucccugcccuucggcuggcugaucguggggguggcccuccuggccgucuuccagagcgccuccaagaucaucacgcugaagaagcgcuggcagcucgcgcugagcaagggcgugcacuucgugugcaaccugcuccugcuguucgucaccguguacucccaccuccugcugguggccgccgggcucgaggcccccuuccuguacuucuacgcgcuggucuacuuccuccagagcaucaacuucgugcggaucaucaugcgccuguggcugugcuggaagugccgguccaagaacccccuccuguacgacgccaacuacuuccugugcuggcacaccaacugcuacgacuacugcaucccguacaacagcgugaccuccagcaucgucaucacguccggcgacggcaccaccagccccaucuccgagcacgacuaccagaucgggggcuacaccgagaagugggagagcggggugaaggacugcgugguccuccacuccuacuucacgagcgacuacuaccagcuguacuccacccagcugagcaccgacaccggcguggagcacgugacguucuucaucuacaacaagaucgucgacgagcccgaggagcacgugcagauccacaccaucgacggguccagcggcguggucaaccccgugauggagccgaucuacgacgagcccaccaccacgaccagcgugccccucuga

SEQ ID NO: 18786 - RNA, 828 nt, Artificial Sequence
  SARS-CoV-2__MT628245.1__ORF3a protein CDS gc
auggaccuguucaugcgcaucuucaccaucggcaccgugacgcucaagcagggggagaucaaggacgccacccccagcgacuucguccgggccaccgcgaccaucccgauccaggccucccugcccuacggcuggcugaucguggggguggcccuccuggccgucuuccacagcgccuccaagaucaucacgcugaagaagcgcuggcagcucgcgcugagcaagggcgugcacuucgugugcaaccugcuccugcuguucgucaccguguacucccaccuccugcugguggccgccgggcucgaggcccccuuccuguaccuguacgcgcucgucuacuuccugcagagcaucaacuucgugcggaucaucaugcgccuguggcucugcuggaagugccgguccaagaacccccugcuguacgacgccaacuacuuccucugcuggcacaccaacugcuacgacuacugcaucccguacaacagcgugaccuccagcaucgucaucacguccggcgacggcaccaccagccccaucuccgagcacgacuaccagaucgggggcuacaccgagaagugggagagcggggugaaggacugcgugguccugcacuccuacuucacgagcgacuacuaccagcuguacuccacccagcucagcaccgacaccggcguggagcacgugacguucuucaucuacaacaagaucgucgacgagcccgaggagcacgugcagauccacaccaucgacggguccagcggcguggucaaccccgugauggagccgaucuacgacgagcccaccaccacgaccagcgugccccuguga

SEQ ID NO: 18787 - RNA, 828 nt, Artificial Sequence
  SARS-CoV-2__MT630422.1__ORF3a protein CDS gc
auggaccuguucaugcgcaucuucaccaucggcaccgugacgcucaagcagggggagaucaaggacgccacccccagcgacuucguccgggccaccgcgaccaucccgauccaggccucccugcccuucggcuggcugaucguggggguggcccuccuggccgucuuccagagcgccuccaagaucaucacgcugaagaagcgcuggcagcucgcgcugagcaagggcgugcacuucgugugcaaccugcuccugcuguucgccaccgucuacucccaccuccugcugguggccgccgggcucgaggcgcccuuccuguaccuguacgcccucguguacuuccugcagagcaucaacuucguccggaucaucaugcgccuguggcucugcuggaagugccgguccaagaacccccugcuguacgacgccaacuacuuccucugcuggcacaccaacugcuacgacuacugcaucccguacaacagcgugaccuccagcaucgugaucacguccggcgacggcaccaccagccccaucuccgagcacgacuaccagaucgggggcuacaccgagaagugggagagcggggucaaggacugcguggugcugcacuccuacuucacgagcgacuacuaccagcuguacuccacccagcucagcaccgacaccggcgucgagcacgugacguucuucaucuacaacaagaucguggacgagcccgaggagcacguccagauccacaccaucgacggguccagcggcguggugaaccccgucauggagccgaucuacgacgagcccaccaccacgaccagcgugccccuguga

SEQ ID NO: 18788 - RNA, 828 nt, Artificial Sequence
  SARS-CoV-2__MT632576.1__ORF3a protein CDS gc
auggaccuguucaugcgcaucuucaccaucggcaccgugacgcucaagcagggggagaucaaggacgccacccccagcgacuucguccgggccaccgcgaccaucccgauccaggccucccugcccuucggcuggcugaucguggggguggcccuccuggccgucuuccagagcgccuccaagaucaucacgcugaagaagcgcuggcagcucgcgcugagcaagggcgugcacuucgugugcaaccugcuccugcuguucgucaccguguacucccaccuccugcugguggccgccgggcucgaggcccccuuccuguaccuguacgcgcucgucuacuuccugcagagcaucaacuucgugcggaucaucaugcgccuguggcucugcuggaagugccgguccaagaacccccuguucuacgacgccaacuacuuccugugcuggcacaccaacugcuacgacuacugcaucccguacaacagcgugaccuccagcaucgucaucacguccggcgacggcaccaccagccccaucuccgagcacgacuaccagaucgggggcuacaccgagaagugggagagcggggugaaggacugcgugguccuccacuccuacuucacgagcgacuacuaccagcuguacuccacccagcugagcaccgacaccggcguggagcacgugacguucuucaucuacaacaagaucgucgacgagcccgaggagcacgugcagauccacaccaucgacggguccagcggcguggucaaccccgugauggagccgaucuacgacgagcccaccaccacgaccagcgugccccucuga

SEQ ID NO: 18789 - RNA, 828 nt, Artificial Sequence
  SARS-CoV-2__MT632795.1__ORF3a protein CDS gc
auggaccuguucaugcgcaucuucaccaucggcaccgugacgcucaagcagggggagaucaaggacgccacccccagcgacuucguccgggccaccgcgaccaucccgauccaggccucccugcccuucggcuggcugaucguggggguggcccuccuggccgucuuccagagcgccuccaagaucaucacgcugaagaagcgcuggcagcucgcgcugagcaagggcgugcacuucgugugcaaccugcuccugcuguucgucaccguguacucccaccuccugcugguggccgccgggcucgaggcccccuuccuguaccuguacgcgcucgucuacuuccugcagagcaucaacuucgugcggaucaucaugcgccuguggcucugcuggaagugccgguccaagaacccccugcuguacgacgccaacuacuuccucugcuggcacaccaacugcuacgacuacugcaucccguacaacagcgugaccuccagcaucgucaucacguccggcgacggcaccaccagccccaucuccgagcacgacuaccagaucgggggcuacaccgagaagugggagagcggggugaaggacugcgugguccugcacuccuacuucacgagcgacuacuaccagcuguacuccacccagcucagcaccgacaccggcguggagcacgugacguucuucaucuacaacaagaucgucgaggagcccgaggagcacgugcagauccacaccaucgacggguccagcggcguggucaaccccgugauggagccgaucuacgacgagcccaccaccacgaccagcgugccccuguga

SEQ ID NO: 18790 - RNA, 828 nt, Artificial Sequence
  SARS-CoV-2__MT632887.1__ORF3a protein CDS gc
auggaccuguucaugcgcaucuucaccaucggcaccgugacgcucaagcagggggagaucaaggacgccacccccagcgacuucguccgggccaccgcgaccaucccgauccaggccucccugcccuucggcuggcugaucguggggguggcccuccuggccgucuuccagagcgccuccaagaucaucacgcugaagaagcgcuggcagcucgcgcugagcaagggcgugcacuucgugugcaaccugcuccugcuguucgucaccguguacucccaccuccugcugguggccgccgggcucgaggcccccuuccuguaccuguacgcgcucgucuacuuccugcagagcaucaacuucgugcggaucaucaugcgccuguggcucugcuggaagugccgguccaagaacccccugcuguacgacgccaacuacuuccucugcuggcacaccaacugcuacgacuacugcaucccguacaacagcgugaccuucuccaucgucaucacgagcggcgacggcaccaccucccccaucagcgagcacgacuaccagaucgggggcuacaccgagaagugggaguccggggugaaggacugcgugguccugcacagcuacuucacguccgacuacuaccagcuguacagcacccagcucuccaccgacaccggcguggagcacgugacguucuucaucuacaacaagaucgucgacgagcccgaggagcacgugcagauccacaccaucgacgggagcuccggcguggucaaccccgugauggagccgaucuacgacgagcccaccaccacgaccagcgugccccuguga

SEQ ID NO: 18791 - RNA, 828 nt, Artificial Sequence
  SARS-CoV-2__MT632892.1__ORF3a protein CDS gc
auggaccuguucaugcgcaccuucaccaucggcacggugacccucaagcagggggagaucaaggacgccacccccagcgacuucguccgggccaccgcgacgaucccgauccaggccucccugcccuucggcuggcugaucguggggguggcccuccuggccgucuuccagagcgccuccaagaucaucacccugaagaagcgcuggcagcucgcgcugagcaagggcgugcacuucgugugcaaccugcuccugcuguucgucaccguguacucccaccuccugcugguggccgccgggcucgaggcccccuuccuguaccuguacgcgcucgucuacuuccugcagagcaucaacuucgugcggaucaucaugcgccuguggcucugcuggaagugccgguccaagaacccccugcuguacgacgccaacuacuuccucugcuggcacaccaacugcuacgacuacugcaucccguacaacagcgugacguccagcaucgucaucaccuccggcgacggcaccaccagccccaucuccgagcacgacuaccagaucgggggcuacacggagaagugggagagcggggugaaggacugcgugguccugcacuccuacuucaccagcgacuacuaccagcuguacuccacccagcucagcaccgacacgggcguggagcacgugaccuucuucaucuacaacaagaucgucgacgagcccgaggagcacgugcagauccacaccaucgacggguccagcggcguggucaaccccgugauggagccgaucuacgacgagcccaccacgaccaccagcgugccccuguga

SEQ ID NO: 18792 - RNA, 828 nt, Artificial Sequence
  SARS-CoV-2__MT614460.1__ORF3a protein CDS gc
auggaccuguucaugcgcaucuucaccaucggcaccgugacgcucaagcagggggagaucaaggacgccacccccagcgacuucguccgggccaccgcgaccaucccgauccaggccucccugcccuucggcuggcugaucguggggguggcccucuucgccgucuuccacagcgccuccaagaucaucacgcugaagaagcgcuggcagcuggcgcucagcaagggcgugcacuucgugugcaaccugcugcuccuguucgucaccguguacucccaccuccugcugguggccgccgggcuggaggcccccuuccucuaccuguacgcgcuggucuacuuccuccagagcaucaacuucgugcggaucaucaugcgccuguggcugugcuggaagugccgguccaagaacccccuccuguacgacgccaacuacuuccugugcuggcacaccaacugcuacgacuacugcaucccguacaacagcgugaccuccagcaucgucaucacguccggcgacggcaccaccagccccaucuccgagcacgacuaccagaucgggggcuacaccgagaagugggagagcggggugaaggacugcgugguccuccacuccuacuucacgagcgacuacuaccagcuguacuccacccagcugagcaccgacaccggcguggagcacgugacguucuucaucuacaacaagaucgucgacgagcccgaggagcacgugcagauccacaccaucgacggguccagcggcguggucaaccccgugauggagccgaucuacgacgagcccaccaccacgaccagcgugccccucuga

SEQ ID NO: 18793 - RNA, 828 nt, Artificial Sequence
  SARS-CoV-2__MT614496.1__ORF3a protein CDS gc
auggaccuguucaugcgcaucuucaucaucggcaccgugacccucaagcagggggagaucaaggacgccacgcccagcgacuucguccgggccaccgcgaccaucccgauccaggccucccugcccuucggcuggcugaucguggggguggcccuccuggccgucuuccacagcgccuccaagaucaucacccugaagaagcgcuggcagcucgcgcugagcaagggcgugcacuucgugugcaaccugcuccugcuguucgucacgguguacucccaccuccugcugguggccgccgggcucgaggcccccuuccuguaccuguacgcgcucgucuacuuccugcagagcaucaacuucgugcggaucaucaugcgccuguggcucugcuggaagugccgguccaagaacccccugcuguacgacgccaacuacuuccucugcuggcacaccaacugcuacgacuacugcaucccguacaacagcgugaccuccagcaucgucaucaccuccggcgacggcacgaccagccccaucuccgagcacgacuaccagaucgggggcuacaccgagaagugggagagcggggugaaggacugcgugguccugcacuccuacuucaccagcgacuacuaccagcuguacuccacgcagcucagcaccgacaccggcguggagcacgugaccuucuucaucuacaacaagaucgucgacgagcccgaggagcacgugcagauccacacgaucgacggguccagcggcguggucaaccccgugauggagccgaucuacgacgagcccaccaccaccacgagcgugccccuguga

SEQ ID NO: 18794 - RNA, 828 nt, Artificial Sequence
  SARS-CoV-2__MT620771.1__ORF3a protein CDS gc
auggaccuguucaugcgcaucuucaccaucggcaccgugacgcucaagcagggggagaucaaggacgccacccccagcgacuucguccgggccaccgcgaccaucccgauccaggccucccugcccuucggcuggcugaucguggggguggcccuccuggccgucuuccagagcgccuccaagaucaucacgcugaagaagcgcuggcagcucgcgcugagcaagggcgugcacuucgugugcaaccugcuccugcuguucgucaccguguacucccaccuccugcugguggccgccgggcucgaggcccccuuccuguaccuguacgcgcucgucuacuuccugcagagcgugaacuucgugcggaucaucaugcgccuguggcucugcuggaagugccgguccaagaacccccugcuguacgacgccaacuacuuccucugcuggcacaccaacugcuacgacuacugcaucccguacaacagcgucaccuccagcaucgugaucacguccggcgacggcaccaccagccccaucuccgagcacgacuaccagaucgggggcuacaccgagaagugggagagcggggugaaggacugcgucgugcugcacuccuacuucacgagcgacuacuaccagcuguacuccacccagcucagcaccgacaccggcguggagcacgucacguucuucaucuacaacaagaucguggacgagcccgaggagcacgugcagauccacaccaucgacggguccagcggcgucgugaaccccgugauggagccgaucuacgacgagcccaccaccacgaccagcgucccccuguga

SEQ ID NO: 18795 - RNA, 828 nt, Artificial Sequence
  SARS-CoV-2__MT622319.1__ORF3a protein CDS gc
auggaccuguucaugcgcaucuucaccaucggcaccgugacgcucaagcagggggagaucaaggacgccacccccagcgacuucguccgggccaucgcgaccaucccgauccaggccucccugcccuucggcuggcugaucguggggguggcccuccuggccgucuuccagagcgccuccaagaucaucacccugaagaagcgcuggcagcucgcgcugagcaagggcgugcacuucgugugcaaccugcuccugcuguucgucacgguguacucccaccuccugcugguggccgccgggcucgaggcccccuuccuguaccuguacgcgcucgucuacuuccugcagagcaucaacuucgugcggaucaucaugcgccuguggcucugcuggaagugccgguccaagaacccccugcuguacgacgccaacuacuuccucugcuggcacaccaacugcuacgacuacugcaucccguacaacagcgugaccuccagcaucgucaucaccuccggcgacggcacgaccagccccaucuccgagcacgacuaccagaucgggggcuacaccgagaagugggagagcggggugaaggacugcgugguccugcacuccuacuucaccagcgacuacuaccagcuguacuccacgcagcucagcaccgacaccggcguggagcacgugaccuucuucaucuacaacaagaucgucgacgagcccgaggagcacgugcagauccacacgaucgacggguccagcggcguggucaaccccgugauggagccgaucuacgacgagcccaccaccaccacgagcgugccccuguga

SEQ ID NO: 18796 - RNA, 828 nt, Artificial Sequence
  SARS-CoV-2__MT601290.1__ORF3a protein CDS gc
auggaccuguucaugcgcaucuucaccaucggcaccgugacgcucaagcagggggagaucaaggacgccacccccagcgacuucguccgggccaccgcgaccaucccgauccaggccucccugcccuucggcuggcugaucguggggguggcccuccuggccgucuuccagagcgccuccaagaucaucacgcugaagaagcgccuccagcuggcgcugagcaagggcgugcacuucgugugcaaccuccugcugcuguucgucaccguguacucccaccuccugcucguggccgccgggcuggaggcccccuuccuguaccucuacgcgcuggucuacuuccugcagagcaucaacuucgugcggaucaucaugcgccucuggcugugcuggaagugccgguccaagaacccccugcucuacgacgccaacuacuuccugugcuggcacaccaacugcuacgacuacugcaucccguacaacagcgugaccuccagcaucgucaucacguccggcgacggcaccaccagccccaucuccgagcacgacuaccagaucgggggcuacaccgagaagugggagagcggggugaaggacugcgugguccugcacuccuacuucacgagcgacuacuaccagcucuacuccacccagcugagcaccgacaccggcguggagcacgugacguucuucaucuacaacaagaucgucgacgagcccgaggagcacgugcagauccacaccaucgacggguccagcggcguggucaaccccgugauggagccgaucuacgacgagcccaccaccacgaccagcgugccccuguga

SEQ ID NO: 18797 - RNA, 828 nt, Artificial Sequence
  SARS-CoV-2__MT584997.1__ORF3a protein CDS gc
auggaccuguucaugcgcaucuucaccaucggcaccgugacgcucaagcagggggagaucaaggacgccaccagcuccgacuucguccgggccaccgcgaccauccccauccaggccagccugccguucggcuggcugaucguggggguggcccuccuggccgucuuccaguccgccagcaagaucaucacgcugaagaagcgcuggcagcucgcgcuguccaagggcgugcacuucgugugcaaccugcuccugcuguucgucaccguguacagccaccuccugcugguggccgccgggcucgaggcccccuuccuguaccuguacgcgcucgucuacuuccugcaguccaucaacuucgugcggaucaucaugcgccuguggcucugcuggaagugccggagcaagaacccccugcuguacgacgccaacuacuuccucugcuggcacaccaacugcuacgacuacugcauccccuacaacuccgugaccagcuccaucgucaucacgagcggcgacggcaucaccuccccgaucagcgagcacgacuaccagaucgggggcuacaccgagaagugggaguccggggugaaggacugcgugguccugcacagcuacuucaccuccgacuacuaccagcuguacagcacgcagcucuccaccgacaccggcguggagcacgugaccuucuucaucuacaacaagaucgucgacgagcccgaggagcacgugcagauccacacgaucgacgggagcagcggcguggucaaccccgugauggagcccaucuacgacgagccgaccaccaccacguccgugccccuguga

SEQ ID NO: 18798 - RNA, 828 nt, Artificial Sequence
  SARS-CoV-2__MT585093.1__ORF3a protein CDS gc
auggaccuguucaugcgcaucuucaccaucggcaccgugacgcucaagcagggggagaucaaggacgccacccccagcgacuucguccgggccaccgcgaccaucccgauccaggccucccugcccuucggcuggcugaucguggggguggcccuccuggccgucuuccacagcgccuccaagaucaucacgcugaagaagcgcugccagcucgcgcugagcaagggcgugcacuucgugugcaaccugcuccugcuguucgucaccguguacucccaccuccugcugguggccgccgggcucgaggcccccuuccuguaccuguacgcgcucgucuacuuccugcagagcaucaacuucgugcggaucaucaugcgccuguggcucugcuggaagugccgguccaagaacccccugcuguacgacgccaacuacuuccucugcuggcacaccaacugcuacgacuacugcaucccguacaacagcgugaccuccagcaucgucaucacguccggcgacggcaccaccagccccaucuccgagcacgacuaccagaucgggggcuacaccgagaagugggagagcggggugaaggacugcgugguccugcacuccuacuucacgagcgacuacuaccagcuguacuccacccagcucagcaccgacaccggcguggagcacgugacguucuucaucuacaacaagaucgucgacgagcccgaggagcacgugcagauccacaccaucgacggguccagcggcguggucaaccccgugauggagccgaucuacgacgagcccaccaccacgaccagcgugccccuguga

SEQ ID NO: 18799 - RNA, 828 nt, Artificial Sequence
  SARS-CoV-2__MT585094.1__ORF3a protein CDS gc
auggaccuguucaugcgcaucuucaccaucggcaccgugacgcucaagcagggggagaucaaggacgccacccccagcgacuucguccgggccaccgcgaccaucccgauccaggccucccugcccuucggcuggcugaucguggggguggcccuccuggccgucuuccacagcguguccaagaucaucacgcugaagaagcgcuggcagcucgcccugagcaagggcgugcacuucgucugcaaccugcuccugcuguucgugaccguguacucccaccuccugcuggucgcggccgggcucgaggcccccuuccuguaccuguacgcccucguguacuuccugcagagcaucaacuucgugcggaucaucaugcgccuguggcucugcuggaagugccgguccaagaacccccugcuguacgacgcgaacuacuuccucugcuggcacaccaacugcuacgacuacugcaucccguacaacagcgucaccuccagcaucgugaucacguccggcgacggcaccaccagccccaucuccgagcacgacuaccagaucgggggcuacaccgagaagugggagagcggggugaaggacugcgucgugcugcacuccuacuucacgagcgacuacuaccagcuguacuccacccagcucagcaccgacaccggcguggagcacgucacguucuucaucuacaacaagaucguggacgagcccgaggagcacgugcagauccacaccaucgacggguccagcggcgucgugaaccccgugauggagccgaucuacgacgagcccaccaccacgaccagcgucccccuguga

SEQ ID NO: 18800 - RNA, 828 nt, Artificial Sequence
  SARS-CoV-2__MT578015.1__ORF3a protein CDS gc
auggaccuguucaugcgcaucuucaccaucggcaccgugacgcucaagcagggggagaucaaggacgccacccccagcgacuucguccgggccaccgcgaccaucccgauccaggccucccugcccuucggcuggcugaucguggggguggcccuccuggccgucuuccagagcgccuccaagaucaucacgcugaagaagcgcuggcagcucgcgcugagcaagggcgugcacuucgugugcaaccugcuccugcuguucgucaccguguacucccaccuccugcugguggccgccgggcucgaggcccccuuccuguaccuguacgcgcucgucuacuuccugcagagcaucaacuucgugcggaucaucaugcgccuguggcucugcuggaagugccgguccaagaacccccugcuguacgacgccaacuacuuccucugcuggcacaccaacugcuacgacuacugcaucccguacaacagcgugaccuccagcaucgucaucacguccggcgacggcaccaccagccccaucuccgagcacgacuaccagaucgggggcuacaccgagaagugggagagcgggcugaaggacugcguggugcugcacuccuacuucacgagcgacuacuaccagcucuacuccacccagcugagcaccgacaccggcgucgagcacgugacguucuucaucuacaacaagaucguggacgagcccgaggagcacguccagauccacaccaucgacggguccagcggcguggugaaccccgucauggagccgaucuacgacgagcccaccaccacgaccagcgugccccuguga

SEQ ID NO: 18801 - RNA, 828 nt, Artificial Sequence
  SARS-CoV-2__MT520329.1__ORF3a protein CDS gc
auggaccuguucaugcgcaucuucaccaucggcaccgugacgcucaagcagggggagaucaaggacgccacccccagcgacuucguccgggccaccgcgaccaucccgauccaggccucccugcccuucggcuggcugaucguggggguggcccuccuggccgucuuccacagcgccuccaagaucaucacgcugaagaagcgcuggcagcucgcgcugagcaagggcgugcacuucgugugcaaccugcuccugcuguucgucaccguguacucccaccuccugcugguggccgccgggcucgaggcccccuuccuguacuucuacgcgcuggucuacuuccuccagagcaucaacuucgugcggaucaucaugcgccuguggcugugcuggaagugccgguccaagaacccccuccuguacgacgccaacuacuuccugugcuggcacaccaacugcuacgacuacugcaucccguacaacagcgugaccuccagcaucgucaucacguccggcgacggcaccaccagccccaucuccgagcacgacuaccagaucgggggcuacaccgagaagugggagagcggggugaaggacugcgugguccuccacuccuacuucacgagcgacuacuaccagcuguacuccacccagcugagcaccgacaccggcguggagcacgugacguucuucaucuacaacaagaucgucgacgagcccgaggagcacgugcagauccacaccaucgacggguccagcggcguggucaaccccgugauggagccgaucuacgacgagcccaccaccacgaccagcgugccccucuga

SEQ ID NO: 18802 - RNA, 828 nt, Artificial Sequence
  SARS-CoV-2__MT520484.1__ORF3a protein CDS gc
auggaccuguucaugcgcaucuucaccaucggcaccgugacgcucaagcagggggagaucaaggacgccacccccagcgacuucguccgggccaccgcgaccaucccgauccaggccucccugcccuucggcuggcugaucguggggguggcccuccuggccgucuuccacagcgccuccaagaucaucacgcugaagaagcgcuggcagcucgcgcugagcaagggcgugcacuucgugugcaaccugcuccugcuguucgucaccguguacucccaccuccugcugguggccgccgggcucgaggcccccuuccuguaccuguacgcgcucgucuacuuccugcagagcaucaacuucgugcggaucaucaugcgccuguggcucugcuggaagugcugcuccaagaacccccugcuguacgacgccaacuacuuccucugcuggcacaccaacugcuacgacuacugcaucccguacaacagcgugaccuccagcaucgucaucacguccggcgacggcaccaccagccccaucuccgagcacgacuaccagaucgggggcuacaccgagaagugggagagcggggugaaggacugcgugguccugcacuccuacuucacgagcgacuacuaccagcuguacuccacccagcucagcaccgacaccggcguggagcacgugacguucuucaucuacaacaagaucgucgacgagcccgaggagcacgugcagauccacaccaucgacggguccagcggcguggucaaccccgugauggagccgaucuacgacgagcccaccaccacgaccagcgugccccuguga

SEQ ID NO: 18803 - RNA, 828 nt, Artificial Sequence
  SARS-CoV-2__MT520492.1__ORF3a protein CDS gc
auggaccuguucaugcgcaucuucaccaucggcaccgugacgcucaagcagggggagaucaaggacgccacccccagcgacuucguccgggccaccgcgaccaucccgauccaggccucccugcccuucggcuggcugaucguggggguggcccuccuggccgucuuccacagcgccuccaagaucaucacgcugaagaagcgcuggcagcucgcgcugagcaagggcgugcacuucgugugcaaccugcuccugcuguucgucaccguguacucccaccuccugcugguggccgccgggcucgaggcccccuuccuguaccuguacgcgcucgucuacuuccugcagagcaucaacuucgugcggaucaucaugcgccuguggcucugcuggaagugccgguccaagaacccccugcuguacgacgccaacuacuuccucugcuggcacaccaacugcuacgacuacugcaucccguacaacagcgugaccuccagcaucgucaucacguccggcgacggcaccaccagccccaucuccgagcacgacuaccagaucgggggcuacaccgagaagugggagagcggggugaaggacugcgugguccugcacuccuacuucacgagcgacuacuaccagcuguacuccacccagcucagcaccgacaccggcguggagcacgugacguucuucaucuacaacaagaucgucaacgagcccgaggagcacgugcagauccacaccaucgacggguccagcggcguggucaaccccgugauggagccgaucuacgacgagcccaccaccacgaccagcgugccccuguga

SEQ ID NO: 18804 - RNA, 828 nt, Artificial Sequence
  SARS-CoV-2__MT520523.1__ORF3a protein CDS gc
auggaccuguucaugcgcaucuucaccaucggcaccgugacgcucaagcagggggagaucaaggacgccacccccagcgacuucguccgggccaccgcgaccaucccgauccaggccucccugcccuucggcuggcugaucguggggguggcccuccuggccgucuuccagagcgccuccaagaucaucacgcugaagaagcgcuggcagcucgcgcugagcaagggcgugcacuucgugugcaaccugcuccugcuguucgucaccguguacucccaccuccugcugguggccgccgggcucgaggcccccuuccuguaccuguacgcgcucgucuacuuccugcagagcaucaacuucgugcggaucaucaugcgccuguggcucugcuggaagugccgguccaagaacccccugcuguacgacgccaacuacuuccucugcuggcacaccaacugcuacgacuacugcaucccguacaacagcgugaccuccagcaucgucaucacguccggcgacggcaccaccagccccaucuccgagcacgacuaccagaucgggggcuacaccgagaagugggagagccgcgugaaggacugcgugguccugcacuccuacuucacgagcgacuacuaccagcuguacuccacccagcucagcaccgacaccgggguggagcacgugacguucuucaucuacaacaagaucgucgacgagcccgaggagcacgugcagauccacaccaucgacggcuccagcgggguggucaaccccgugauggagccgaucuacgacgagcccaccaccacgaccagcgugccccuguga

SEQ ID NO: 18805 - RNA, 828 nt, Artificial Sequence
  SARS-CoV-2__MT520543.1__ORF3a protein CDS gc
auggaccuguucaugcgcaucuucaccaucggcaccgugacgcucaagcagggggagaucaaggacgccacccccagcgacuucguccgggccaccgcgaccaucccgauccaggccucccugcccuucggcuggcugaucguggggguggcccuccuggccgucuuccacagcgccuccaagaucaucacgcugaagaagcgcuggcagcucgcgcugagcaagggcgugcacuucgugugcaaccugcuccugcuguucgucaccguguacucccaccuccugcugguggccgccgggcucgaggcccccuuccuguaccuguacgcgcucgucuacuuccugcagagcaucaacuucgugcggaucaucaugcgccuguggcucugcuggaagugccgguccaagaacccccugcuguacgacgccaacuacuuccucugcuggcacaccaacugcuacgacuacugcaucccguacaacagcgugaccuccagcaucgucaucacguccggcgacggcaccaccagccccaucuccgagcacgacuaccagaucgggggcuacaccgagaagugggagagcggggugaaggacugcgugguccugcacuccuacuucacgagcgacuacuaccagcugcacuccacccagcucagcaccgacaccggcguggagcacgugacguucuucaucuacaacaagaucgucgacgagcccgaggagcacgugcagauccacaccaucgacggguccagcggcguggucaaccccgugauggagccgaucuacgacgagcccaccaccacgaccagcgugccccuguga

SEQ ID NO: 18806 - RNA, 828 nt, Artificial Sequence
  SARS-CoV-2__MT557568.1__ORF3a protein CDS gc
auggaccuguucaugcgcaucuucaccaucggcaccgugacgcucaagcagggggagaucaaggacgccacccccagcgacuucguccgggccaccgcgaccaucccgauccaggccucccugcccuucggcuggcugaucguggggguggcccuccuggccgucugccagagcgccuccaagaucaucacgcugaagaagcgcuggcagcucgcgcugagcaagggcgugcacuucgugugcaaccugcuccugcuguucgucaccguguacucccaccuccugcugguggccgccgggcucgaggcccccuuccuguaccuguacgcgcucgucuacuuccugcagagcaucaacuucgugcggaucaucaugcgccuguggcucugcuggaagugccgguccaagaacccccugcuguacgacgccaacuacuuccucugcuggcacaccaacugcuacgacuacugcaucccguacaacagcgugaccuccagcaucgucaucacguccggcgacggcaccaccagccccaucuccgagcacgacuaccagaucgggggcuacaccgagaagugggagagcggggugaaggacugcgugguccugcacuccuacuucacgagcgacuacuaccagcuguacuccacccagcucagcaccgacaccggcguggagcacgugacguucuucaucuacaacaagaucgucgacgagcccgaggagcacgugcagauccacaccaucgacggguccagcggcguggucaaccccgugauggagccgaucuacgacgagcccaccaccacgaccagcgugccccuguga

SEQ ID NO: 18807 - RNA, 828 nt, Artificial Sequence
  SARS-CoV-2__MT558689.1__ORF3a protein CDS gc
auggaccuguucaugcgcaucuucaccaucggcaccgugacgcucaagcagggggagaucaaggacgccacccccagccacuucguccgggccaccgcgaccaucccgauccaggccucccugcccuucggcuggcugaucguggggguggcccuccuggccgucuuccagagcgccuccaagaucaucacgcugaagaagcgcuggcagcucgcgcugagcaagggcgugcacuucgugugcaaccugcuccugcuguucgucaccguguacucccaccuccugcugguggccgccgggcucgaggcccccuuccuguaccuguacgcgcucgucuacuuccugcagagcaucaacuucgugcggaucaucaugcgccuguggcucugcuggaagugccgguccaagaacccccugcuguacgacgccaacuacuuccucugcuggcacaccaacugcuacgacuacugcaucccguacaacagcgugaccuccagcaucgucaucacguccggcgacggcaccaccagccccaucuccgagcacgacuaccagaucgggggcuacaccgagaagugggagagcggggugaaggacugcgugguccugcacuccuacuucacgagcgacuacuaccagcuguacuccacccagcucagcaccgacaccggcguggagcacgugacguucuucaucuacaacaagaucgucgacgagcccgaggagcacgugcagauccacaccaucgacggguccagcggcguggucaaccccgugauggagccgaucuacgacgagcccaccaccacgaccagcgugccccuguga

SEQ ID NO: 18808 - RNA, 828 nt, Artificial Sequence
  SARS-CoV-2__MT558698.1__ORF3a protein CDS gc
auggaccuguucaugcgcaucuucaccaucggcaccgugacgcucaagcagggggagaucaaggacgccacccccagcgacuucguccgggccaccgcgaccaucccgauccccgccucccugcccuucggcuggcugaucguggggguggcccuccuggccgucuuccagagcgccuccaagaucaucacgcugaagaagcgcuggcagcucgcgcugagcaagggcgugcacuucgugugcaaccugcuccugcuguucgucaccguguacucccaccuccugcugguggccgccgggcucgaggcccccuuccuguaccuguacgcgcucgucuacuuccugcagagcaucaacuucgugcggaucaucaugcgccuguggcucugcuccaagugccggagcaagaacccgcugcuguacgacgccaacuacuuccucugcuggcacaccaacugcuacgacuacugcauccccuacaacuccgugaccagcuccaucgucaucacgagcggcgacggcaccaccucccccaucagcgagcacgacuaccagaucgggggcuacaccgagaagugggaguccggggugaaggacugcgugguccugcacagcuacuucacguccgacuacuaccagcuguacagcacccagcucuccaccgacaccggcguggagcacgugacguucuucaucuacaacaagaucgucgacgagcccgaggagcacgugcagauccacaccaucgacgggagcagcggcguggucaacccggugauggagcccaucuacgacgagcccaccaccacgaccuccgugccccuguga

SEQ ID NO: 18809 - RNA, 828 nt, Artificial Sequence
  SARS-CoV-2__MT559801.1__ORF3a protein CDS gc
auggaccuguucaugcgcaucuucaccaucggcaccgugacgcucaagcagggggagaucaaggacgccacccccagcgacuucguccgggccaccgcgaccaucccgauccaggccucccugcccuucggcuggcugaucguggggguggcccuccuggccgucuuccacagcgccuccaagaucaucacgcugaagaagcgcuggcagcucgcgcugagcaagggcgugcacuucgugugcaaccugcuccugcuguucgucaccguguacucccaccuccugcugguggccgccgggcucgaggcccccuuccuguaccuguacgcgcucgucuacuuccugcagagcaucaacuucgugcggaucaucaugcgccuguggcucugcuggaagugccgguccaagaacccccugcuguacgacgccaacuacuuccucugcuggcacaccaacugcuacgacuacugcaucccguacaacagcgugaccuccagcaucgucaucacguccggcgacggcaccaccagccccaucuccgagcacgacuaccagaucgggggcuacaccgagaagugggagagcggggugaaggacugcgugguccugcacuccuacuucacgagcgacuacuaccagcuguacuccacccagcucagcaccgacaccggcguggagcacgugacguucuucaucuacaacaagaucgucgacgagcccgaggagcacgugcugauccacaccaucgacggguccagcggcguggucaaccccgugauggagccgaucuacgacgagcccaccaccacgaccagcgugccccuguga

SEQ ID NO: 18810 - RNA, 828 nt, Artificial Sequence
  SARS-CoV-2__MT528627.1__ORF3a protein CDS gc
auggaccuguucaugcgcaucuucaccaucggcaccgugacgcucaagcagggggagaucaaggacgccacccccagcgacuucguccgggccaccgcgaccaucccgauccaggccucccugcccuucggcuggcugaucguggggguggcccuccuggccgucuuccagagcgccuccaagaucaucacgcugaagaagcgcuggcagcucgcgcugagcaagggcgugcacuucgugugcaaccugcuccugcuguucgucaccguguacucccacccccuccuggccgccgccgggcuggaggcgcccuuccucuaccuguacgcccugguguacuuccuccagagcaucaaccugguccggaucaucaugcgccuguggcucugcuggaagugccgguccaagaacccgcugcuguacgacgccaacuacuuccucugcuggcacaccaacugcuacgacuacugcauccccuacaacagcgugaccuccagcaucgugaucacguccggcgacggcaccaccagccccaucuccgagcacgacuaccagaucgggggcuacaccgagaagugggagagcggggucaaggacugcguggugcugcacuccuacuucacgagcgacuacuaccagcuguacuccacccagcucagcaccgacaccggcgucgagcacgugacguucuucaucuacaacaagaucguggacgagcccgaggagcacguccagauccacaccaucgacggguccagcggcguggugaacccggucauggagcccaucuacgacgagcccaccaccacgaccagcgugccccuguga

SEQ ID NO: 18811 - RNA, 828 nt, Artificial Sequence
  SARS-CoV-2__MT533223.1__ORF3a protein CDS gc
auggaccuguucaugcgcaucuucaccaucggcaccgugacgcucaagcagggggagaucaaggacgccacccccagcgacuucguccgggccaccgcgaccaucccgauccaggccucccugcccuucggcuggcugaucguggggguggcccuccuggccgucuuccagagcgccuccaagaucaucacgcugaagaagcgcuggcagcucgcgcugagcaagggcgugcacuucgugugcaaccugcuccugcuguucgucaccguguacucccaccuccugcugguggccgccgggcucgaggcccccuuccuguaccuguacgcgcucgucuacuuccugcagagcaucaacuucgugcggaucaucaugcgccugcuccugugcuggaagugccgguccaagaacccccugcucuacgacgccaacuacuuccugugcuggcacaccaacugcuacgacuacugcaucccguacaacagcgugaccuccagcaucgucaucacguccggcgacggcaccaccagccccaucuccgagcacgacuaccagaucgggggcuacaccgagaagugggagagcggggugaaggacugcgugguccugcacuccuacuucacgagcgacuacuaccagcucuacuccacccagcugagcaccgacaccggcguggagcacgugacguucuucaucuacaacaagaucgucgacgagcccgaggagcacgugcagauccacaccaucgacggguccagcggcguggucaaccccgugauggagccgaucuacgacgagcccaccaccacgaccagcgugccccuguga

SEQ ID NO: 18812 - RNA, 828 nt, Artificial Sequence
  SARS-CoV-2__MT533225.1__ORF3a protein CDS gc
auggaccuguucaugcgcaucuucaccaucggcaccgugacgcucaagcagggggagaucaaggacgccacccccagcgacuucguccgggccaccgcgaccaucccgauccaggccucccugcccuucggcuggcugaucguggggguggccauccucgccgucuuccacagcgccuccaagaucaucacgcugaagaagcgcuggcagcuggcgcucagcaagggcgugcacuucgugugcaaccugcugcuccuguucgucaccguguacucccaccuccugcugguggccgccgggcuggaggcccccuuccucuaccuguacgcgcuggucuacuuccuccagagcaucaacuucgugcggaucaucaugcgccuguggcugugcuggaagugccgguccaagaacccccuccuguacgacgccaacuacuuccugugcuggcacaccaacugcuacgacuacugcaucccguacaacagcgugaccuccagcaucgucaucacguccggcgacggcaccaccagccccaucuccgagcacgacuaccagaucgggggcuacaccgagaagugggagagcggggugaaggacugcgugguccuccacuccuacuucacgagcgacuacuaccagcuguacuccacccagcugagcaccgacaccggcguggagcacgugacguucuucaucuacaacaagaucgucgacgagcccgaggagcacgugcagauccacaccaucgacggguccagcggcguggucaaccccgugauggagccgaucuacgacgagcccaccaccacgaccagcgugccccucuga

SEQ ID NO: 18813 - RNA, 828 nt, Artificial Sequence
  SARS-CoV-2__MT517425.1__ORF3a protein CDS gc
auggaccuguucaugcgcaucuucaccaucggcaccgugacgcucaagcagggggagaucaaggacgccacccccagcgacuucguccgggccaccgcgaccaucccgauccaggccucccugcccuucggcuggcugaucguggggguggcccuccuggccgucuuccagagcgccuccaagaucaucacgcugaagaagcgcuggcagcucgcgcugagcaagggcgugcacuucgugugcaaccugcuccugcuguucgucaccguguacucccaccuccugcugguggccgccgggcucgaggcccccuuccuguaccuguacgcgcucgucuacuuccugcagagcaucaacuucgugcggaucaucaugcgccuguggcucugcuggaagugccgguccaagaacccccugcuguacgacgccaacuacuuccucugcuggcacaccaacugcuacgacuacugcaucccguacaacagcgugaccuccagcaucgucaucacguccggcgacggcaccaccagccccaucuccgagcacgacuaccagaucgggggcuacaccgagaagugcgagagcggggugaaggacugcgugguccugcacuccuacuucacgagcgacuacuaccagcuguacuccacccagcucagcaccgacaccggcguggagcacgugacguucuucaucuacaacaagaucgucgacgagcccgaggagcacgugcagauccacaccaucgacggguccagcggcguggucaaccccgugauggagccgaucuacgacgagcccaccaccacgaccagcgugccccuguga

SEQ ID NO: 18814 - RNA, 828 nt, Artificial Sequence
  SARS-CoV-2__MT512443.1__ORF3a protein CDS gc
auggaccuguucaugcgcaucuucaccaucggcaccgugacgcucaagcagggggagaucaaggacgccacccccagcgacuucguccgggccaccgcgaccaucccgauccaggccucccugcccuucggcuggcugaucguggggguggcccuccuggccgucuuccagagcgccuccaagaucaucacgcugaagaagcgcuggcagcucgcgcugagcaagggcgugcacuucgugugcaaccugcuccugcuguucgucaccguguacucccaccuccugcugguggccgccgggcucgaggcccccuuccuguaccuguacgcgcucgucuacuuccugcagagcaucaacuucgugcggaucaucaugcgccuguggcucugcuggaagugccgguccaagaacccccugcuguacgacgccaacuacuuccucugcuggcacaccaacugcuacgacuacugcaucccguacaacagcgugaccuccagcaucgucaucacguccggcgacggcaccaccagccccaucuccgagcacgacuaccagaucgggggcuacaccgagaagugggagagcggggugaaggacugcgugguccugcacuccuacuucacgagcgacuacuaccagcuguacuccacccagcucagcaccgacaccggcguggagcacgugacguucuucaucuacaacaagaucgucgacgagcccgaggagcacgugcagauccacaccaucgacggguccagcggcguggucaaccccgugauggagccgaucuacgacgagcccaccaccacgaucagcgugccccuguga

SEQ ID NO: 18815 - RNA, 828 nt, Artificial Sequence
  SARS-CoV-2__MT509471.1__ORF3a protein CDS gc
auggaccuguucaugcgcaucuucaccaucggcaccgugacgcucaagcagggggagaucaaggacgccacccccagcgacuucguccgggccaccgcgaccaucccgauccaggccucccugcccuucggcuggcugaucguggggguggcccuccuggccgucuuccacagcgccuccaagaucaucacgcugaagaagcgcuggcagcucgcgcugagcaagggcgugcacuucgugugcaaccugcuccugcuguucgucaccguguacucccaccuccugcugguggccgccgggcucgaggcccccuuccuguaccuguacgcccucuucuacuuccugcagagcaucaacuucguccggaucaucaugcgccuguggcucugcuggaagugccgguccaagaacccccugcuguacgacgcgaacuacuuccucugcuggcacaccaacugcuacgacuacugcaucccguacaacagcgugaccuccagcaucgugaucacguccggcgacggcaccaccagccccaucuccgagcacgacuaccagaucgggggcuacaccgagaagugggagagcggggucaaggacugcguggugcugcacuccuacuucacgagcgacuacuaccagcuguacuccacccagcucagcaccgacaccggcgucgagcacgugacguucuucaucuacaacaagaucguggacgagcccgaggagcacguccagauccacaccaucgacggguccagcggcguggugaaccccgucauggagccgaucuacgacgagcccaccaccacgaccagcgugccccuguga

SEQ ID NO: 18816 - RNA, 828 nt, Artificial Sequence
  SARS-CoV-2__MT509503.1__ORF3a protein CDS gc
auggaccuguucaugcgcaucuucaccaucggcaccgugacgcucaagcagggggagaucaaggacgccacccccagcgacuucguccgggccaccgcgaccacgccgauccaggccucccugcccuucggcuggcugaucguggggguggcccucuucgccgucuuccagagcgccuccaagaucaucacccugaagaagcgcuggcagcuggcgcucagcaagggcgugcacuucgugugcaaccugcugcuccuguucgucaccguguacucccaccuccugcugguggccgccgggcuggaggcccccuuccucuaccuguacgcgcuggucuacuuccuccagagcaucaacuucgugcggaucaucaugcgccuguggcugugcuggaagugccgguccaagaacccccuccuguacgacgccaacuacuuccugugcuggcacaccaacugcuacgacuacugcaucccguacaacagcgugacguccagcaucgucaucaccuccggcgacggcaccaccagccccaucuccgagcacgacuaccagaucgggggcuacacggagaagugggagagcggggugaaggacugcgugguccuccacuccuacuucaccagcgacuacuaccagcuguacuccacccagcugagcaccgacacgggcguggagcacgugaccuucuucaucuacaacaagaucgucgacgagcccgaggagcacgugcagauccacaccaucgacggguccagcggcguggucaaccccgugauggagccgaucuacgacgagcccaccacgaccaccagcgugccccucuga

SEQ ID NO: 18817 - RNA, 828 nt, Artificial Sequence
  SARS-CoV-2__MT506535.1__ORF3a protein CDS gc
auggaccuguucaugcgcaucuucaccaucggcaccgugacgcucaagcagggggagaucaaggacgccacccccagcgacuucguccgggccaccgcgaccaucccgauccaggccucccugcccuucggcuggcugaucguggggguggcccuccuggccgucuuccacagcgccuccaagaucaucacgcugaagaagcgcuggcagcucgcgcugagcaagggcgugcacuucgugugcaaccugcuccugcuguucgucaccguguacucccaccuccugcugguggccgccgggcucgaggcccccuuccuguaccuguacgcgcucgucuacuuccugcagagcaucaacuucgugcggaucaucaugcgccuguggcucugcuggaagugccgguccaagaacccccugcuguacgacgccaacuacuuccucugcuggcacaccaacugcuacgacuacugcaucccguacaacagcgugaccuccagcaucgucaucacguccggcgacggcaccaccagccccaucuccgagcacgacuaccagaucgggggcuacaccgagaagugggaguacggggugaaggacugcgugguccugcacagcuacuucacguccgacuacuaccagcuguacagcacccagcucuccaccgacaccggcguggagcacgugacguucuucaucuacaacaagaucgucgacgagcccgaggagcacgugcagauccacaccaucgacgggagcuccggcguggucaaccccgugauggagccgaucuacgacgagcccaccaccacgaccagcgugccccuguga

SEQ ID NO: 18818 - RNA, 828 nt, Artificial Sequence
  SARS-CoV-2__MT506907.1__ORF3a protein CDS gc
auggaccuguucaugcgcaucuucaccaucggcaccgugacgcucaagcagggggagaucaaggacgccacccccagcgacuucguccgggccaccgcgaccaucccgauccaggccucccugcccuucggcuggcugaucguggggguggcccuccuggccgucuuccagagcgccuccaagaucaucacgcugaagaagcgcuggcagcucgcgcugagcaagggcgugcacuucgugugcaaccugcuccugcuguucgucaccguguacucccaccuccugcugguggccgccgggcucgaggcccccuuccuguaccuguacgcgcucgucuacuuccugcagagcaucaacuucgugcggaucaucaugcgccuguggcucugcuggaagugccgguccaagaacccccugcuguacgacgccaacuacuuccucugcuggcacaccaacugcuacgacuacugcaucccguacaacagcgugaccuccagcaucgucaucacguccggcgacggcaccaccagccccaucuccgagcacgacuaccagaucgggggcuacaccgagaagugggagagcggggugaaggacugcgugguccugcacuccuacuucacgagcgacuacuaccagcuguacuccacccagcucagcaccgacaccggcguggagcacgugacguucuucaucuacaacaagaucgucgacgagcccgaggagcacgugcagauccacaccaucgacggguccagcggcguggucaaccccgugauggagccgaucugcgacgagcccaccaccacgaccagcgugccccuguga

SEQ ID NO: 18819 - RNA, 828 nt, Artificial Sequence
  SARS-CoV-2__MT481905.1__ORF3a protein CDS gc
auggaccuguucaugcgcaucuucaccaucggcaccgugacgcucaagcagggggagaucaaggacgccacccccagcgacuucguccgggccaccgcgaccaucccgauccaggccucccugcccuucggcuggcugaucguggggguggcccuccuggccgucuuccacagcgccuccaagaucaucacgcugaagaagcgcuggcagcucgcgcugagcaagggcgugcacuucgugugcaaccugcuccugugguucgucaccguguacucccaccuccugcugguggccgccgggcuggaggcccccuuccucuaccuguacgcgcuggucuacuuccuccagagcaucaacuucgugcggaucaucaugcgccuguggcugugcuggaagugccgguccaagaacccccuccuguacgacgccaacuacuuccugugcuggcacaccaacugcuacgacuacugcaucccguacaacagcgugaccuccagcaucgucaucacguccggcgacggcaccaccagccccaucuccgagcacgacuaccagaucgggggcuacaccgagaagugggagagcggggugaaggacugcgugguccuccacuccuacuucacgagcgacuacuaccagcuguacuccacccagcugagcaccgacaccggcguggagcacgugacguucuucaucuacaacaagaucgucgacgagcccgaggagcacgugcagauccacaccaucgacggguccagcggcguggucaaccccgugauggagccgaucuacgacgagcccaccaccacgaccagcgugccccucuga

SEQ ID NO: 18820 - RNA, 828 nt, Artificial Sequence
  SARS-CoV-2__MT496972.1__ORF3a protein CDS gc
auggaccuguucaugcgcaucuucaccaucggcaccgugacgcucaagcagggggagaucaaggacgccacccccagcgacuucguccgggccaccgcgaccaucccgauccaggccucccugcccuucggcuggcugaucguggggguggcccuccuggccgucuuccacagcgccuccaagaucaucacgcugaagaagcgcuggcagcucgcgcugagcaagggcuuccacuucgugugcaaccugcuccugcuguucgugaccgucuacucccaccuccugcugguggccgccgggcucgaggcccccuuccuguaccuguacgcgcucguguacuuccugcagagcaucaacuucguccggaucaucaugcgccuguggcucugcuggaagugccgguccaagaacccccugcuguacgacgccaacuacuuccucugcuggcacaccaacugcuacgacuacugcaucccguacaacagcgugaccuccagcaucgugaucacguccggcgacggcaccaccagccccaucuccgagcacgacuaccagaucgggggcuacaccgagaagugggagagcggggucaaggacugcguggugcugcacuccuacuucacgagcgacuacuaccagcuguacuccacccagcucagcaccgacaccggcgucgagcacgugacguucuucaucuacaacaagaucguggacgagcccgaggagcacguccagauccacaccaucgacggguccagcggcguggugaaccccgucauggagccgaucuacgacgagcccaccaccacgaccagcgugccccuguga

SEQ ID NO: 18821 - RNA, 828 nt, Artificial Sequence
  SARS-CoV-2__MT496974.1__ORF3a protein CDS gc
auggaccuguucaugcgcaucuucaccaucggcaccgugacgcucaagcagggggagaucaaggacgccacccccagcgacuucguccgggccaccgcgaccaucccgauccaggccucccugcccuucggcuggcugaucguggggguggcccuccuggccgucuuccacagcgccuccaagaucaucacgcugaagaagcgcuggcagcucgcgcugagcaagggcgugcacuucgugugcaaccugcuccugcuguucgucaccguguacucccaccuccugcugguggccgccgggcucgaggcccccuuccuguaccuguacgcgcucgucuacuuccugcagagcaucaacuucgugcggaucaucaugcgccuguggcucugcuggaagugccgguccaagaacccccugcuguacgacagcaacuacuuccucugcuggcacaccaacugcuacgacuacugcaucccguacaacuccgugaccagcuccaucgucaucacgagcggcgacggcaccaccucccccaucagcgagcacgacuaccagaucgggggcuacaccgagaagugggaguccggggugaaggacugcgugguccugcacagcuacuucacguccgacuacuaccagcuguacagcacccagcucuccaccgacaccggcguggagcacgugacguucuucaucuacaacaagaucgucgacgagcccgaggagcacgugcagauccacaccaucgacgggagcagcggcguggucaaccccgugauggagccgaucuacgacgagcccaccaccacgaccuccgugccccuguga

SEQ ID NO: 18822 - RNA, 828 nt, Artificial Sequence
  SARS-CoV-2__MT270114.1__ORF3a protein CDS gc
auggaccuguucaugcgcaucuucaccaucggcaccgugacgcucaagcagggggagaucaaggacgccacccugagcgacuucguccgggccaccgcgaccauccccauccaggccucccugccguucggcuggcucaucguggggguggcccugcuggccgucuuccagagcgccuccaagaucaucacgcucaagaagcgcuggcagcuggcgcugagcaagggcgugcacuucgugugcaaccuccugcugcuguucgucaccguguacucccaccuccugcucguggccgccgggcuggaggcccccuuccuguaccucuacgcgcuggucuacuuccugcagagcaucaacuucgugcggaucaucaugcgccucuggcugugcuggaagugccgguccaagaacccccugcucuacgacgccaacuacuuccugugcuggcacaccaacugcuacgacuacugcauccccuacaacagcgugaccuccagcaucgucaucacguccggcgacggcaccaccagcccgaucuccgagcacgacuaccagaucgggggcuacaccgagaagugggagagcggggugaaggacugcgugguccugcacuccuacuucacgagcgacuacuaccagcucuacuccacccagcugagcaccgacaccggcguggagcacgugacguucuucaucuacaacaagaucgucgacgagcccgaggagcacgugcagauccacaccaucgacggguccagcggcguggucaaccccgugauggagcccaucuacgacgagccgaccaccacgaccagcgugccccuguga

SEQ ID NO: 18823 - RNA, 828 nt, Artificial Sequence
  SARS-CoV-2__MT477842.1__ORF3a protein CDS gc
auggaccuguucaugcgcaucuucaccaucggcaccgugacgcucaagcagggggagaucaaggacgccacccccagcgacuucguccgggccaccgcgaccaucccgauccaggccucccugcccuucggcuggcugaucguggggguggcccuccuggccgucuuccacagcgccuccaagaucaucacgcugaagaagcgcuggcagcucgcgcugagcaagggcgugcacuucgugugcaaccugcuccugcuguucgucaccguguacucccaccuccugcugguggccgccgggcucgaggcccccuuccuguaccuguacgcgcucgucuacuuccugcagagcaucaacuucgugcggaucaucaugcgccuguggcucugcuggaagugccgguccaagaacccccugcuguacgacgccaacuacuuccucugcuggcacaccaacugcuacgacuacugcaucccguacaacagcgugaccuccagcaucgucaucacguccggcgacggcaccaccagccccaucuccgagcacgacuaccagaucgggggcuacaccgagaagugggagagcggggugaaggacugcgugguccugcacuccuacuucacgagcgacuacuaccagcuguacuccacccagcucagcaccgacacgugcguggagcacgugaccuucuucaucuacaacaagaucgucgacgagcccgaggagcacgugcagauccacaccaucgacggcuccagcgggguggucaaccccgugauggagccgaucuacgacgagcccaccaccacgaccagcgugccccuguga

SEQ ID NO: 18824 - RNA, 828 nt, Artificial Sequence
  SARS-CoV-2__MT481929.1__ORF3a protein CDS gc
auggaccuguucaugcgcaucuucaccaucggcaccgugacgcucaagcagggggagaucaaggacgccacccccagcgacuucguccgggccaucgcgaccaucccgauccaggccucccugcccuucggcuggcugaucguggggguggcccuccuggccgucuuccacagcgccuccaagaucaucacccugaagaagcgcuggcagcucgcgcugagcaagggcgugcacuucgugugcaaccugcuccugcuguucgucacgguguacucccaccuccugcugguggccgccgggcucgaggcccccuuccuguaccuguacgcgcucgucuacuuccugcagagcaucaacuucgugcggaucaucaugcgccuguggcucugcuggaagugccgguccaagaacccccugcuguacgacgccaacuacuuccucugcuggcacaccaacugcuacgacuacugcaucccguacaacagcgugaccuccagcaucgucaucaccuccggcgacggcacgaccagccccaucuccgagcacgacuaccagaucgggggcuacaccgagaagugggagagcggggugaaggacugcgugguccugcacuccuacuucaccagcgacuacuaccagcuguacuccacgcagcucagcaccgacaccggcguggagcacgugaccuucuucaucuacaacaagaucgucgacgagcccgaggagcacgugcagauccacacgaucgacggguccagcggcguggucaaccccgugauggagccgaucuacgacgagcccaccaccaccacgagcgugccccuguga

SEQ ID NO: 18825 - RNA, 828 nt, Artificial Sequence
  SARS-CoV-2__MT482131.1__ORF3a protein CDS gc
auggaccuguucaugcgcaucuucaccaucggcaccgugacgcucaagcagggggagaucaaggacgccacccccagcgacuucguccgggccaccgcgaccaucccgauccaggccucccugcccuucggcuggcugaucguggggguggcccuccuggccgucuuccacagcgccuccaagaucaucacgcugaagaagcgcuggcagcucgcgcugagcaagggcgugcacuucgugugcaaccugcuccugcuguucgucaccguguacucccaccuccugcugguggccgacgggcucgaggcccccuuccuguaccuguacgcccucgucuacuuccugcagagcaucaacuucgugcggaucaucaugcgccuguggcucugcuggaagugccgguccaagaacccccugcuguacgacgcgaacuacuuccucugcuggcacaccaacugcuacgacuacugcaucccguacaacagcgugaccuccagcaucgucaucacguccggcgacggcaccaccagccccaucuccgagcacgacuaccagaucgggggcuacaccgagaagugggagagcggggugaaggacugcgugguccugcacuccuacuucacgagcgacuacuaccagcuguacuccacccagcucagcaccgacaccggcguggagcacgugacguucuucaucuacaacaagaucgucgacgagcccgaggagcacgugcagauccacaccaucgacggguccagcggcguggucaaccccgugauggagccgaucuacgacgagcccaccaccacgaccagcgugccccuguga

SEQ ID NO: 18826 - RNA, 828 nt, Artificial Sequence
  SARS-CoV-2__MT482149.1__ORF3a protein CDS gc
auggaccuguucaugcgcaucuucaccaucggcaccgugacgcucaagcagggggagaucaaggacgccacccccagcgacuucguccgggccaccgcgaccaucccgauccaggccucccugcccuucggcuggcugaucguggggguggcccuccuggccgucuuccacagcgccuccaagaucaucacguucaagaagcgcuggcagcuggcgcucagcaagggcgugcacuucgugugcaaccugcugcuccuguucgucaccguguacucccaccuccugcugguggccgccgggcuggaggcccccuuccucuaccuguacgcgcuggucuacuuccuccagagcaucaacuucgugcggaucaucaugcgccuguggcugugcuggaagugccgguccaagaacccccuccuguacgacgccaacuacuuccugugcuggcacaccaacugcuacgacuacugcaucccguacaacagcgugaccuccagcaucgucaucacguccggcgacggcaccaccagccccaucuccgagcacgacuaccagaucgggggcuacaccgagaagugggagagcggggugaaggacugcgugguccuccacuccuacuucacgagcgacuacuaccagcuguacuccacccagcugagcaccgacacgugcguggagcacgugaccuucuucaucuacaacaagaucgucgacgagcccgaggagcacgugcagauccacaccaucgacggcuccagcgggguggucaaccccgugauggagccgaucuacgacgagcccaccaccacgaccagcgugccccucuga

SEQ ID NO: 18827 - RNA, 828 nt, Artificial Sequence
  SARS-CoV-2__MT470120.1__ORF3a protein CDS gc
auggaccuguucaugcgcaucuucaccaucggcaccgugacgcucaagcagggggagaucaaggacgccacccccagcgacuucguccgggccaccgcgaccaucccgauccaggccucccugcccuucggcuggcugaucguggggguggcccuccuggccgucuuccacagcgccuccaagaucaucacgcugaagaagcgcuggcagcucgcgcugagcaagggcgugcacuucgugugcaaccugcuccugcuguucgucaccguguacucccaccuccugcugguggccgccgggcucgaggcccccuuccuguaccuguacgcgcucgucuacuuccugcagagcaucaacuucgugcggaucaucaugcgccuguggcucugcuggaagugccgguccaagaacccccugcuguacgacgccaacuacuuccucugcuggcacaccaacugcuacgacuacugcaucccguacaacagcgugaccuccagcaucgucaucacguccggcgacggcaccaccagccccaucuccgagcacgacuaccagaucgggggcuacaccgagaagugggagagcggggugaaggacugcgugguccugcacuccuacuucacgagcgacuacuaccagcuguacuccacccagcucagcaccgacaccggcguggagcacgugacguucuucaucuacaacaagaucuucgacgagcccgaggagcacguccagauccacaccaucgacggguccagcggcguggugaaccccgucauggagccgaucuacgacgagcccaccaccacgaccagcgugccccuguga

SEQ ID NO: 18828 - RNA, 828 nt, Artificial Sequence
  SARS-CoV-2__MT470125.1__ORF3a protein CDS gc
auggaccuguucaugcgcaucuucaccaucggcaccgugacgcucaagcagggggagaucaaggacgccacccccagcgacuucguccgggccaccgcgaccaucccgauccaggccucccugcccuucggcuggcugaucguggggguggcccuccuggccgucuuccagagcgccuccaagaucaucacgcugaagaagcgcuggcagcucgcguucagcaagggcgugcacuucgugugcaaccugcugcuccuguucgucaccguguacucccaccuccugcugguggccgccgggcuggaggcccccuuccucuaccuguacgcgcuggucuacuuccuccagagcaucaacuucgugcggaucaucaugcgccuguggcugugcuggaagugccgguccaagaacccccuccuguacgacgccaacuacuuccugugcuggcacaccaacugcuacgacuacugcaucccguacaacagcgugaccuccagcaucgucaucacguccggcgacggcaccaccagccccaucuccgagcacgacuaccagaucgggggcuacaccgagaagugggagagcggggugaaggacugcgugguccuccacuccuacuucacgagcgacuacuaccagcuguacuccacccagcugagcaccgacaccggcguggagcacgugacguucuucaucuacaacaagaucgucgacgagcccgaggagcacgugcagauccacaccaucgacggguccagcggcguggucaaccccgugauggagccgaucuacgacgagcccaccaccacgaccagcgugccccucuga

SEQ ID NO: 18829 - RNA, 828 nt, Artificial Sequence
  SARS-CoV-2__MT470132.1__ORF3a protein CDS gc
auggaccuguucaugcgcaucuucaccaucggcaccgugacgcucaagcagggggagaucaaggacgccacccccagcgacuucguccgggccaccgcgaccaucccgauccaggccucccugcccuucggcuggcugaucguggggguggcccuccuggccgucuuccacagcgccuccaagaucaucacgcugaagaagcgcuggcagcucgcgcugagcaagggcgugcacuucgugugcaaccugcuccugcuguucgucaccguguacucccaccuccugcugguggccgucgggcucgaggcccccuuccuguaccuguacgcccucguguacuuccugcagagcaucaacuucgugcggaucaucaugcgccuguggcucugcuggaagugccgguccaagaacccccugcuguacgacgcgaacuacuuccucugcuggcacaccaacugcuacgacuacugcaucccguacaacagcgucaccuccagcaucgugaucacguccggcgacggcaccaccagccccaucuccgagcacgacuaccagaucgggggcuacaccgagaagugggagagcggggugaaggacugcgucgugcugcacuccuacuucacgagcgacuacuaccagcuguacuccacccagcucagcaccgacaccggcguggagcacgucacguucuucaucuacaacaagaucguggacgagcccgaggagcacgugcagauccacaccaucgacggguccagcggcgucgugaaccccgugauggagccgaucuacgacgagcccaccaccacgaccagcgucccccuguga

SEQ ID NO: 18830 - RNA, 828 nt, Artificial Sequence
  SARS-CoV-2__MT470135.1__ORF3a protein CDS gc
auggaccuguucaugcgcaucuucaccaucggcaccgugacgcucaagcagggggagaucaaggacgccacccccagcgacuucguccgggccaccgcgaccaucccgauccaggccucccugcccuucggcuggcugaucguggggguggcccuccuggccgucuuccacagcgccuccaagaucaucacgcugaagaagcgcuggcagcucgcgcugagcaagggcgugcacuucgugugcaaccugcuccugcuguucgucaccguguacucccaccuccugcugguggccgccgggcucgaggcccccuuccuguaccuguacgcgcucgucuacuuccugcagagcaucaacuucgugcggaucaucaugcgccuguggcucugcuggaagugccgguccaagaacccccugcuguacgacgccaacuacuuccucugcuggcacaccaacugcugcgacuacugcaucccguacaacagcgugaccuccagcaucgucaucacguccggcgacggcaccaccagccccaucuccgagcacgacuaccagaucgggggcuacaccgagaagugggagagcggggugaaggacugcgugguccugcacuccuacuucacgagcgacuacuaccagcuguacuccacccagcucagcaccgacaccggcguggagcacgugacguucuucaucuacaacaagaucgucgacgagcccgaggagcacgugcagauccacaccaucgacggguccagcggcguggucaaccccgugauggagccgaucuacgacgagcccaccaccacgaccagcgugccccuguga

SEQ ID NO: 18831 - RNA, 828 nt, Artificial Sequence
  SARS-CoV-2__MT470172.1__ORF3a protein CDS gc
auggaccuguucaugcgcaucuucaccaucggcaccgugacgcucaagcagggggagaucaaggacgccacccccagcgacuucguccgggccaccuccaccaucccgauccaggcgagccugcccuucggcuggcugaucguggggguggcccuccuggccgucuuccacuccgccagcaagaucaucacgcugaagaagcgcuggcagcucgcccuguccaagggcgugcacuucgugugcaaccugcuccugcuguucgucaccguguacagccaccuccugcugguggcggccgggcucgaggcccccuuccuguaccuguacgcccucgucuacuuccugcaguccaucaacuucgugcggaucaucaugcgccuguggcucugcuggaagugccggagcaagaacccccugcuguacgacgcgaacuacuuccucugcuggcacaccaacugcuacgacuacugcaucccguacaacuccgugaccagcuccaucgucaucacgagcggcgacggcaccaccucccccaucagcgagcacgacuaccagaucgggggcuacaccgagaagugggaguccggggugaaggacugcgugguccugcacagcuacuucacguccgacuacuaccagcuguacagcacccagcucuccaccgacaccggcguggagcacgugacguucuucaucuacaacaagaucgucgacgagcccgaggagcacgugcagauccacaccaucgacgggagcagcggcguggucaaccccgugauggagccgaucuacgacgagcccaccaccacgaccuccgugccccuguga

SEQ ID NO: 18832 - RNA, 828 nt, Artificial Sequence
  SARS-CoV-2__MT459865.1__ORF3a protein CDS gc
auggaccuguucaugcgcaucuucaccaucggcaccgugacgcucaagcagggggagaucaaggacgccacccccagcgacuucguccgggccaccgcgaccaucccgauccaggccucccugcccuucggcuggcugaucguggggguggcccuccuggccgucuuccagagcgccuccaagaucaucacgcugaagaagcgcuggcagcucgcgcugagcaagggcgugcacuucgugugcaaccugcuccugcuguucgucaccguguacucccaccuccugcugguggccgccgggcucgaggcccccuuccuguaccuguacgcgcucgucuacuuccugcagagcaucaacuucgugcggaucaucaugcgccuguggcucugcuggaagugccgguccaagaacccccugcuguacgacgccaacuacuuccucugcuggcacaccaacugcuacgacuacugcaucccguacaacagcgugaccuccagcaucgucaucacguccggcgacggcaccaccagccccaucuccgagcacgacuaccagaucgggggcuacaccgagaagugggagagcggggugaaggacugcgugguccugcacuccuacuucacgagcgacuacuaccagcuguacuccacccagcucagcaccgacaccggcguggagcacgugacguucuucaucuacaacaagaucgucgacgagcccgaggagcacgugcagauccacaccaucgacguguccagcggggucgugaaccccgugaucgagccgaucuacgacgagcccaccaccacgaccagcgucccccuguga

SEQ ID NO: 18833 - RNA, 828 nt, Artificial Sequence
  SARS-CoV-2__MT459903.1__ORF3a protein CDS gc
auggaccuguucaugcgcaucuucaccaucggcaccgugacgcucaagcagggggagaucaaggacgccacccccagcgacuucguccgggccaccgcgaccaucccgauccaggccucccugcccuucggcuggcugaucguggggguggcccuccuggccgucuuccagagcgccuccaagaucaucacgcugaagaagcgcuggcagcucgcgcugagcaagggcgugcacuucgugugcaaccugcuccugcuguucgucaccguguacucccaccuccugcugguggccgccgggcucgaggcccccuuccuguaccuguacgcgcucgucuacuuccugcagagcaucaacuucgugcggaucaucaugcgccuguggcucugcuggaagugccgguccaagaacccccugcuguacgacgccaacuacuuccucugcuggcacaccaacugcuacgacuacugcaucccguacaacagcgugaccuccagcaucgucaucacguccggcgacggcaccaccagccccaucuccgagcacgacuaccagaucgggggcuacaccgagaagugggagagcggggugaaggacugcgugguccugcacuccuacuucacgagcgacuacuaccagcuguacuccacccagcucagcaccgacaccggcguggagcacgugacguucuucaucuacaacaagaucgucgacgagcccguggagcacgugcagauccacaccaucgacggguccagcggcgucgugaaccccgugauggagccgaucuacgacgagcccaccaccacgaccagcgucccccuguga

SEQ ID NO: 18834 - RNA, 828 nt, Artificial Sequence
  SARS-CoV-2__MT461646.1__ORF3a protein CDS gc
auggaccuguucaugcgcaucuucaccaucggcaccgugacgcucaagcagggggagaucaaggacgccacccccagcgacuucguccgggccaccgcgaccaucccgauccaggccucccugcccuucggcuggcugaucguggggguggcccuccuggccgucuuccacagcgccuccaagaucaucacgcugaagaagcgcuggcagcucgcgcugagcaagggcgugcacuucgugugcaaccugcuccugcuguucgucaccguguacucccaccuccugcugguggccgccgggcucgaggcccccuuccuguaccuguacgcgagcgucuacuuccuccaguccaucaacuucgugcggaucaucaugcgccuguggcugugcuggaagugccggagcaagaacccccuccuguacgacgccaacuacuuccugugcuggcacaccaacugcuacgacuacugcaucccguacaacuccgugaccagcuccaucgucaucacgagcggcgacggcaccaccucccccaucagcgagcacgacuaccagaucgggggcuacaccgagaagugggaguccggggugaaggacugcgugguccuccacagcuacuucacguccgacuacuaccagcuguacagcacccagcuguccaccgacaccggcguggagcacgugacguucuucaucuacaacaagaucgucgacgagcccgaggagcacgugcagauccacaccaucgacgggagcagcggcguggucaaccccgugauggagccgaucuacgacgagcccaccaccacgaccuccgugccccucuga

SEQ ID NO: 18835 - RNA, 828 nt, Artificial Sequence
  SARS-CoV-2__MT457392.1__ORF3a protein CDS gc
auggaccuguucaugcgcaucuucaccaucggcaccgugacgcucaagcagggggagaucaaggacgccacccccagcgacuucguccgggccaccgcgaccaucccgauccaggccucccugcccuucggcuggcugaucguggggguggcccuccuggccgucuuccagagcgccuccaagaucaucacgcugaagaagcgcuggcagcucgcgcugagcaagggcgugcacuucgugugcaaccugcuccugcuguucgucaccguguacucccaccuccugcugguggccgccgggcucgaggcccccuuccuguaccuguacgcgcucgucuacuuccugcagagcaucaacuucgugcggaucaucaugcgccuguggcucugcuggaagugccgguccaagaacccccugcuguacgacgccaacuacuuccucugcuggcacaccaacugcuacgacuacugcaucccguacaacagcgugaccuccagcaucgucaucacguccggcgacggcaccaccagccccaucuccgagcacgacuaccagaucgggggcuacaccgagaagugggagagcggggugaaggacugcgugguccugcacuccuacuucacgagcgacuacuaccagcuguacuccacccaggugagcaccgacaccggcguggagcacgucacguucuucaucuacaacaagaucguggacgagcccgaggagcacgugcagauccacaccaucgacggguccagcggcgucgugaaccccgugauggagccgaucuacgacgagcccaccaccacgaccagcgucccccucuga

SEQ ID NO: 18836 - RNA, 828 nt, Artificial Sequence
  SARS-CoV-2__MT457396.1__ORF3a protein CDS gc
auggaccuguucaugcgcaucuucaccaucggcaccgugacgcucaagcagggggagaucaaggacgccacccccagcgacuucguccgggccaccgcggccaucccgauccaggccucccugcccuucggcuggcugaucguggggguggcccuccuggccgucuuccagagcgcguccaagaucaucacccugaagaagcgcuggcagcucgcccugagcaagggcgugcacuucgugugcaaccugcuccugcuguucgucacgguguacucccaccuccugcugguggccgccgggcucgaggcgcccuuccuguaccuguacgcccucgucuacuuccugcagagcaucaacuucgugcggaucaucaugcgccuguggcucugcuggaagugccgguccaagaacccccugcuguacgacgccaacuacuuccucugcuggcacaccaacugcuacgacuacugcaucccguacaacagcgugaccuccagcaucgucaucaccuccggcgacggcacgaccagccccaucuccgagcacgacuaccagaucgggggcuacaccgagaagugggagagcggggugaaggacugcgugguccugcacuccuacuucaccagcgacuacuaccagcuguacuccacgcagcucagcaccgacaccggcguggagcacgugaccuucuucaucuacaacaagaucgucgacgagcccgaggagcacgugcagauccacacgaucgacggguccagcggcguggucaaccccgugauggagccgaucuacgacgagcccaccaccaccacgagcgugccccuguga

SEQ ID NO: 18837 - RNA, 831 nt, Artificial Sequence
  SARS-CoV-2__MT449656.1__ORF3a protein CDS gc
auggaccuguucaugcgcaucuucaccaucggcaccgugacgcucaagcagggggagaucaaggacgccacccccagcgacuucguccgggccaccgcgaccaucccgauccaggccucccugcccuucggcuggcugaucguggggguggcccuccuggccgucuuccagagcgccuccaagaucaucacgcugaagaagcgcuggcagcucgcgcugagcaagggcgugcacuucgugugcaaccugcuccugcuguucgucaccguguacucccaccuccugcugguggccgccgggcucgaggcccccuuccuguaccuguacgcgcucgucuacuuccugcagagcaucaacuucgugcggaucaucaugcgccuguggcucugcuggaagugccgguccaagaacccccugcuguacgacgccaacuacuuccucugcuggcacaccaacugcuacgacuacugcaucccguacaacagcgugaccuccagcaucgucaucacguccggcgacggcaccaccagccccaucuccgagcacgacuaccagaucgggggcuacaccgagaagugggagagcggggugaaggacugcgugguccugcacuccuacuucacgagcgacuacuaccagcuguacuccacccagcucagcaccgacaccggcguggagcacgugacguucuucuucaucuacaacaagaucgucgacgagcccgaggagcacgugcagauccacaccaucgacggguccagcggcguggucaaccccgugauggagccgaucuacgacgagcccaccaccacgaccagcgugccccuguga

SEQ ID NO: 18838 - RNA, 828 nt, Artificial Sequence
  SARS-CoV-2__MT451195.1__ORF3a protein CDS gc
auggaccuguucaugcgcaucuucaccaucggcacccucacgcugaagcagggggagaucaaggacgccacccccagcgacuucgugcgggccaccgcgaccaucccgauccaggccucccugcccuucggcuggcucaucgucgggguggcccugcuggccguguuccagagcgccuccaagaucaucacgcucaagaagcgcuggcagcuggcgcugagcaagggcguccacuucgugugcaaccuccugcugcuguucgugaccgucuacucccaccuccugcucguggccgccgggcuggaggcccccuuccuguaccucuacgcgcugguguacuuccugcagagcaucaacuucguccggaucaucaugcgccucuggcugugcuggaagugccgguccaagaacccccugcucuacgacgccaacuacuuccugugcuggcacaccaacugcuacgacuacugcaucccguacaacagcgugaccuccagcaucgugaucacguccggcgacggcaucaccagccccaucuccgagcacgacuaccagaucgggggcuacaccgagaagugggagagcggggucaaggacugcguggugcugcacuccuacuucaccagcgacuacuaccagcucuacuccacgcagcugagcaccgacaccggcgucgagcacgugaccuucuucaucuacaacaagaucguggacgagcccgaggagcacguccagauccacacgaucgacggguccagcggcguggugaaccccgucauggagccgaucuacgacgagcccaccaccaccacgagcgugccccuguga

SEQ ID NO: 18839 - RNA, 828 nt, Artificial Sequence
  SARS-CoV-2__MT451231.1__ORF3a protein CDS gc
auggaccuguucaugcgcaucuucaccaucggcacccucacgcugaagcagggggagaucaaggacgccacccccagcgacuucgugcgggccaccgcgaccaucccgauccaggccucccugcccuucggcuggcucaucgucgggguggcccugcuggccguguuccagagcgccuccaagaucaucacgcucaagaagcgcuggcagcuggcgcugagcaagggcgucuacuucgugugcaaccuccugcugcuguucgugaccgucuacucccaccuccugcucguggccgccgggcuggaggcccccuuccuguaccucuacgcgcugguguacuuccugcagagcaucaacuucguccggaucaucaugcgccucuggcugugcuggaagugccgguccaagaacccccugcucuacgacgccaacuacuuccugugcuggcacaccaacugcuacgacuacugcaucccguacaacagcgugaccuccagcaucgugaucacguccggcgacggcaccaccagccccaucuccgagcacgacuaccagaucgggggcuacaccgagaagugggagagcggggucaaggacugcguggugcugcacuccuacuucacgagcgacuacuaccagcucuacuccacccagcugagcaccgacaccggcgucgagcacgugacguucuucaucuacaacaagaucguggacgagcccgaggagcacguccagauccacaccaucgacggguccagcggcguggugaaccccgucauggagccgaucuacgacgagcccaccaccacgaccagcgugccccuguga

SEQ ID NO: 18840 - RNA, 828 nt, Artificial Sequence
  SARS-CoV-2__MT451255.1__ORF3a protein CDS gc
auggaccuguucaugcgcaucuucaccaucggcaccgugacgcucaagcagggggagaucaaggacgccacccccagcgacuucguccgggccaccgcgaccaucccgauccaggccucccugcccuucggcuggcugaucguggggguggccauccucgccgucuuccagagcgccuccaagaucaucacgcugaagaagcgcuggcagcuggcgcucagcaagggcgugcacuucgugugcaaccugcugcuccuguucgucaccguguacucccaccuccugcugguggccgccgggcuggaggcccccuuccucuaccuguacgcgcuggucuacuuccuccagagcaucaacuucgugcggaucaucaugcgccuguggcugugcuggaagugccgguccaagaacccccuccuguacgacgccaacuacuuccugugcuggcacaccaacugcuacgacuacugcaucccguacaacagcgugaccuccagcaucgucaucacguccggcgacggcaccaccagccccaucuccgagcacgacuaccagaucgggggcuacaccgagaagugggagagcggggugaaggacugcgugguccuccacuccuacuucacgagcgacuacuaccagcuguacuccacccagcugagcaccgacaccggcguggagcacgugacguucuucaucuacaacaagaucgucgacgagcccgaggagcacgugcagauccacaccaucgacggguccagcggcguggucaaccccgugauggagccgaucuacgacgagcccaccaccacgaccagcgugccccucuga

SEQ ID NO: 18841 - RNA, 828 nt, Artificial Sequence
  SARS-CoV-2__MT451755.1__ORF3a protein CDS gc
auggaccuguucaugcgcaucuucaccaucggcaccgugacgcucaagcagggggagaucaaggacgccacccccagcgacuucguccgggccaccgcgaccaucccgauccaggccucccugcccuucggcuggcugaucguggggguggcccuccuggccgucuuccacagcgccuccaagaucaucacgcugaagaagcgcuggcagcucgcgcugagcaagggcgugcacuucgugugcaaccugcuccugcuguucgucaccguguacucccaccuccugcugguggccgccgggcucgaggcccccuuccuguaccuguacgcgcucgucuacuuccugcagagcaucaacuucgugcggaucaucaugcgccuguggcucugcuggaagugccgguccaagaacccccuguucuacgacgccaacuacuuccugugcuggcacaccaacugcuacgacuacugcaucccguacaacagcgugaccuccagcaucgucaucacguccggcgacggcaccaccagccccaucuccgagcacgacuaccagaucgggggcuacaccgagaagugggagagcggggugaaggacugcgugguccuccacuccuacuucacgagcgacuacuaccagcuguacuccacccagcugagcaccgacaccggcguggagcacgugacguucuucaucuacaacaagaucgucgacgagcccgaggagcacgugcagauccacaccaucgacggguccagcggcguggucaaccccgugauggagccgaucuacgacgagcccaccaccacgaccagcgugccccucuga

SEQ ID NO: 18842 - RNA, 828 nt, Artificial Sequence
  SARS-CoV-2__MT446345.1__ORF3a protein CDS gc
auggaccuguucaugcgcaucuucaccaucggcaccgugacgcucaagcagggggagaucaaggacgccacccccagcgacuucguccgggccaccgcgaccaucccgauccaggccucccugcccuucggcuggcugaucguggggguggcccuccuggccgucuuccacagcgccuccaagaucaucacgcugaagaagcgcuggcagcucgcgcugagcaagggcgugcacuucgugugcaaccugcuccugcuguucgucaccguguacucccaccuccugcugguggccgccgggcucgaggcccccuucuucuaccuguacgcgcuggucuacuuccuccagagcaucaacuucgugcggaucaucaugcgccuguggcugugcuggaagugccgguccaagaacccccuccuguacgacgccaacuacuuccugugcuggcacaccaacugcuacgacuacugcaucccguacaacagcgugaccuccagcaucgucaucacguccggcgacggcaccaccagccccaucuccgagcacgacuaccagaucgggggcuacaccgagaagugggagagcggggugaaggacugcgugguccuccacuccuacuucacgagcgacuacuaccagcuguacuccacccagcugagcaccgacaccggcguggagcacgugacguucuucaucuacaacaagaucgucgacgagcccgaggagcacgugcagauccacaccaucgacggguccagcggcguggucaaccccgugauggagccgaucuacgacgagcccaccaccacgaccagcgugccccucuga

SEQ ID NO: 18843 - RNA, 828 nt, Artificial Sequence
  SARS-CoV-2__MT439244.1__ORF3a protein CDS gc
auggaccuguucaugcgcaucuucaccaucggcaccgugacgcucaagcagggggagaucaaggacgccacccccagcgacuucguccgggccaccgcgaccaucccgauccaggccucccugcccuucggcuggcugaucguggggguggcccuccuggccgucuuccacagcgccuccaagaucaucacgcugaagaagcgcuggcagcucgcgcugagcaagggcgugcacuucgugugcaaccugcuccugcuguucgucaccguguacucccaccuccugcugguggccgccgggcucgaggcccccuuccuguaccuguacgcgcucgucuacuuccugcagagcaucaacuucgugcggaucaucaugcgccuguggcucugcuggaagugccgguccaagaacccccugcuguacgacgccaacuacuuccucugcuggcacaccaacugcuacgacuacugcaucccguacaacagcgugaccuccagcaucgucaucacguccggcgacggcaccaccagccccaucuccgagcacgacuaccagaucgggggcuacaccgagaagugggagagcggggugaaggacugcgugguccugcacuccuacuucacgagcgacuacuaccagcuguacuccacccagcucagcaccgacaucggcguggagcacgugaccuucuucaucuacaacaagaucgucgacgagcccgaggagcacgugcagauccacacgaucgacggguccagcggcguggucaaccccgugauggagccgaucuacgacgagcccaccaccaccacgagcgugccccuguga

SEQ ID NO: 18844 - RNA, 828 nt, Artificial Sequence
  SARS-CoV-2__MT418882.1__ORF3a protein CDS gc
auggaccuguucaugcgcaucuucaccaucggcaccgugacgcucaagcagggggagaucaaggacgccacccccagcgacuucguccgggccaccgcgaccaucccgauccaggccucccugcccuucggcuggcugaucguggggguggcccuccuggccgucuuccacagcgccuccaagaucaucacgcugaagaagcgcuggcagcucgcgcugagcaagggcgugcacuucgugugcaaccugcuccugcuguucgucaccguguacucccaccuccugcugguggccgccgggcucgaggcccccuuccuguaccuguacgcgcucgucuacuuccugcagagcaucaacuucgugcggaucaucaugcgccuguggcucugcuggaagugccgguccaagaacccccugcuguacgacgccaacuacuuccucugcuggcacaccaacugcuacgacuacugcaucccguacaacagcgugaccuccagcaucgucaucacguccggcgacggcaccaucagccccaucuccgagcacgacuaccagaucgggggcuacaccgagaagugggagagcggggugaaggacugcgugguccugcacuccuacuucaccagcgacuacuaccagcuguacuccacgcagcucagcaccgacaccggcguggagcacgugaccuucuucaucuacaacaagaucgucgacgagcccgaggagcacgugcagauccacacgaucgacggguccagcggcguggucaaccccgugauggagccgaucuacgacgagcccaccaccaccacgagcgugccccuguga

SEQ ID NO: 18845 - RNA, 828 nt, Artificial Sequence
  SARS-CoV-2__MT412323.1__ORF3a protein CDS gc
auggaccuguucaugcgcaucuucaccaucggcaccgugacgcucaagcagggggagaucaaggacgccacccccagcgacuucguccgggccaccgcgaccaucccgauccaggccucccugcccuucggcuggcugaucguggggguggcccuccuggccgucuuccagagcgccuccaagaucaucacgcugaagaagcgcuggcagcucgcgcugagcaagggcgugcacuucgugugcaaccugcuccugcuguucgucaccguguacucccaccuccugcugguggccgccgggcucgaggcccccuuccuguaccuguacgcgcucgucuacuuccugcagagcaucaacuucgugcggaucaucaugcgccuguggcucugcuggaagugccgguccaagaacccccugcuguacgacgccaacuacuuccucuacuggcacaccaacugcuacgacuacugcaucccguacaacagcgugaccuccagcaucgucaucacguccggcgacggcaccaccagccccaucuccgagcacgacuaccagaucgggggcuacaccgagaagugggagagcggggugaaggacugcgugguccugcacuccuacuucacgagcgacuacuaccagcuguacuccacccagcucagcaccgacaccggcguggagcacgugacguucuucaucuacaacaagaucgucgacgagcccgaggagcacgugcagauccacaccaucgacggguccagcggcguggucaaccccgugauggagccgaucuacgacgagcccaccaccacgaccagcgugccccuguga

SEQ ID NO: 18846 - RNA, 828 nt, Artificial Sequence
  SARS-CoV-2__MT385434.1__ORF3a protein CDS gc
auggaccuguucaugcgcaucuucaccaucggcaccgugacgcucaagcagggggagaucaaggacgccacccccagcgacuucguccgggccaccgcgaccaucccgauccaggccucccugcccuucggcuggcugaucguggggguggcccuccuggccgucuuccagagcgccuccaagaucaucacgcugaagaagcgcuggcagcucgcgcugagcaagggcgugcacuucgugugcaaccugcuccugcuguucgucaccguguacucccaccuccugcugguggccgccgggcucgaggcccccuuccuguaccuguacgcgcucgucuacuuccugcagagcaucaacuucgugcggaucaucaugucccuguggcucugcuggaagugccgcagcaagaacccccugcuguacgacgccaacuacuuccucugcuggcacaccaacugcuacgacuacugcaucccguacaacuccgugaccagcuccaucgucaucacgagcggcgacggcaccaccucccccaucagcgagcacgacuaccagaucgggggcuacaccgagaagugggaguccggggugaaggacugcgugguccugcacagcuacuucacguccgacuacuaccagcuguacagcacccagcucuccaccgacaccggcguggagcacgugacguucuucaucuacaacaagaucgucgacgagcccgaggagcacgugcagauccacaccaucgacgggagcagcggcguggucaaccccgugauggagccgaucuacgacgagcccaccaccacgaccuccgugccccuguga

SEQ ID NO: 18847 - RNA, 828 nt, Artificial Sequence
  SARS-CoV-2__MT375441.1__ORF3a protein CDS gc
auggaccuguucaugcgcaucuucaccaucggcaccgugacgcucaagcagggggagaucaaggacgccacccccagcgacuucguccgggccaccgcgaccaucccgauccaggccucccugcccuucggcuggcugaucguggggguggcccuccuggccgucuuccagagcgccuccaagaucaucacgcugaagaagcgcuggcagcucgcgcugagcaagggcgugcacuucgugugcaaccugcuccugcuguucgucaccguguacucccaccucuuccugguggccgccgggcuggaggcccccuuccucuaccuguacgcgcuggucuacuuccuccagagcaucaacuucgugcggaucaucaugcgccuguggcugugcuggaagugccgguccaagaacccccuccuguacgacgccaacuacuuccugugcuggcacaccagcugcuacgacuacugcaucccguacaacuccgugaccagcuccaucgucaucacgagcggcgacggcaccaccucccccaucagcgagcacgacuaccagaucgggggcuacaccgagaagugggaguccggggugaaggacugcgugguccuccacagcuacuucacguccgacuacuaccagcuguacagcacccagcuguccaccgacaccggcguggagcacgugacguucuucaucuacaacaagaucgucgacgagcccgaggagcacgugcagauccacaccaucgacgggagcagcggcguggucaaccccgugauggagccgaucuacgacgagcccaccaccacgaccuccgugccccucuga

SEQ ID NO: 18848 - RNA, 828 nt, Artificial Sequence
  SARS-CoV-2__MT375459.1__ORF3a protein CDS gc
auggaccuguucaugcgcaucuucaucaucggcaccgugacccucaagcagggggagaucaaggacgccacgcccagcgacuucguccgggccaccgcgaccaucccgauccaggccucccugcccuucggcuggcugaucguggggguggcccuccuggccgucuuccagagcgccuccaagaucaucacccugaagaagcgcuggcagcucgcgcugagcaagggcgugcacuucgugugcaaccugcuccugcuguucgucacgguguacucccaccuccugcugguggccgccgggcucgaggcccccuuccuguaccuguacgcgcucgucuacuuccugcagagcaucaacuucgugcggaucaucaugcgccuguggcucugcuggaagugccgguccaagaacccccugcuguacgacgccaacuacuuccucugcuggcacaccaacugcuacgacuacugcaucccguacaacagcgugaccuccagcaucgucaucaccuccggcgacggcacgaccagccccaucuccgagcacgacuaccagaucgggggcuacaccgagaagugggagagcggggugaaggacugcgugguccugcacuccuacuucaccagcgacuacuaccagcuguacuccacgcagcucagcaccgacaccggcguggagcacgugaccuucuucaucuacaacaagaucgucgacgagcccgaggagcacgugcagauccacacgaucgacggguccagcggcguggucaaccccgugauggagccgaucuacgacgagcccaccaccaccacgagcgugccccuguga

SEQ ID NO: 18849 - RNA, 828 nt, Artificial Sequence
  SARS-CoV-2__MT375470.1__ORF3a protein CDS gc
auggaccuguucaugcgcaucuucaccaucggcaccgugacgcucaagcagggggagaucaaggacgccacccccagcgacuucguccgggccaccgcgaccaucccgauccaggccucccugcccuucggcuggcugaucguggggguggcccuccuggccgucuuccacagcgccuccaagaucaucacgcugaagaagcgcuggcagcucgcgcugagcaagggcgugcacuucgugugcaaccugcuccugcuguucgucaccguguacucccaccuccugcugguggccgccgggcucgaggcccccuuccuguaccuguacgcgcucgucuacugccugcagagcaucaacuucgugcggaucaucaugcgccuguggcucugcuggaagugccgguccaagaacccccugcuguacgacgccaacuacuuccucugcuggcacaccaacugcuacgacuacugcaucccguacaacagcgugaccuccagcaucgucaucacguccggcgacggcaccaccagccccaucuccgagcacgacuaccagaucgggggcuacaccgagaagugggagagcggggugaaggacugcgugguccugcacuccuacuucacgagcgacuacuaccagcuguacuccacccagcucagcaccgacaccggcguggagcacgugacguucuucaucuacaacaagaucgucgacgagcccgaggagcacgugcagauccacaccaucgacggguccagcggcguggucaaccccgugauggagccgaucuacgacgagcccaccaccacgaccagcgugccccuguga

SEQ ID NO: 18850 - RNA, 828 nt, Artificial Sequence
  SARS-CoV-2__MT374112.1__ORF3a protein CDS gc
auggaccuguucaugcgcaucuucaccaucggcaccgugacgcucaagcagggggagaucaaggacgccacccccagcgacuucguccgggccaccgcgaccaucccgauccaggccucccugcccuucggcuggcugaucguggggguggcccuccuggccgucuuccacagcgccuccaagaucaucacgcugaagaagcgcuggcagcucgcgcugagcaagggcgugcacuucgugugcaaccugcuccugcuguucgucaccguguacucccaccuccugcugguggccgccgggcucgaggcccccuuccuguaccuguacgcgcucgucuacuuccugcagagcaucaacuucgugcggaucaucauccgccuguggcucugcuggaagugccgguccaagaacccccugcuguacgacgccaacuacuuccucugcuggcacaccaacugcuacgacuacugcaucccguacaacagcgugaccuccagcaucgucaucacguccggcgacggcaccaccagccccaucuccgagcacgacuaccagaucgggggcuacaccgagaagugggagagcggggugaaggacugcgugguccugcacuccuacuucacgagcgacuacuaccagcuguacuccacccagcucagcaccgacaccggcguggagcacgugacguucuucaucuacaacaagaucgucgacgagcccgaggagcacgugcagauccacaccaucgacggguccagcggcguggucaaccccgugauggagccgaucuacgacgagcccaccaccacgaccagcgugccccuguga

SEQ ID NO: 18851 - RNA, 828 nt, Artificial Sequence
  SARS-CoV-2__MT252680.1__ORF3a protein CDS gc
auggaccuguucaugcgcaucuucaccaucggcaccgugacgcucaagcagggggagaucaaggacgccacccccagcgacuucguccgggccaccgcgaccaucccgauccaggccucccugcccuucggcuggcugaucguggggguggcccuccuggccgucuuccagagcgccuccaagaucaucacgcugaagaagcgcuggcagcucgcgcugagcaagggcgugcacuucgugugcaaccugcuccugcuguucgucaccguguacucccaccuccugcugguggccgccgggcucgaggcccccuuccuguaccuguacgcgcucgucuacuuccugcagagcaucaacuucgugcggaucaucaugcgccuguggcucugcuggaagugccgguccaagaacccccugcuguacgacgccaacuacuuccucugcuggcacaccaacugcuacgacuacugcaucccguacaacagcgugaccuccagcaucgucaucacguccggcgacggcaccaccagccccaucuccgagcacgacuaccagaucgggggcuacaccgagaagugggagagcggggugaaggacugcgugguccugcacuccuacuucacgagcgacuacuaccagcuguacuccacccagcucagcaccgacaccgugguggagcacgucacguucuucaucuacaacaagaucguggacgagcccgaggagcacgugcagauccacaccaucgacggcuccagcggggucgugaaccccgugauggagccgaucuacgacgagcccaccaccacgaccagcgucccccuguga

SEQ ID NO: 18852 - RNA, 828 nt, Artificial Sequence
  SARS-CoV-2__MT371047.1__ORF3a protein CDS gc
auggaccuguucaugcgcaucuucaccaucggcaccgugacgcucaagcagggggagaucaaggacgccacccccagcgacuucguccgggccaccgcgaccaucccgauccaggccucccugcccuucggcuggcugaucguggggguggcccuccuggccgucuuccagagcgccuccaagaucaucacgcugaagaagcgcuggcagcucgcgcugagcaagggcgugcacuucgugugcaaccugcuccugcuguucgucaccguguacucccaccuccugcugguggccgccgggcucgaggcccccuuccuguaccuguacgcgcucgucuacuuccugcagagcaucaacuucgugcggaucaucaugcgccuguggcucugcuggaagugccgguccaagaacccccugcuguacgacgccaacuacuuccucugcuggcacaccaacugcuacgacuacugcaucccguacaacagcgugaccuccagcaucgucaucacguccggcgacggcaccaccagccccaucuccgagcacgacuaccagaucgggggcuacaccgagaagugggagagcggggugaaggacugcgugguccugcacuccuacuucacgagcgacuacuaccagcuguacuccacccagcucagcaccgacaccggcguggagcacgugacguucuucaucuacaacaagaucgucgacgagcccgaggagcacgugcagauccacaccaucgacggguccagcggcguggucaaccccgugauggagccgauguacgacgagcccaccaccacgaccagcgugccccuguga

SEQ ID NO: 18853 - RNA, 828 nt, Artificial Sequence
  SARS-CoV-2__MT370848.1__ORF3a protein CDS gc
auggaccuguucaugcgcaucuucaccaucggcaccgugacgcucaagcagggggagaucaaggacgccacccccagcgacuucguccgggccaccgcgaccaucccgauccaggccucccugcccuucggcuggcugaucgugggggccgcccuccuggccguguuccagagcgcguccaagaucaucacgcugaagaagcgcuggcagcucgcccugagcaagggcguccacuucgugugcaaccugcuccugcuguucgugaccgucuacucccaccuccugcugguggccgccgggcucgaggcgcccuuccuguaccuguacgcccucguguacuuccugcagagcaucaacuucguccggaucaucaugcgccuguggcucugcuggaagugccgguccaagaacccccugcuguacgacgccaacuacuuccucugcuggcacaccaacugcuacgacuacugcaucccguacaacagcgugaccuccagcaucgugaucacguccggcgacggcaccaccagccccaucuccgagcacgacuaccagaucgggggcuacaccgagaagugggagagcggggucaaggacugcguggugcugcacuccuacuucacgagcgacuacuaccagcuguacuccacccagcucagcaccgacaccggcgucgagcacgugacguucuucaucuacaacaagaucguggacgagcccgaggagcacguccagauccacaccaucgacggguccagcggcguggugaaccccgucauggagccgaucuacgacgagcccaccaccacgaccagcgugccccuguga

SEQ ID NO: 18854 - RNA, 828 nt, Artificial Sequence
  SARS-CoV-2__MT370869.1__ORF3a protein CDS gc
auggaccuguucaugcgcaucuucaccaucggcaccgugacgcucaagcagggggagaucaaggacgccacccccagcgacuucguccgggccaccgcgaccaucccgauccaggccucccugcccuucggcuggcugaucguggggguggcccuccuggccgucuuccagagcgccuccaacaucaucacgcugaagaagcgcuggcagcucgcgcugagcaagggcgugcacuucgugugcaaccugcuccugcuguucgucaccguguacucccaccuccugcugguggccgccgggcucgaggcccccuuccuguaccuguacgcgcucgucuacuuccugcagagcaucaacuucgugcggaucaucaugcgccuguggcucugcuggaagugccgguccaagaacccccugcuguacgacgccaacuacuuccucugcuggcacaccaacugcuacgacuacugcaucccguacaacagcgugaccuccagcaucgucaucacguccggcgacggcaccaccagccccaucuccgagcacgacuaccagaucgggggcuacaccgagaagugggagagcggggugaaggacugcgugguccugcacuccuacuucacgagcgacuacuaccagcuguacuccacccagcucagcaccgacaccggcguggagcacgugacguucuucaucuacaacaagaucgucgacgagcccgaggagcacgugcagauccacaccaucgacggguccagcggcguggucaaccccgugauggagccgaucuacgacgagcccaccaccacgaccagcgugccccuguga

SEQ ID NO: 18855 - RNA, 828 nt, Artificial Sequence
  SARS-CoV-2__MT371038.1__ORF3a protein CDS gc
auggaccuguucaugcgcaucuucaccaucggcaccgugacgcucaagcagggggagaucaaggacgccacccccagcgacuucguccgggccaccgcgaccaucccgauccaggccucccugcccuucggcuggcugaucguggggguggcccuccuggccgucuuccacagcgccuccaagaucaucacgcugaagaagcgcuggcagcucgcgcugagcaagggcgugcacuucgugugcaaccugcuccugcuguucgucaccguguacucccaccuccugcugguggccgccgggcucgaggcccccuuccuguaccuguacgcgcucgucuacuuccugcacagcaucaacuucgugcggaucaucaugcgccuguggcucugcuggaagugccgguccaagaacccccugcuguacgacgccaacuacuuccucugcuggcacaccaacugcuacgacuacugcaucccguacaacagcgugaccuccagcaucgucaucacguccggcgacggcaccaccagccccaucuccgagcacgacuaccagaucgggggcuacaccgagaagugggagagcggggugaaggacugcgugguccugcacuccuacuucacgagcgacuacuaccagcuguacuccacccagcucagcaccgacaccggcguggagcacgugacguucuucaucuacaacaagaucgucgacgagcccgaggagcacgugcagauccacaccaucgacggguccagcggcguggucaaccccgugauggagccgaucuacgacgagcccaccaccacgaccagcgugccccuguga

SEQ ID NO: 18856 - RNA, 828 nt, Artificial Sequence
  SARS-CoV-2__MT358656.1__ORF3a protein CDS gc
auggaccuguucaugcgcaucuucaagaucggcaccgugacccucaagcagggggagaucaaggacgccacgcccagcgacuucguccgggccaccgcgaccaucccgauccaggccucccugcccuucggcuggcugaucguggggguggcccuccuggccgucuuccagagcgccuccaagaucaucacccugaagaagcgcuggcagcucgcgcugagcaagggcgugcacuucgugugcaaccugcuccugcuguucgucacgguguacucccaccuccugcugguggccgccgggcucgaggcccccuuccuguaccuguacgcgcucgucuacuuccugcagagcaucaacuucgugcggaucaucaugcgccuguggcucugcuggaagugccgguccaagaacccccugcuguacgacgccaacuacuuccucugcuggcacaccaacugcuacgacuacugcaucccguacaacagcgugaccuccagcaucgucaucaccuccggcgacggcacgaccagccccaucuccgagcacgacuaccagaucgggggcuacaccgagaagugggagagcggggugaaggacugcgugguccugcacuccuacuucaccagcgacuacuaccagcuguacuccacgcagcucagcaccgacaccggcguggagcacgugaccuucuucaucuacaacaagaucgucgacgagcccgaggagcacgugcagauccacacgaucgacggguccagccgcguggucaaccccgugauggagccgaucuacgacgagcccaccaccaccacgagcgugccccuguga

SEQ ID NO: 18857 - RNA, 828 nt, Artificial Sequence
  SARS-CoV-2__MT344957.1__ORF3a protein CDS gc
auggaccuguucaugcgcaucuucaccaucggcaccgugacgcucaagcagggggagaucaaggacgccacccccagcgacuucguccgggccaccgcgaccaucccgauccaggccucccugagcuucggcuggcugaucguggggguggcccuccuggccgucuuccacuccgccagcaagaucaucacgcugaagaagcgcuggcagcucgcgcuguccaagggcgugcacuucgugugcaaccugcuccugcuguucgucaccguguacagccaccuccugcugguggccgccgggcucgaggcccccuuccuguaccuguacgcgcucgucuacuuccugcaguccaucaacuucgugcggaucaucaugcgccuguggcucugcuggaagugccggagcaagaacccccugcuguacgacgccaacuacuuccucugcuggcacaccaacugcuacgacuacugcauccccuacaacuccgugaccagcuccaucgucaucacgagcggcgacggcaccaccuccccgaucagcgagcacgacuaccagaucgggggcuacaccgagaagugggaguccggggugaaggacugcgugguccugcacagcuacuucacguccgacuacuaccagcuguacagcacccagcucuccaccgacaccggcguggagcacgugacguucuucaucuacaacaagaucgucgacgagcccgaggagcacgugcagauccacaccaucgacgggagcagcggcguggucaaccccgugauggagcccaucuacgacgagccgaccaccacgaccuccgugccccuguga

SEQ ID NO: 18858 - RNA, 828 nt, Artificial Sequence
  SARS-CoV-2__MT326054.1__ORF3a protein CDS gc
auggaccuguucaugcgcaucuucaccaucggcaccgugacgcucaagcagggggagaucaaggacgccacccccagcgacuucguccgggccaccgcgaccaucccgauccaggccucccugcccuucggcuggcugaucguggggguggcccuccuggccgucuuccacagcgccuccaagaucaucacgcugaagaagcgcuggcagcucgcgcugagcaagggcgugcacuucgugugcaaccugcuccugcuguucgucaccguguacucccaccuccugcugguggccgccgggcucgaggcccccuuccuguaccuguacgcgcucgucuacuuccugcagagcaucaacuucgugcggaucaucaugcgccuguggcucugcuggaagugccgguccaagaacccccugcuguacgacgccaacuacuuccucugcuggcacaucaacugcuacgacuacugcaucccguacaacagcgugaccuccagcaucgucaucaccuccggcgacggcacgaccagccccaucuccgagcacgacuaccagaucgggggcuacaccgagaagugggagagcggggugaaggacugcgugguccugcacuccuacuucaccagcgacuacuaccagcuguacuccacgcagcucagcaccgacaccggcguggagcacgugaccuucuucaucuacaacaagaucgucgacgagcccgaggagcacgugcagauccacacgaucgacggguccagcggcguggucaaccccgugauggagccgaucuacgacgagcccaccaccaccacgagcgugccccuguga

SEQ ID NO: 18859 - RNA, 828 nt, Artificial Sequence
  SARS-CoV-2__MT326096.1__ORF3a protein CDS gc
auggaccuguucaugcgcaucuucaccaucggcaccgugacgcucaagcagggggagaucaaggacgccacccccagcgacuucguccgggccaccgcgaccaucccgauccaggccucccugcccuucggcuggcugaucguggggguggcccuccuggccgucuuccacagcgccuccaagaucaucacgcugaagaagcgcuggcagcucgcgcugagcaagggcgugcacuucgugugcaaccugcuccugcuguucgucaccguguacucccaccucuuccugguggccgccgggcuggaggcccccuuccucuaccuguacgcgcuggucuacuuccuccagagcaucaacuucgugcggaucaucaugcgccuguggcugugcuggaagugccgguccaagaacccccuccuguacgacgccaacuacuuccugugcuggcacaccaacugcuacgacuacugcaucccguacaacagcgugaccuccagcaucgucaucacguccggcgacggcaccaccagccccaucuccgagcacgacuaccagaucgggggcuacaccgagaagugggagagcggggugaaggacugcgugguccuccacuccuacuucacgagcgacuacuaccagcuguacuccacccagcugagcaccgacaccggcguggagcacgugacguucuucaucuacaacaagaucgucgacgagcccgaggagcacgugcagauccacaccaucgacggguccagcggcguggucaaccccgugauggagccgaucuacgacgagcccaccaccacgaccagcgugccccucuga

SEQ ID NO: 18860 - RNA, 828 nt, Artificial Sequence
  SARS-CoV-2__MT326151.1__ORF3a protein CDS gc
auggaccuguucaugcgcaucuucaccaucggcaccgugacgcucaagcagggggagaucaaggacgccacccccagcgacuucguccgggccaccgcgaccaucccgauccaggccucccugcccuucggcuggcugaucguggggguggcccuccuggccgucuuccagagcgccuccaagaucaucacgcugaagaagcgcuggcagcucagccuguccaagggcgugcacuucgugugcaaccugcuccugcuguucgucaccguguacagccaccuccugcugguggcggccgggcucgaggcccccuuccuguaccuguacgcccucgucuacuuccugcaguccaucaacuucgugcggaucaucaugcgccuguggcucugcuggaagugccggagcaagaacccccugcuguacgacgcgaacuacuuccucugcuggcacaccaacugcuacgacuacugcaucccguacaacuccgugaccagcuccaucgucaucacgagcggcgacggcaccaccucccccaucagcgagcacgacuaccagaucgggggcuacaccgagaagugggaguccggggugaaggacugcgugguccugcacagcuacuucacguccgacuacuaccagcuguacagcacccagcucuccaccgacaccggcguggagcacgugacguucuucaucuacaacaagaucgucgacgagcccgaggagcacgugcagauccacaccaucgacgggagcagcggcguggucaaccccgugauggagccgaucuacgacgagcccaccaccacgaccuccgugccccuguga

SEQ ID NO: 18861 - RNA, 828 nt, Artificial Sequence
  SARS-CoV-2__MT325635.1__ORF3a protein CDS gc
auggaccuguucaugcgcaucuucaccaucggcaccgugacgcucaagcagggggagaucaaggacgccacccccagcgacuucguccgggccaccgcgaccaucccgauccaggccucccugcccuucggcuggcugaucguggggguggcccuccuggccgucuuccacagcgccuccaagaucaucacgcugaagaagcgcuggcagcucgcgcugagcaagggcgugcacuucgugugcaaccugcuccugcuguucgucaccguguacucccaccuccugcugguggccgccgggcucgaggcccccuuccuguaccuguacgcgcucgucuacuuccugcagagcaucaacuucgugcggaucaucaugcgccuguggcucugcuggaagugccgguccaagaacccccugcuguacgacgccaacuacuuccucugcuggcacaccaacugcuacgacuacugcaucccguacaacagcgugaccuccagcaucgucaucacguccggcgacggcaccaccagccccaucuccgagcacgacuaccagaucgggggcuacaccgagaagugggagagcggggugaaggacugcgugguccugcacuccuacuucacgagcgacuacuaccagcuguacuccacccagcucagcaccgacaccggcguggagcacgugacguucuucaucuacaacaagaucgucgacgaccccgaggagcacgugcagauccacaccaucgacggguccagcggcguggucaaccccgugauggagccgaucuacgacgagcccaccaccacgaccagcgugccccuguga

SEQ ID NO: 18862 - RNA, 828 nt, Artificial Sequence
  SARS-CoV-2__MT328033.1__ORF3a protein CDS gc
auggaccuguucaugcgcaucuucaccaucggcaccgugacgcucaagcagggggagaucaaggacgccacccccagcgacuucguccgggccaccgcgaccaucccgauccaggccucccugcccuucggcuggcugaucguggggguggcccuccuggccgucuuccagagcgccuccaagaucaucacgcugaagaagcgcuggcagcucgcgcugagcaagggcgugcacuucgugugcaaccugcuccugcuguucgucaccguguacucccaccuccugcugguggccgccgggcucgaggcccccuuccuguaccuguacgcgcucgucuacuuccugcagagcaucaacuucgugcggaucaucaugcgcaucuggcugugcuggaagugccgguccaagaacccccuccuguacgacgccaacuacuuccugugcuggcacaccaacugcuacgacuacugcaucccguacaacagcgugaccuccagcaucgucaucacguccggcgacggcaccaccagccccaucuccgagcacgacuaccagaucgggggcuacaccgagaagugggagagcggggugaaggacugcgugguccuccacuccuacuucacgagcgacuacuaccagcuguacuccacccagcugagcaccgacaccggcguggagcacgugacguucuucaucuacaacaagaucgucgacgagcccgaggagcacgugcagauccacaccaucgacggguccagcggcguggucaaccccgugauggagccgaucuacgacgagcccaccaccacgaccagcgugccccucuga

SEQ ID NO: 18863 - RNA, 819 nt, Artificial Sequence
  SARS-CoV-2__MT293186.1__ORF3a protein CDS gc
auggaccuguucaugcgcauccucaccgugacccugaagcagggcgagaucaaggacgccacgcccagcgacuucguccgggccaccgcgaccaucccgauccaggccucccugcccuucggguggcucaucgugggcguggcccugcuggccgucuuccagagcgccuccaagaucaucacccucaagaagcgcuggcagcuggcgcugagcaagggggugcacuucgugugcaaccuccugcugcuguucgucacgguguacucccaccuccugcucguggccgccggccuggaggcccccuuccuguaccucuacgcgcuggucuacuuccugcagagcaucaacuucgugcggaucaucaugcgccucuggcugugcuggaagugccgguccaagaacccccugcucuacgacgccaacuacuuccugugcuggcacaccaacugcuacgacuacugcaucccguacaacagcgugaccuccagcaucgucaucaccuccggggacggcacgaccagccccaucuccgagcacgacuaccagaucggcggguacaccgagaagugggagagcggcgugaaggacugcgugguccugcacuccuacuucaccagcgacuacuaccagcucuacuccacgcagcugagcaccgacaccgggguggagcacgugaccuucuucaucuacaacaagaucgucgacgagcccgaggagcacgugcagauccacacgaucgacggcuccagcgggguggucaaccccgugauggagccgaucuacgacgagcccaccaccaccacgagcgugccccuguga

SEQ ID NO: 18864 - RNA, 828 nt, Artificial Sequence
  SARS-CoV-2__MT263428.1__ORF3a protein CDS gc
auggaccuguucaugcgcaucuucaccaucggcaccgugacgcucaagcagggggagaucaaggacgccacccccagcgacuucguccgggccaccgcgaccaucccgauccaggccucccugcccuucggcuggcugaucguggggguggcccuccuggccgucuuccacagcgccuccaagaucaucacgcugaagaagcgcuggcagcucgcgcugagcaagggcgugcacuucgugugcaaccugcuccugcuguucgucaccguguacucccaccuccugcugguggccgccguccucgaggcccccuuccuguaccuguacgcgcucguguacuuccugcagagcaucaacuucgugcggaucaucaugcgccuguggcucugcuggaagugccgguccaagaacccccugcuguacgacgccaacuacuuccucugcuggcacaccaacugcuacgacuacugcaucccguacaacagcgucaccuccagcaucgugaucacguccggggacggcaccaccagccccaucuccgagcacgacuaccagaucggcggguacaccgagaagugggagagcggcgugaaggacugcgucgugcugcacuccuacuucacgagcgacuacuaccagcuguacuccacccagcucagcaccgacaccgggguggagcacgucacguucuucaucuacaacaagaucguggacgagcccgaggagcacgugcagauccacaccaucgacggcuccagcggggucgugaaccccgugauggagccgaucuacgacgagcccaccaccacgaccagcgucccccuguga

SEQ ID NO: 18865 - RNA, 828 nt, Artificial Sequence
  SARS-CoV-2__MT263448.1__ORF3a protein CDS gc
auggaccuguucaugcgcaucuucaccaucggcaccgugacgcucaagcagggggagaucaaggacgccacccccagcgacuucguccgggccaccgcgaccaucccgauccaggccucccugcccuucggcuggcugaucguggggguggcccuccuggccgucuuccagagcgccuccaagaucaucacgcugaagaagcgcuggcagcucgcgcugagcaagggcgugcacuucgugugcaaccugcuccugcuguucgucaccguguacucccaccuccugcugguggccgccgggcucgaggcccccuuccuguaccuguacgcgcucgucuacuuccugcagagcaucaacuucgugcggaucaucaugcgccuguggcucugcuggaagugccgguccaagaacccccugcuguacgacgccaacuacuuccucugcuggcacaccaacuacuacgacuacugcaucccguacaacagcgugaccuccagcaucgucaucacguccggcgacggcaccaccagccccaucuccgagcacgacuaccagaucgggggcuacaccgagaagugggagagcggggugaaggacugcgugguccugcacuccuacuucacgagcgacuacuaccagcuguacuccacccagcucagcaccgacaccggcguggagcacgugacguucuucaucuacaacaagaucgucgacgagcccgaggagcacgugcagauccacaccaucgacggguccagcggcguggucaaccccgugauggagccgaucuacgacgagcccaccaccacgaccagcgugccccuguga

SEQ ID NO: 18866 - RNA, 828 nt, Artificial Sequence
  SARS-CoV-2__MT159712.2__ORF3a protein CDS gc
auggaccuguucaugcgcaucuucaccaucggcaccgugacgcucaagcagggggagaucaaggacgccacccccagcgacuucguccgggccaccgcgaccaucccgauccaggccucccugcccuucggcuggcugaucguggggguggcccuccuggccgucuuccagagcgccuccaagaucaucacgcugaagaagcgcuggcagcucgcgcugagcaagggcgugcacuucgugugcaaccugcuccugcuguucgucaccguguacucccaccuccugcugguggccgccgggcucgaggcccccuuccuguaccuguacgcgcucgucuacuuccugcagagcaucaacuucgugcggaucaucaugcgccuguggcucugcuggaagugccggcccaagaacccgcugcuguacgacgccaacuacuuccucugcuggcacaccaacugcuacgacuacugcauccccuacaacuccgugaccagcuccaucgucaucacgagcggcgacggcaccaccucccccaucagcgagcacgacuaccagaucgggggcuacaccgagaagugggaguccggggugaaggacugcgugguccugcacagcuacuucacguccgacuacuaccagcuguacagcacccagcucuccaccgacaccggcguggagcacgugacguucuucaucuacaacaagaucgucgacgagcccgaggagcacgugcagauccacaccaucgacgggagcuccggcguggucaacccggugauggagcccaucuacgacgagcccaccaccacgaccagcgugccccuguga

SEQ ID NO: 18867 - RNA, 828 nt, Artificial Sequence
  SARS-CoV-2__MT039890.1__ORF3a protein CDS gc
auggaccuguucaugcgcaucuucaccaucggcaccgugacgcucaagcagggggagaucaaggacgccacccccagcgacuucguccgggccaccgcgaccaucccgauccaggccucccugcccuucggcuggcugaucguggggguggcccuccuggccgucuuccagagcgccuccaagaucaucacgcugaagaagcgcuggcagcucgcgcugagcaagggcgugcacuucgugugcaaccugcuccugcuguucgucaccguguacucccaccuccugcugguggccgccgggcucgaggcccccuuccuguaccuguacgcgcucgucuacuuccugcagagcaucaacuucgugcggaucaucaugcgccugcuccugugcuggaagugccgguccaagaacccccugcucuacgacgccaacuacuuccugugcuggcacaccaacugcuacgacuacugcaucccguacaacagcgugaccuccagcaucgucaucacguccggcgacggcaccaccagccccaucuccgagcacgacuaccagaucgggggcuacaccgagaagugggagagcggggugaaggacugcgugguccugcacuccuacuucacgagcgacuacuaccagcucuacuccacccagcugagcaccgacaccggcguggagcacgugacguucuucaucuacaacaagaucgucgacgagcccgaggagcacgugcagauccacaccaucgacguguccagcggggucgugaaccccgugauggagccgaucuacgacgagcccaccaccacgaccagcgucccccuguga

SEQ ID NO: 18868 - RNA, 339 nt, Artificial Sequence
  MERS-CoV/MERS-CoV-Jeddah-human-1__KF958702.1__ORF8b protein CDS gc
augcccaucccgccccugcgcaagaugcugggcaucgggggcgaccggaccgagaagcugauccccgggauggagcugagcaacuggcuccccggcgggaccuccacgacccuggagcuggacccgaagcagcacagccacuccggccuccugcgcauggccagcuucggcuccaugaagauggcgccccugaugcuccugcagcugcucgggcggggcacccugaccaugauccagcugcuccugcacaacagccugcccgugcucuccuuccugaagacgagcacccugcgcgggcucgaggccaucgucaaccaccuccaggagccccuggccuga

SEQ ID NO: 18869 - RNA, 339 nt, Artificial Sequence
  MERS-CoV/Al-Hasa_4_2013__KF186564.1__ORF8b protein CDS gc
augcccaucccgccccugcgcaagaugcucggcaucgggggcgaccggaccgagaagcugauccccgggauggagcugagcaacuggcuccccggcgggaccuccacgacccuggagcuggacccgaagcagcacagccacuccggccuccugcgcauggccagcuucggcuccaugaagauggcgccccugaugcuccugcagcugcucgggcggggcacccugaccaugauccagcugcuccugcacaacagccgccccgugcuguccuuccucaagacgagcacccugcgggggcuggaggccaucgucaaccaccuccaggagccccuggccuga

SEQ ID NO: 18870 - RNA, 339 nt, Artificial Sequence; identical to SEQ ID NO: 18869
  MERS-CoV/Riyadh_14_2013__KJ156934.1__ORF8b protein CDS gc

SEQ ID NO: 18871 - RNA, 120 nt, Artificial Sequence
  SARS-CoV/Tor2__NC_004718.3__ORF8a protein CDS gc
augaagcugcucaucgugcugaccugcaucagccugugcuccugcaucugcaccgucgugcagcgcugcgccagcaacaagccccacgugcucgaggacccgugcaagguccagcacuga

SEQ ID NO: 18872 - RNA, 255 nt, Artificial Sequence
  SARS-CoV/Tor2__NC_004718.3__ORF8b protein CDS gc
augugccugaagauccucgugcgcuacaacacccggggcaacaccuacagcacggccuggcugugcgcccuggggaagguccuccccuuccaccgcuggcacaccauggugcagaccugcaccccgaacgugacgaucaacugccaggaccccgcgggcggggcccugaucgcccggugcugguaccugcacgagggccaccagaccgccgccuuccgcgacguccucguggugcugaacaagcggaccaacuga

SEQ ID NO: 18873 - RNA, 366 nt, Artificial Sequence
  Bat SARS-like CoV/WIV1__KF367457.1__ORF8 protein CDS gc
augaagcugcucaucgugcugggccugcucaccagcgucuacugcaugcacaaggagugcuccauccaggagugcugcgagaaccagcccuuccagcuggaggaccccugccccauccacuacuacagcgacugguucgugaagaucgggccccgcaaguccgcccggcuggugcagcucugcgccggcgaguacgggcaccgcguccccauccacuacgagauguucggcaacuacaccaucagcugcgagccgcuggagaucaacugccagaacccgcccguggggucccugaucgugcggugcagcuacgacgucgacuucauggaguaccacgacgugcgcgugguccucgacuucaucuga

SEQ ID NO: 18874 - RNA, 366 nt, Artificial Sequence
  SARS-CoV-2/Wuhan-Hu-1__NC_045512.2/MN908947.2/EPI_ISL_402128__ORF 8 protein (ORF8) CDS gc
augaaguuccugguguuccucggcaucaucaccaccgucgccgccuuccaccaggagugcagccugcaguccugcacgcagcaccagcccuacgugguggacgacccgugccccauccacuucuacagcaagugguacauccgcgucggggcccggaaguccgcgccccugaucgagcucugcguggacgaggccggcagcaagucccccauccaguacaucgacaucgggaacuacaccgugagcugccugccguucaccaucaacugccaggagcccaagcugggcucccucgucgugcgcugcagcuucuacgaggacuuccuggaguaccacgacgugcgggucgugcuggacuucaucuga

SEQ ID NO: 18875 - RNA, 366 nt, Artificial Sequence
  SARS-CoV-2__MT919788.1__ORF8 protein CDS gc
augaaguuccugguguuccucggcaucaucaccaccgucgccgccuuccaccaggagugcagccugcaguccugcacgcagcaccagcccuacgugguggacgacccgugccccauccacuucuacagcaagugguacauccgcgucggggcccggaaguccgcgccccugaucgagcucugcguggacgaggccggcuucaagagccccauccaguacaucgacaucgggaacuacaccguguccugccugccguucaccaucaacugccaggagcccaagcugggcagccucgucgugcgcugcuccuucuacgaggacuuccuggaguaccacgacgugcgggucgugcuggacuucaucuga

SEQ ID NO: 18876 - RNA, 366 nt, Artificial Sequence
  SARS-CoV-2__MT919994.1__ORF8 protein CDS gc
augaaguuccugguguuccucggcaucaucaccaccgucgccgccuuccaccaggagugcagccugcaguccugcacgcagcaccagcccuacgugguggacgacccgugccccauccacuucuacagcaagugguacauccgcgucggggcccggaaguccgcgccccugaucgagcucugcguggacgaggccggcagcaagucccccauccaguacaucgacaucgggaacuacaccgugagcugcuccccguucaccaucaacugccaggagcccaagcugggcagccuggucgugcgcugcuccuucuacgaggacuuccucgaguaccacgacgugcgggucgugcuggacuucaucuga

SEQ ID NO: 18877 - RNA, 366 nt, Artificial Sequence
  SARS-CoV-2__MT919999.1__ORF8 protein CDS gc
augaaguuccugguguuccucggcaucaucaccaccgucgccgccuuccaccaggagugcagccugcaguccugcacgcagcaccagcccuacgugguggacgacccgugccccauccacuucuacagcaagugguacauccgcgucggggcccggaaguccgcgccccugaucgagcucugccuggacgaggccggcagcaagucccccauccaguacaucgacaucgggaacuacaccgugagcugcuccccguucaccaucaacugccaggagcccaagcugggcagccucgugguccgcugcuccuucuacgaggacuuccuggaguaccacgacgugcgggugguccuggacuucaucuga

SEQ ID NO: 18878 - RNA, 366 nt, Artificial Sequence
  SARS-CoV-2__MT920037.1__ORF8 protein CDS gc
augaaguuccugguguuccucggcaucaucaccaccgucgccgccuuccaccaggagugcagccugcagcugugcacgcagcaccagcccuacgugguggacgacccgugccccauccacuucuacuccaagugguacauccgcgucggggcccgcaagagcgcgccccucaucgagcugugcguggacgaggccggcuccaagcugcccauccaguacaucgacaucgggaacuacaccgugagcugccucccguucaccaucaacugccaggagcccaagcugggcucccuggucgugcggugcagcuucuacgaggacuuccucgaguaccacgacgugcgggucgugcuggacuucaucuga

SEQ ID NO: 18879 - RNA, 366 nt, Artificial Sequence
  SARS-CoV-2__MT921009.1__ORF8 protein CDS gc
augaaguuccugguguuccucggcaucaucaccaccgucgccgccuuccaccaggagugcagccugcagcugugcacgcagcaccagcccuacgugguggacgacccgugccccauccacuucuacuccaagugguacauccgcgucggggcccgcaagagcgcgccccucaucgagcugugcguggacgaggccggcuccaagagccccauccaguacaucgacaucgggaacuacaccguguccugccugccguucaccaucaacugccaggagcccaagcucggcagccuggucgugcggugcuccuucuacgaggacuuccuggaguaccacgacgugcgggucgugcucgacuucaucuga

SEQ ID NO: 18880 - RNA, 366 nt, Artificial Sequence
  SARS-CoV-2__MT913071.1__ORF8 protein CDS gc
augaaguuccugguguuccucggcaucaucaccaccgucgccgccuuccaccaggagugcagccugcaguccugcacgcagcaccagcccuacgugguggacgacccgugccccauccacuucuacagcaagugguacauccgcgucggggcccggaaguccgcgccccugaucgagcucugcguggacgagagcggcuccaagagccccauccaguacaucgacaucgggaacuacaccguguccugccugccguucaccaucaacugccaggagcccaagcugggcagccucgucgugcgcugcuccuucuacgaggacuuccuggaguaccacgacgugcgggucgugcuggacuucaucuga

SEQ ID NO: 18881 - RNA, 366 nt, Artificial Sequence
  SARS-CoV-2__MT913109.1__ORF8 protein CDS gc
augaaguuccugguguuccucggcaucaucaccaccgucgccgccuuccaccaggagugcagccugcaguccugcacgcagcaccagcccuacgugguggacgacagcugcccgauccacuucuacuccaagugguacauccgcgucggggcccgcaagagcgcgccccugaucgagcucugcguggacgaggccggcuccaagagccccauccaguacaucgacaucgggaacuacaccguguccugccugcccuucaccaucaacugccaggagccgaagcugggcagccucgucgugcggugcuccuucuacgaggacuuccuggaguaccacgacgugcgggucgugcuggacuucaucuga

SEQ ID NO: 18882 - RNA, 366 nt, Artificial Sequence
  SARS-CoV-2__MT911807.1__ORF8 protein CDS gc
augaaguuccugguguuccucggcaucaucaccaccgucgccgccuuccaccaggagugcagccugcaguccugcacgcagcaccagcccuacgugguggacgacccgugccccauccacuucuacagcaagugguacauccgcgucggggcccggaaguccgcgccccugaucgagcucugcguggacgaggccggcagcaagucccccauccaguacaucgacaucgggaacuacaccgugagcugccugccguucaccaucaacugccaggagcccaagcugggcucccucgucgugcgcugcagcuucuacgaggacuuccugggguaccacgacgugcgggucgugcuggacuucaucuga

SEQ ID NO: 18883 - RNA, 366 nt, Artificial Sequence
  SARS-CoV-2__MT893659.1__ORF8 protein CDS gc
augaaguuccugguguuccucggcaucaucaccaccgucgccgccuuccaccaggagugcagccugcaguccugcacgcagcaccagcccuacgugguggacgacccgugccccauccacuucuacagcaagugguacauccgcgucggggcccggaaguccgcgccccugaucgagcucugcguggacgaggugggcagcaagucccccauccaguacaucgacaucgggaacuacaccgucagcugccugccguucaccaucaacugccaggagcccaagcugggcucccucguggugcgcugcagcuucuacgaggacuuccuggaguaccacgacguccggguggugcuggacuucaucuga

SEQ ID NO: 18884 - RNA, 366 nt, Artificial Sequence
  SARS-CoV-2__MT893685.1__ORF8 protein CDS gc
augaaguuccugguguuccucggcaucaucaccaccgucgccgccuuccaccaggagugcagccugcaguccugcacgcagcaccagcccuacgugguggacgacccgugccccauccacuucuacagcaaguggcacauccgcgucggggcccggaaguccgcgccccugaucgagcucugcguggacgaggccggcagcaagucccccauccaguacaucgacaucgggaacuacaccgugagcugccugccguucaccaucaacugccaggagcccaagcugggcucccucgucgugcgcugcagcuucuacgaggacuuccuggaguaccacgacgugcgggucgugcuggacuucaucuga

SEQ ID NO: 18885 - RNA, 366 nt, Artificial Sequence
  SARS-CoV-2__MT890281.1__ORF8 protein CDS gc
augaaguuccugguguuccucggcaucaucaccaccgucgccgccuuccaccaggagugcagccugcaguccugcacgcagcaccagcccuaccugguggacgacccgugccccauccacuucuacagcaagugguacauccgcgugggggcccggaaguccgcgccccucaucgagcugugcgucgacgaggccggcagcaagucccccauccaguacaucgacaucgggaacuacaccgugagcugccugccguucaccaucaacugccaggagcccaagcucggcucccuggugguccgcugcagcuucuacgaggacuuccuggaguaccacgacgugcgggugguccucgacuucaucuga

SEQ ID NO: 18886 - RNA, 366 nt, Artificial Sequence
  SARS-CoV-2__MT890301.1__ORF8 protein CDS gc
augaaguuccugguguuccucggcaucaucaccaccgucgccgccuuccaccaggagugcagccugcaguccugcacgcagcaccagcccuacgugguggacgacccgugccccauccacuucuacagcaagugguacauccgcgucggggcccggaaguccgcgccccugaucgagcucugcguggacgagcccggcagcaaguccccgauccaguacaucgacaucgggaacuacaccgugagcugccugcccuucaccaucaacugccaggagcccaagcugggcucccucgucgugcgcugcagcuucuacgaggacuuccuggaguaccacgacgugcgggucgugcuggacuucaucuga

SEQ ID NO: 18887 - RNA, 366 nt, Artificial Sequence
  SARS-CoV-2__MT883499.1__ORF8 protein CDS gc
augaaguuccugguguuccucggcaucaucaccaccgucgccgccuuccaccaggagugcagccugcaguccugcacgcagcaccagcccuacgugguggacgacccgugccccauccacuucuacagcaagugguacauccgcgucggggcgcggaaguccgugccccugaucgagcucugcguggacgaggccggcagcaagucccccauccaguacaucgacaucgggaacuacaccgucagcugccugccguucaccaucaacugccaggagcccaagcugggcucccucguggugcgcugcagcuucuacgaggacuuccuggaguaccacgacguccggguggugcuggacuucaucuga

SEQ ID NO: 18888 - RNA, 366 nt, Artificial Sequence
  SARS-CoV-2__MT883503.1__ORF8 protein CDS gc
augaaguuccugguguuccucggcaucaucaccaccgucgccgccuuccaccaggagugcagccugcaguccugcacgcagcaccagcccuacgugguggacgacccgugccccauccacuucuacagcaagugguacauccgcgucggggcccggaaguccgcgccccugaucgagcucugccuggacgaggccggcagcaagucccccauccaguacaucgacaucgggaacuacaccgugagcugccugccguucaccaucaacugccaggagcccaagcucggcucccuggugguccgcugcagcuucuacgaggacuuccuggaguaccacgacgugcgggugguccucgacuucaucuga

SEQ ID NO: 18889 - RNA, 378 nt, Artificial Sequence
  SARS-CoV-2__MT886367.1__ORF8 protein CDS gc
augaaguuccugguguuccucggcaucaucaccaccgucgccgccuuccaccaggagugcagccugcaguccugcacgcagcaccagcccuacgugguggacgacccgugccccauccacuucuacagcaagugguacauccgcgucggggcccggaaguccgcgccccugaucgagcucugcguggacgaggccggcagcaagucccccauccaguacaucgacaucgggaacuacaccgugagcugcuccccguucaccaucaacugccaggagcccaagcugggcagccuggucgugcgcugcuccuucuacgaggacuuccucgaguaccacgacgugcgggucgugcuggacuucagcaagcgcaccaacuga

SEQ ID NO: 18890 - RNA, 366 nt, Artificial Sequence
  SARS-CoV-2__MT873075.1__ORF8 protein CDS gc
augaaguuccugguguuccucggcaucaucaccaccgucgccgccuuccaccaggagugcagccugcaguccuucacgcagcaccagcccuacgugguggacgacccgugccccauccacuucuacagcaagugguacauccgcgucggggcccggaaguccgcgccccugaucgagcucugcguggacgaggccggcagcaagucccccauccaguacaucgacaucgggaacuacaccgugagcugccugccguucaccaucaacugccaggagcccaagcugggcucccucgucgugcgcugcagcuucuacgaggacuuccuggaguaccacgacgugcgggucgugcuggacuucaucuga

SEQ ID NO: 18891 - RNA, 366 nt, Artificial Sequence
  SARS-CoV-2__MT873148.1__ORF8 protein CDS gc
augaaguuccugguguuccucggcaucaucaccaccgucgccgccuuccaccaggagugcauccugcagagcugcacgcagcaccagcccuacgugguggacgacccgugccccauccacuucuacuccaagugguacauccgcgucggggcccgcaagagcgcgccccugaucgagcucugcguggacgaggccggcuccaagagccccauccaguacaucgacaucgggaacuacaccguguccugccugccguucaccaucaacugccaggagcccaagcugggcagccucgucgugcggugcuccuucuacgaggacuuccuggaguaccacgacgugcgggucgugcuggacuucaucuga

SEQ ID NO: 18892 - RNA, 366 nt, Artificial Sequence
  SARS-CoV-2__MT873152.1__ORF8 protein CDS gc
augaaguuccugguguuccucggcaucaucaccaccgucgccgccuuccaccaggagugcagccugcaguccugcauccagcaccagcccuacgugguggacgacccgugccccauccacuucuacagcaagugguacauccgcgucggggcccggaaguccgcgccccugaucgagcucugcguggacgaggccggcagcaagucccccauccaguacaucgacaucgggaacuacacggugagcugccugccguucaccaucaacugccaggagcccaagcugggcucccucgucgugcgcugcagcuucuacgaggacuuccuggaguaccacgacgugcgggucgugcuggacuucaucuga

SEQ ID NO: 18893 - RNA, 366 nt, Artificial Sequence
  SARS-CoV-2__MT873255.1__ORF8 protein CDS gc
augaaguuccugguguuccucggcaucaucaccaccgucgccgccuuccaccaggagugcagccugcaguccugcacgcagcaccagcccuacgugguggacgacccgugccugauccacuucuacagcaagugguacauccgcgucggggcccggaaguccgcgccccucaucgagcugugcguggacgaggccggcagcaagucccccauccaguacaucgacaucgggaacuacaccgugagcugccugcccuucaccaucaacugccaggagccgaagcucggcucccuggucgugcgcugcagcuucuacgaggacuuccuggaguaccacgacgugcgggucgugcucgacuucaucuga

SEQ ID NO: 18894 - RNA, 366 nt, Artificial Sequence
  SARS-CoV-2__MT873439.1__ORF8 protein CDS gc
augaaguuccugguguuccucggcaucaucaccaccgucgccgccuuccaccaggagugcagccugcaguccugcacgcagcaccagcccuacgugguggacgacccgugccccauccacuucuacagcaagugguacauccgcgucggggcccggaaguccgcgccccugaucgagcucugcguggacgaggccggcagcaagucccccauccaguacaucgacaucgggaacuacaccgugagcugccugccguucaccaucaacugccaggagcccaagcugggcucccucgucgugcgcugcagcuucuacgaggacuuccuggaguaccacgacgugcgggucgugcuggaccucaucuga

SEQ ID NO: 18895 - RNA, 366 nt, Artificial Sequence
  SARS-CoV-2__MT873503.1__ORF8 protein CDS gc
augaaguuccugguguuccucggcaucaucaccaccgucacggccuuccaccaggagugcagccugcaguccugcacccagcaccagcccuacgugguggacgacccgugccccauccacuucuacagcaagugguacauccgcgucggggcccggaaguccgcgccccugaucgagcucugcguggacgaggccggcagcaagucccccauccaguacaucgacaucgggaacuacaccgugagcugccugccguucaccaucaacugccaggagcccaagcugggcucccucgucgugcgcugcagcuucuacgaggacuuccuggaguaccacgacgugcgggucgugcuggacuucaucuga

SEQ ID NO: 18896 - RNA, 366 nt, Artificial Sequence
  SARS-CoV-2__MT873509.1__ORF8 protein CDS gc
augaaguuccugguguuccucggcaucaucaccaccgucgccgccuuccaccaggagugcagccugcagcugugcacgcagcaccagcccuacgugguggacgacuccugcccgauccacuucuacagcaagugguacauccgcgucggggcccggaaguccgcgccccucaucgagcugugcguggacgaggccggcagcaagucccccauccaguacaucgacaucgggaacuacaccgugagcugccugcccuucaccaucaacugccaggagccgaagcucggcucccuggucgugcgcugcagcuucuacgaggacuuccuggaguaccacgacgugcgggucgugcucgacuucaucuga

SEQ ID NO: 18897 - RNA, 366 nt, Artificial Sequence
  SARS-CoV-2__MT875354.1__ORF8 protein CDS gc
augaaguuccugguguuccucggcaucaucaccaccgucgccgccuuccaccaggagugcagccugcaguccugcacgcagcaccagcccuacgugguggacgacccgugccccauccacuucuacagcaagugguacauccgcgucggggcccggaaguccgcgccccugaucgagcucugcguggacgaggccggcagcaagucccccauccaguacaucgacaucgggaacuacaccgugagcugccugccguucaccaucuacugccaggagcccaagcugggcucccucgucgugcgcugcagcuucuacgaggacuuccuggaguaccacgacgugcgggucgugcuggacuucaucuga

SEQ ID NO: 18898 - RNA, 366 nt, Artificial Sequence
  SARS-CoV-2__MT876599.1__ORF8 protein CDS gc
augaaguuccugguguuccucggcaucaucaccaccgucgccgccuuccaccaggagugcagccugcaguccugcacgcagcaccagcccuacgugguggacgacccgugccccguccacuucuacagcaagugguacauccgcgugggggcccggaaguccgcgccccugaucgagcucugcguggacgaggccggcagcaagucccccauccaguacaucgacaucgggaacuacaccgucagcugccugccguucaccaucaacugccaggagcccaagcugggcucccucguggugcgcugcagcuucuacgaggacuuccuggaguaccacgacguccggguggugcuggacuucaucuga

SEQ ID NO: 18899 - RNA, 366 nt, Artificial Sequence
  SARS-CoV-2__MT872501.1__ORF8 protein CDS gc
augaaguuccugguguuccucggcaucaucaccaccgucgccgccuucuaccaggagugcagccugcaguccugcacgcagcaccagcccuacgugguggacgacccgugccccauccacuucuacagcaagugguacauccgcgucggggcccggaaguccgcgccccugaucgagcucugcguggacgaggccggcagcaagucccccauccaguacaucgacaucgggaacuacaccgugagcugcuccccguucaccaucaacugccaggagcccaagcugggcagccuggucgugcgcugcuccuucuacgaggacuuccucgaguaccacgacgugcgggucgugcuggacuucaucuga

SEQ ID NO: 18900 - RNA, 366 nt, Artificial Sequence
  SARS-CoV-2__MT846006.1__ORF8 protein CDS gc
augaaguuccugguguuccucggcaucaucaccaccgucgccgccuuccaccaggagugcagccugcaguccugcacgcagcaccagcccuacgugguggacgacccgugccccauccacuucuacagcaagugguacauccgcgucggggcccggaaguccgcgccccugaucgagcucugcguggacgaggccggcagcaagucccccauccaguacaucgacaucgggaacuacaccgugagcugccugccguucaccaucaacugccaggagcccaaguucggcucccuggucgugcgcugcagcuucuacgaggacuuccucgaguaccacgacgugcgggucgugcuggacuucaucuga

SEQ ID NO: 18901 - RNA, 366 nt, Artificial Sequence
  SARS-CoV-2__MT846007.1__ORF8 protein CDS gc
augaaguuccugguguuccucggcaucaucaccaccgucgccgccuuccaccaggagugcagccugcaguccugcacgcagcaccagcccuacgugguggacgacccgugccccauccacuucuacagcaagugguacauccgcgucggggcccggaaguccgcgccccugaucgagcucugcguggacgaggccggcagcaagucccccauccaguacaucgacaucgggaacuacaccgugagcugccugccguucaccaucaacugccaggagcccaagcugggcucccucgucgugcgcugcagcuucuacgaggacuuccuggacuaccacgacgugcgggucgugcuggacuucaucuga

SEQ ID NO: 18902 - RNA, 366 nt, Artificial Sequence
  SARS-CoV-2__MT846420.1__ORF8 protein CDS gc
augaaguuccugguguuccucggcaucaucaccaccgucgccgccuuccaccaggagugcagccugcaguccugcacgcagcaccagcccuacgugguggacgacccgugccccauccacuucuacagcaagugguacauccgcgucggggcccggaaguccgcgccccugaucgagcucugcgugggcgaggccgggagcaagucccccauccaguacaucgacaucggcaacuacaccgugagcugcuccccguucaccaucaacugccaggagcccaagcuggggagccuggucgugcgcugcuccuucuacgaggacuuccucgaguaccacgacgugcgggucgugcuggacuucaucuga

SEQ ID NO: 18903 - RNA, 366 nt, Artificial Sequence
  SARS-CoV-2__MT846452.1__ORF8 protein CDS gc
augaaguuccugguguuccucggcaucaucaccaacgucgccgccuuccaccaggagugcagccugcaguccugcacccagcaccagcccuacgugguggacgacccgugccccauccacuucuacagcaagugguacauccgcgucggggcccggaaguccgcgccccugaucgagcucugcguggacgaggccggcagcaagucccccauccaguacaucgacaucgggaacuacacggugagcugccugccguucaccaucaacugccaggagcccaagcugggcucccucgucgugcgcugcagcuucuacgaggacuuccuggaguaccacgacgugcgggucgugcuggacuucaucuga

SEQ ID NO: 18904 - RNA, 366 nt, Artificial Sequence
  SARS-CoV-2__MT846478.1__ORF8 protein CDS gc
augaaguuccugguguuccuccgcaucaucaccaccgucgccgccuuccaccaggagugcagccugcaguccugcacgcagcaccagcccuacgugguggacuacccgugccccauccacuucuacagcaagugguacauccgggucggcgcccgcaaguccgcgccccugaucgagcucugcguggacgaggccgggagcaagucccccauccaguacaucgacaucggcaacuacaccgugagcugccugccguucaccaucaacugccaggagcccaagcuggggucccucgucgugcggugcagcuucuacgaggacuuccuggaguaccacgacgugcgcgucgugcuggacuucaucuga

SEQ ID NO: 18905 - RNA, 366 nt, Artificial Sequence
  SARS-CoV-2__MT846647.1__ORF8 protein CDS gc
augaaguuccugguguuccucggcaucaucaccaccgucgccgccuuccaccaggagugcagccugcaguccugcacgcagcaccagcccuacgugguggacgacccgugccccauccacuucuacagcaagugguacauccgcgucggggcccggaaguccgcgccccugaucgagagcugcguggacgaggccggcuccaagagccccauccaguacaucgacaucgggaacuacaccguguccugccucccguucaccaucaacugccaggagcccaagcugggcagccuggucgugcgcugcuccuucuacgaggacuuccucgaguaccacgacgugcgggucgugcuggacuucaucuga

SEQ ID NO: 18906 - RNA, 366 nt, Artificial Sequence
  SARS-CoV-2__MT847226.1__ORF8 protein CDS gc
augaaguuccugguguuccucggcaucaucaucaccgucgccgccuuccaccaggagugcagccugcaguccugcacccagcaccagcccuacgugguggacgacccgugccccauccacuucuacagcaagugguacauccgcgucggggcccggaaguccgcgccccugaucgagcucugcguggacgaggccggcagcaagucccccauccaguacaucgacaucgggaacuacacggugagcugccugccguucaccaucaacugccaggagcccaagcugggcucccucgucgugcgcugcagcuucuacgaggacuuccuggaguaccacgacgugcgggucgugcuggacuucaucuga

SEQ ID NO: 18907 - RNA, 366 nt, Artificial Sequence
  SARS-CoV-2__MT843305.1__ORF8 protein CDS gc
augaaguuccugguguuccucggcaucaucaccaccgucgccgccuuccaccaggagugcagccugcaguccugcacgcagcaccagcccuacguggugaacgacccgugccccauccacuucuacagcaagugguacauccgcgucggggcccggaaguccgcgccccugaucgagcucugcguggacgaggccggcagcaagucccccauccaguacaucgacaucgggaacuacaccgugagcugccugccguucaccaucaacugccaggagcccaagcugggcucccucgucgugcgcugcagcuucuacgaggacuuccuggaguaccacgacgugcgggucgugcuggacuucaucuga

SEQ ID NO: 18908 - RNA, 366 nt, Artificial Sequence
  SARS-CoV-2__MT831123.1__ORF8 protein CDS gc
augaaguucuucguguuccugggcaucaucaccaccgucgccgccuuccaccaggagugcagccuccaguccugcacgcagcaccagcccuacgugguggacgacccgugccccauccacuucuacagcaagugguacauccgcgucggggcccggaaguccgcgccccugaucgagcugugcgugaacgaggccggcagcaagucccccauccaguacaucgacaucgggaacuacaccgugagcugccucccguucaccaucaacugccaggagcccaagcugggcucccuggucgugcgcugcagcuucuacgaggacuuccucgaguaccacgacgugcgggucgugcuggacuucaucuga

SEQ ID NO: 18909 - RNA, 366 nt, Artificial Sequence
  SARS-CoV-2__MT831186.1__ORF8 protein CDS gc
augaaguuccugguguuccucggcaucaucaccaccgucgccgccuuccaccaggagugcagccugcaguccugcacgcagcaccagcccuacgugguggacgacccgugccccauccacuucuacagcaagugguacauccgcgucggggccaucaaguccgcgccccugaucgagcucugcguggacgaggccggcagcaagucccccauccaguacaucgacaucgggaacuacaccgugagcugccugccguucaccaucaacugccaggagcccaagcugggcucccucgucgugcggugcagcuucuacgaggacuuccuggaguaccacgacgugcgcgucgugcuggacuucaucuga

SEQ ID NO: 18910 - RNA, 366 nt, Artificial Sequence
  SARS-CoV-2__MT831227.1__ORF8 protein CDS gc
augaaguuccugguguuccucggcaucaucaccaccgucgccgccuuccaccaggagugcagccugcaguccugcacgcagcaccagcccuacgugguggacgacccgagccccauccacuucuacuccaagugguacauccgcgucggggcccgcaagagcgcgccccugaucgagcucugcguggacgaggccggcuccaagagccccauccaguacaucgacaucgggaacuacaccguguccugccugccguucaccaucaacugccaggagcccaagcugggcagccucgucgugcggugcuccuucuacgaggacuuccuggaguaccacgacgugcgggucgugcuggacuucaucuga

SEQ ID NO: 18911 - RNA, 366 nt, Artificial Sequence
  SARS-CoV-2__MT831230.1__ORF8 protein CDS gc
augaaguuccugguguuccucggcaucaucaccaccgucgccgccuuccaccaggagugcagccugcaguccugcacgcagcaccagcccuacgugguggacgacccgugccccauccacuucuacagcaagugguacauccgcgucggggcccggaaguccgcgccccugaucgagcucugcgugaacgaggccggcagcaagucccccauccaguacaucgacaucgggaacuacaccgugagcugccugccguucaccaucaacugccaggagcccaagcugggcucccucgucgugcgcugcagcuucuacgaggacuuccuggaguaccacgacgugcgggucgugcuggacuucaucuga

SEQ ID NO: 18912 - RNA, 366 nt, Artificial Sequence
  SARS-CoV-2__MT831282.1__ORF8 protein CDS gc
augaaguuccugguguuccucggcaucaucaccaccgucgccgccuuccaccaggacugcagccugcaguccugcacgcagcaccagcccuacgugguggacgacccgugccccauccacuucuacagcaagugguacauccgcgucggggcccggaaguccgcgccccugaucgagcucugcguggacgaggccggcagcaagucccccauccaguacaucgacaucgggaacuacaccgugagcugcuccccguucaccaucaacugccaggagcccaagcugggcagccuggucgugcgcugcuccuucuacgaggacuuccucgaguaccacgacgugcgggucgugcuggacuucaucuga

SEQ ID NO: 18913 - RNA, 366 nt, Artificial Sequence
  SARS-CoV-2__MT831623.1__ORF8 protein CDS gc
augaaguuccugguguuccucggcaucaucaccaccgucgccgccuuccaccaggagugcagccugcaguccugcacgcagcaccagcccuacgugguggacgacccgugccccauccacuucuacagcaagugguacauccgcgucggggugcggaaguccgcgccccugaucgagcucugcguggacgaggccggcagcaagucccccauccaguacaucgacaucgggaacuacaccgucagcugccugccguucaccaucaacugccaggagcccaagcugggcucccucguggugcgcugcagcuucuacgaggacuuccuggaguaccacgacguccggguggugcuggacuucaucuga

SEQ ID NO: 18914 - RNA, 366 nt, Artificial Sequence
  SARS-CoV-2__MT831735.1__ORF8 protein CDS gc
augaaguuccugguguuccucggcaucaucaccaccgucgccgccuuccaccaggagugcagccugcaguccugcacgcagcaccagcccuacgugguggacgacccgugccccauccacuucuacagcaagugcuacauccgcgucggggcccggaaguccgcgccccugaucgagcucugcguggacgaggccggcagcaagucccccauccaguacaucgacaucgggaacuacaccgugagcugccugccguucaccaucaacugccaggagcccaagcugggcucccucgucgugcgcugcagcuucuacgaggacuuccuggaguaccacgacgugcgggucgugcuggacuucaucuga

SEQ ID NO: 18915 - RNA, 366 nt, Artificial Sequence
  SARS-CoV-2__MT831739.1__ORF8 protein CDS gc
augaaguuccugguguuccucggcaucaucaccaccgucgccgccuuccaccaggagugcagccugcaguccugcacgcagcaccagcccuacgugguggacgacccgugccccauccacuucuacagcaagugguacauccgcgucggggcccggaaguccgcgccccugaucgagcucugcguggacgaggccggcagcaagucccccauccaguacaucgacaucgggaacuacaccgugagcugccugccguucaccaucaacugccaggagcccaagcugggcaaccucgucgugcgcugcuccuucuacgaggacuuccuggaguaccacgacgugcgggucgugcuggacuucaucuga

SEQ ID NO: 18916 - RNA, 366 nt, Artificial Sequence
  SARS-CoV-2__MT831821.1__ORF8 protein CDS gc
augaaguuccugguguuccucggcaucaucaccaccgucgccgccuuccaccaggagugcagccugcaguccugcacgcagcaccagcccuacgugguggacgacccguuccccauccacuucuacagcaagugguacauccgcgucggggcccggaaguccgcgccccugaucgagcucugcguggacgaggccggcagcaagucccccauccaguacaucgacaucgggaacuacaccgugagcugccugccguucaccaucaacugccaggagcccaagcugggcucccucgucgugcgcugcagcuucuacgaggacuuccuggaguaccacgacgugcgggucgugcuggacuucaucuga

SEQ ID NO: 18917 - RNA, 366 nt, Artificial Sequence
  SARS-CoV-2__MT833958.1__ORF8 protein CDS gc
augaaguuccugguguuccucggcaucaucaccaccgucgccgccuuccaccaggagugcagccugcaguccugcacgcagcaccagcccuacgugguggacgacccgugccccauccacuucuacagcaagugguacauccgcgucggggcccggaaguccgcgccccugaucgagcucugcguggacgaggccggcagcaagucccccauccacuacaucgacaucgggaacuacaccgugagcugccugccguucaccaucaacugccaggagcccaagcugggcucccucgucgugcgcugcagcuucuacgaggacuuccuggaguaccacgacgugcgggucgugcuggacuucaucuga

SEQ ID NO: 18918 - RNA, 366 nt, Artificial Sequence
  SARS-CoV-2__MT834344.1__ORF8 protein CDS gc
augaaguuccugguguuccucggcaucaucaccaccgucgccgccuuccaccaggagugcagccugcaguccugcacgcagcaccagcccuacgugguggacgacccgugccccauccacuucuacagcaagugguacauccgcgucggggcccggaaguccgcgccccugaucgagcucugcguggacgaggccggcagcaagucccccauccaguacaucgacaucgggaacuacaccgugagcugccugccguucaccaucaacugccaggagcugaagcucggcucccuggucgugcgcugcagcuucuacgaggacuuccuggaguaccacgacgugcgggucgugcucgacuucaucuga

SEQ ID NO: 18919 - RNA, 366 nt, Artificial Sequence
  SARS-CoV-2__MT834622.1__ORF8 protein CDS gc
augaaguuccugguguuccuccgcaucaucaccaccgucgccgccuuccaccaggagugcagccugcaguccugcacgcagcaccagcccuacgugguggacgacccgugccccauccacuucuacagcaagugguacauccgggucggcgcccgcaaguccgcgccccugaucgagcucugcguggacgaggccgggagcaagucccccauccaguacaucgacaucggcaacuacaccgugagcugccugccguucaccaucaacugccaggagcccaagcuggggucccucgucgugcggugcagcuucuacgaggacuuccuggaguaccacgacgugcgcgucgugcuggacuucaucuga

SEQ ID NO: 18920 - RNA, 366 nt, Artificial Sequence
  SARS-CoV-2__MT834647.1__ORF8 protein CDS gc
augaaguuccugguguuccucggcaucaucaccaccgucgccgccuuccaccaggagugcagccugcaguccugcacgcagcaccagcccuacgugguggacgacccgugccccauccacuucuacagcaagugguacauccgcgucggggcccggaaguccgcgccccugaucgagcucugcguggacgaggccggcagcaagucccccauccaguacaucgacaucgggaacuacaccgugagcugcuccccguucaccaucaacugccaggagcccaagcugggcagccuggucgugcgcugcuccagcuacgaggacuuccucgaguaccacgacgugcgggucgugcuggacuucaucuga

SEQ ID NO: 18921 - RNA, 366 nt, Artificial Sequence
  SARS-CoV-2__MT827821.1__ORF8 protein CDS gc
augaaguuccuguucuuccucggcaucaucaccaccguggccgccuuccaccaggagugcagccugcaguccugcacgcagcaccagcccuacgucguggacgacccgugccccauccacuucuacagcaagugguacauccgcgugggggcccggaaguccgcgccccugaucgagcucugcgucgacgaggccggcagcaagucccccauccaguacaucgacaucgggaacuacaccgugagcugcuccccguucaccaucaacugccaggagcccaagcugggcagccuggugguccgcugcuccuucuacgaggacuuccucgaguaccacgacgugcgggugguccuggacuucaucuga

SEQ ID NO: 18922 - RNA, 366 nt, Artificial Sequence
  SARS-CoV-2__MT825091.1__ORF8 protein CDS gc
augaaguuccugguguuccucggcaucaucaccaccgucgccgccuuccaccaggagugcagccugcaguccugcacgcagcaccagcccuacgugguggacgacccgugccccauccacuucuacagcaagugguacauccgcgucggggcccggaaguccgcgccccugaucgagcucugcauggacgaggccggcagcaagucccccauccaguacaucgacaucgggaacuacaccgugagcugccugccguucaccaucaacugccaggagcccaagcugggcucccucgugguccgcugcagcuucuacgaggacuuccuggaguaccacgacgugcgggugguccuggacuucaucuga

SEQ ID NO: 18923 - RNA, 366 nt, Artificial Sequence
  SARS-CoV-2__MT821566.1__ORF8 protein CDS gc
augaaguuccugguguucuucggcaucaucaccaccgucgccgccuuccaccaggagugcagccuccaguccugcacgcagcaccagcccuacgugguggacgacccgugccccauccacuucuacagcaagugguacauccgcgucggggcccggaaguccgcgccccugaucgagcugugcguggacgaggccggcagcaagucccccauccaguacaucgacaucgggaacuacaccgugagcugccucccguucaccaucaacugccaggagcccaagcugggcucccuggucgugcgcugcagcuucuacgaggacuuccucgaguaccacgacgugcgggucgugcuggacuucaucuga

SEQ ID NO: 18924 - RNA, 366 nt, Artificial Sequence
  SARS-CoV-2__MT821663.1__ORF8 protein CDS gc
augaaguuccugguguuccucggcaucaucaucaccgucgccgccuuccaccaggagugcagccugcaguccugcacccagcaccagcccuacgugguggacgacccgugccccauccacuucuacagcaagugguacauccgcgucggggcccggaaguccgcgccccugaucgagcucugcguggacgaggccggcagcaagucccccauccaguacaucgacaucgggaacuacacggugagcugcuccccguucaccaucaacugccaggagcccaagcugggcagccuggucgugcgcugcuccuucuacgaggacuuccucgaguaccacgacgugcgggucgugcuggacuucaucuga

SEQ ID NO: 18925 - RNA, 366 nt, Artificial Sequence
  SARS-CoV-2__MT821773.1__ORF8 protein CDS gc
augaaguuccugguguuccucggcaucaucaccaccgucgccgccuuccaccaggagugcagccugcaguccugcacgcagcaccagcccuacgugguggacgacccgugccccauccacuucuacagcaagugguacauccgcgucggggcccggaaguccgcgccccugaucgagcucugcguggacgaggccggcagcaagucccccauccaguacaucgacaucgggaacuacaccgugagcugcuccccguucaccaucaacugccaggagcccaagcugggcagccuggucgugcgcugcuccuucuacgaggacuuccuccaguaccacgacgugcgggucgugcuggacuucaucuga

SEQ ID NO: 18926 - RNA, 366 nt, Artificial Sequence
  SARS-CoV-2__MT810566.1__ORF8 protein CDS gc
augaaguuccugguguuccucggcaucaucaccaccgucgccgccuuccaccaggagugcagccugcaguccugcacgcagcaccagcccuacgugguggacgacccgugccccauccacuucuacagcaagugguacauccgcgucggggcccggaaguccgcgccccugaucgagcucugcguggacgaggccggcagcaagucccccauccaguacaucgacaucgggaacuacaccgccagcugccugccguucaccaucaacugccaggagcccaagcugggcucccucgugguccgcugcagcuucuacgaggacuuccuggaguaccacgacgugcgggugguccuggacuucaucuga

SEQ ID NO: 18927 - RNA, 366 nt, Artificial Sequence
  SARS-CoV-2__MT810601.1__ORF8 protein CDS gc
augaaguuccugguguuccucggcaucaucaccaccgucgccgccuuccaccaggagugcagccugcaguccugcacgcagcaccagcccuacgugguggacgacccgugccccauccacuucuacagcaagugguacauccgcgucggggcccggaaguccgcgccccugaucgagcucugcguggacgaggccggcagcaagucccccauccaguacaucgacaucgggaacuacaccgugagcugccugccguucaccaucaacugccaggagcccaagcugugcucccucgucgugcgcugcagcuucuacgaggacuuccuggaguaccacgacgugcgggucgugcuggacuucaucuga

SEQ ID NO: 18928 - RNA, 366 nt, Artificial Sequence
  SARS-CoV-2__MT810624.1__ORF8 protein CDS gc
augaaguucuucguguuccugggcaucaucaccaccgucgccgccuuccaccaggagugcagccuccaguccugcacgcagcaccagcccuacgugguggacgacccgugccccauccacuucuacagcaagugguacauccgcgucggggcccggaaguccgcgccccugaucgagcugugcguggacgaggccggcagcaagucccccauccaguacaucgacaucgggaacuacaccgugagcugccucccguucaccaucaacugccaggagcccaagcugggcucccuggucgugcgcugcagcuucuacgaggacuuccucgaguaccacgacgugcgggucgugcuggacuucaucuga

SEQ ID NO: 18929 - RNA, 366 nt, Artificial Sequence
  SARS-CoV-2__MT811022.1__ORF8 protein CDS gc
augaaguuccugguguuccucggcaucaucaccaccgucgccgccuuccaccaggagugcagccugcaguccugcacgcagcaccagcccuacgugguggacgacccgugccccauccacuucuacagcaagugguacauccgcgucggggcccggaaguccgcgccccugaucgagcucugcguggacgaggccggcagcaagucccccauccagcacaucgacaucgggaacuacaccgugagcugccugccguucaccaucaacugccaggagcccaagcugggcucccucgucgugcgcugcagcuucuacgaggacuuccuggaguaccacgacgugcgggucgugcuggacuucaucuga

SEQ ID NO: 18930 - RNA, 366 nt, Artificial Sequence
  SARS-CoV-2__MT811486.1__ORF8 protein CDS gc
augaaguuccugguguuccucggcaucaucaccaccgucgccgccuuccaccaggagugcagccugcaguccugcacgaagcaccagcccuacgugguggacgacccgugccccauccacuucuacagcaagugguacauccgcgucggggcccggaaguccgcgccccugaucgagcucugcguggacgaggccggcagcaagucccccauccaguacaucgacaucgggaacuacaccgugagcugccugccguucaccaucaacugccaggagcccaagcugggcucccucgucgugcgcugcagcuucuacgaggacuuccuggaguaccacgacgugcgggucgugcuggacuucaucuga

SEQ ID NO: 18931 - RNA, 366 nt, Artificial Sequence
  SARS-CoV-2__MT811528.1__ORF8 protein CDS gc
augaagauccugguguuccucggcaucaucaccaccgucgccgccuuccaccaggagugcagccugcaguccugcacgcagcaccagcccuacgugguggacgacccgugccccauccacuucuacagcaagugguacauccgcgucggggcccggaaguccgcgccccugaucgagcucugcguggacgaggccggcagcaagucccccauccaguacaucgacaucgggaacuacaccgugagcugccugccguucaccaucaacugccaggagcccaagcugggcucccucgucgugcgcugcagcuucuacgaggacuuccuggaguaccacgacgugcgggucgugcuggacuucaucuga

SEQ ID NO: 18932 - RNA, 366 nt, Artificial Sequence
  SARS-CoV-2__MT811533.1__ORF8 protein CDS gc
augaaguuccugguguuccucggcaucaucaccaccgucgccgccuuccaccaggagugcagccugcaguccugcacgcagcaccagcccuacgugguggacgacccgugccccauccacuucuacagcaagugguacauccgcgucggggcccggaaguccgcgccccugaucgagcucugcguggacgaggccggcagcaagucccccauccaguacaucgacaucgggaacuacaccgugagcugccugccguucaccaucaacugccaggagcccaagcugggcucccucgucgugcgcugcagcuucuacgaggacuuccuggaguaccacgacgugcgggucgugcuggacgugcucuga

SEQ ID NO: 18933 - RNA, 366 nt, Artificial Sequence
  SARS-CoV-2__MT811534.1__ORF8 protein CDS gc
augaaguuccugguguuccucggcaucaucaccaccgucgccgccuuccaccaggagugcagccugcaguccugcacgcagcaccagcccuacgugguggacgacccgugccccauccacuucuacagcaagugguacauccgcgucggggcccggaaguccgcgccccugaucgagcucugcguggacgaggccggcagcaagucccccauccaguacaucgacaucgggaacuacaccgugagcugccugccguucaccaucaacugccaggagcccaagcugggcucccucgucgugcgcugcagcuucuacgaggacuuccuggagugccacgacgugcgggucgugcuggacuucaucuga

SEQ ID NO: 18934 - RNA, 366 nt, Artificial Sequence
  SARS-CoV-2__MT806884.1__ORF8 protein CDS gc
augaaguuccugguguuccucggcaucaucaccaccgucgccgccuuccaccaggagugcagccugcagcugugcacgcagcaccagcccuacgugguggacgacccgugccccauccacuucuacuccaagugguacauccgcgucggggcccgcaagagcgcgccccucaucgagcugugcguggacgaggccggcuucaagucccccauccaguacaucgacaucgggaacuacaccgugagcugccugccguucaccaucaacugccaggagcccaagcucggcucccuggucgugcggugcagcuucuacgaggacuuccuggaguaccacgacgugcgggucgugcucgacuucaucuga

SEQ ID NO: 18935 - RNA, 366 nt, Artificial Sequence
  SARS-CoV-2__MT800031.1__ORF8 protein CDS gc
augaaguuccugguguuccucggcaucaucaccaccgucagcgccuuccaccaggagugcucccugcagagcugcacgcagcaccagcccuacgugguggacgacccgugccccauccacuucuacuccaagugguacauccgcgucggggcccgcaagagcgcgccccugaucgagcucugcguggacgaggccggcuccaagagccccauccaguacaucgacaucgggaacuacaccguguccugccugccguucaccaucaacugccaggagcccaagcugggcagccucgucgugcggugcuccuucuacgaggacuuccuggaguaccacgacgugcgggucgugcuggacuucaucuga

SEQ ID NO: 18936 - RNA, 366 nt, Artificial Sequence
  SARS-CoV-2__MT795889.1__ORF8 protein CDS gc
augaaguuccugguguuccucggcaucaucaccaccgucgccgccuuccaccaggagugcagccugcaguccugcacgcagcaccagcccuacguguucgacgacccgugccccauccacuucuacagcaagugguacauccgcgugggggcccggaaguccgcgccccugaucgagcucugcgucgacgaggccggcagcaagucccccauccaguacaucgacaucgggaacuacaccgugagcugccugccguucaccaucaacugccaggagcccaagcugggcucccucgugguccgcugcagcuucuacgaggacuuccuggaguaccacgacgugcgggugguccuggacuucaucuga

SEQ ID NO: 18937 - RNA, 366 nt, Artificial Sequence
  SARS-CoV-2__MT791870.1__ORF8 protein CDS gc
augaaguuccugguguuccucggcaucaucaccaccgucgccgccuuccaccaggagugcagccugcaguccugcacgcagcaccagcccuacgugguggacgacccgugccccauccacuucuacagcaagcuguacauccgcgucggggcccggaaguccgcgccccucaucgagcugugcguggacgaggccggcagcaagucccccauccaguacaucgacaucgggaacuacaccgugagcugccugccguucaccaucaacugccaggagcccaagcucggcucccuggucgugcgcugcagcuucuacgaggacuuccuggaguaccacgacgugcgggucgugcucgacuucaucuga

SEQ ID NO: 18938 - RNA, 366 nt, Artificial Sequence
  SARS-CoV-2__MT786817.1__ORF8 protein CDS gc
augaaguuccugguguuccucggcaucaucaccaccgucgccgccuuccaccaggagugcagccugcaguccugcacgcagcaccagcccuacgugguggacgacccgugccccauccacuucuacagcaagugguacauccgcgucggggccaagaaguccgcgccccugaucgagcucugcguggacgaggccggcagcaagucccccauccaguacaucgacaucgggaacuacaccgugagcugccugccguucaccaucaacugccaggagcccaagcugggcucccucgucgugcggugcagcuucuacgaggacuuccuggaguaccacgacgugcgcgucgugcuggacuucaucuga

SEQ ID NO: 18939 - RNA, 339 nt, Artificial Sequence
  SARS-CoV-2__MT782382.1__ORF8 protein CDS gc
augaaguuccugguguuccucggcaucaucaccaccgucgccgccuuccaccaggagugcagccugcaguccugcacgcagcaccagcccuacgugguggacgacccgugcauccgcgucggggcccgcaagagcgcgccccugaucgagcucugcguggacgaggccggcuccaagagccccauccaguacaucgacaucgggaacuacaccguguccugccugcccuucaccaucaacugccaggagccgaagcugggcagccucgucgugcggugcuccuucuacgaggacuuccuggaguaccacgacgugcgggucgugcuggacuucaucuga

SEQ ID NO: 18940 - RNA, 366 nt, Artificial Sequence
  SARS-CoV-2__MT777677.1__ORF8 protein CDS gc
augaaguuccugguguuccucggcaucaucaccaccgucgccgccuuccaccaggagugcagccugcaguccugcacgcagcaccagcccuacgugguggacuacccgugccccauccacuucuacagcaagugguacauccgcgucggggcccggaaguccgcgccccugaucgagcucugcguggacgaggccggcagcaagucccccauccaguacaucgacaucgggaacuacaccgugagcugccugccguucaccaucaacugccaggagcccaagcugggcucccucgucgugcgcugcagcuucuacgaggacuuccuggaguaccacgacgugcgggucgugcuggacuucaucuga

SEQ ID NO: 18941 - RNA, 366 nt, Artificial Sequence
  SARS-CoV-2__MT757030.1__ORF8 protein CDS gc
augaaguuccugguguuccucggcaucaucaccaccgucgccgcccugcaccaggagugcagccugcaguccugcacgcagcaccagcccuacgugguggacgacccgugccccauccacuucuacagcaagugguacauccgcgucggggcccggaaguccgcgccccucaucgagcugugccuggacgaggccggcagcaagucccccauccaguacaucgacaucgggaacuacaccgugagcugcuccccguucaccaucaacugccaggagcccaagcucggcagccuggugguccgcugcuccuucuacgaggacuuccuggaguaccacgacgugcgggugguccucgacuucaucuga

SEQ ID NO: 18942 - RNA, 366 nt, Artificial Sequence
  SARS-CoV-2__MT757105.1__ORF8 protein CDS gc
augaaguuccugguguuccucggcaucaucaccaccgucgccgccuuccaccaggagugcagccugcagcugugcacgcagcaccagcccuacgugguggacgacccgugccccauccacuucuacuccaagugguacauccgcgucggggcccgcaagagcgcgccccucaucgagcugugccuggacgaggccggcuccaagagccccauccaguacaucgacaucgggaacuacaccguguccugccucccguucaccaucaacugccaggagcccaagcugggcagccuggugguccggugcuccuucuacgaggacuuccucgaguaccacgacgugcgggugguccuggacuucaucuga

SEQ ID NO: 18943 - RNA, 366 nt, Artificial Sequence
  SARS-CoV-2__MT757116.1__ORF8 protein CDS gc
augaaguuccugguguuccucggcaucaucaccaccgucgccgccuuccaccaggagugcagccugcagcugugcacgcagcaccagcccuacgugguggacgacccgugcuccauccacuucuacagcaagugguacauccgcgucggggcccggaaguccgcgccccucaucgagcugugcguggacgaggccggcagcaagucccccauccaguacaucgacaucgggaacuacaccgugagcugccugcccuucaccaucaacugccaggagccgaagcucggcucccuggucgugcgcugcagcuucuacgaggacuuccuggaguaccacgacgugcgggucgugcucgacuucaucuga

SEQ ID NO: 18944 - RNA, 366 nt, Artificial Sequence
  SARS-CoV-2__MT750459.1__ORF8 protein CDS gc
augaaguuccugguguuccucggcaucaucaccaccgucgccgccuuccaccaggagugcagccugcaguccugcacgcagcaccagcccuacgugguggacgacccgugccccauccacuucuacagcaagugguacauccgcgucggggcccggaaguccgcgccccugaucgagcucugcguggacgagagcggcuccaagagccccauccaguacaucgacaucgggaacuacaccguguccugcagcccguucaccaucaacugccaggagcccaagcugggcucccuggucgugcgcugcagcuucuacgaggacuuccucgaguaccacgacgugcgggucgugcuggacuucaucuga

SEQ ID NO: 18945 - RNA, 366 nt, Artificial Sequence
  SARS-CoV-2__MT750487.1__ORF8 protein CDS gc
augaaguuccugguguuccucggcaucaucaccaccgucgccgccuuccaccaggagugcagccugcaguccugcacgcagcaccagcccuacgugguggacgacccgugccccacccacuucuacagcaagugguacauccgcgucggggcccggaaguccgcgccccugaucgagcucugcguggacgaggccggcagcaagucccccauccaguacaucgacaucgggaacuacaccgugagcugccugccguucaccaucaacugccaggagcccaagcugggcucccucgucgugcgcugcagcuucuacgaggacuuccuggaguaccacgacgugcgggucgugcuggacuucaucuga

SEQ ID NO: 18946 - RNA, 366 nt, Artificial Sequence
  SARS-CoV-2__MT740384.1__ORF8 protein CDS gc
augaaguuccugguguuccucggcaucaucaccaccgucgccgccuuccaccaggagugcagccugcaguccugcacgcagcaccagcccuacgugguggacgacccgugccgcauccacuucuacagcaagugguacauccgggucggggcccgcaaguccgcgccccugaucgagcucugcguggacgaggccggcagcaagucccccauccaguacaucgacaucgggaacuacaccgugagcugccugcccuucaccaucaacugccaggagccgaagcugggcucccucgucgugcggugcagcuucuacgaggacuuccuggaguaccacgacgugcgcgucgugcuggacuucaucuga

SEQ ID NO: 18947 - RNA, 366 nt, Artificial Sequence
  SARS-CoV-2__MT734055.1__ORF8 protein CDS gc
augaaguuccugguguuccucggcaucaucaccaccgucgccgccuuccaccaggagugcagccugcaguccugcacgcagcaccagcccuacgugguggacgacccgugccccauccacuucuacagcaagugguacauccgcgucggggcccggaaguccgcgccccugaucgagcucugcguggacgacgccggcagcaagucccccauccaguacaucgacaucgggaacuacaccgugagcugccugccguucaccaucaacugccaggagcccaagcugggcucccucgucgugcgcugcagcuucuacgaggacuuccuggaguaccacgacgugcgggucgugcuggacuucaucuga

SEQ ID NO: 18948 - RNA, 366 nt, Artificial Sequence
  SARS-CoV-2__MT704111.1__ORF8 protein CDS gc
augaaguuccugguguuccucggcaucaucaccaccgucgccgccuuccaccaggagugcagccugcaguccugcacgcagcaccagccccacgugguggacgacccgugccccauccacuucuacagcaagugguacauccgcgucggggcccggaaguccgcgccccugaucgagcucugcguggacgaggccggcagcaagucccccauccaguacaucgacaucgggaacuacaccgugagcugccugccguucaccaucaacugccaggagcccaagcugggcucccucgucgugcgcugcagcuucuacgaggacuuccuggaguaccacgacgugcgggucgugcuggacuucaucuga

SEQ ID NO: 18949 - RNA, 366 nt, Artificial Sequence
  SARS-CoV-2__MT683389.1__ORF8 protein CDS gc
augaaguuccugguguuccucggcaucaucaccaccgucgccgccuuccaccaggagugcagccugcaguccugcacgcagcaccagcccuacguggugggggacccgugccccauccacuucuacagcaagugguacauccgcgucggcgcccggaaguccgcgccccugaucgagcucugcguggacgaggccgggagcaagucccccauccaguacaucgacaucggcaacuacaccgugagcugccugccguucaccaucaacugccaggagcccaagcuggggucccucgucgugcgcugcagcuucuacgaggacuuccuggaguaccacgacgugcgggucgugcuggacuucaucuga

SEQ ID NO: 18950 - RNA, 366 nt, Artificial Sequence
  SARS-CoV-2__MT679161.1__ORF8 protein CDS gc
augaaguuccugguguuccucggcaucaucaccaccgucgccgccuuccaccaggagugcagccugcaguccugcacgcagcaccagcccuacgugguggacgacccgugccccauccacuucuacagcaagugguacauccgcgucggggcccggaaguccgcgccccugaucgagcucugcguggacgaggccggcagcaagucccccauccuguacaucgacaucgggaacuacaccgugagcugccugccguucaccaucaacugccaggagcccaagcucggcucccuggucgugcgcugcagcuucuacgaggacuuccuggaguaccacgacgugcgggucgugcucgacuucaucuga

SEQ ID NO: 18951 - RNA, 366 nt, Artificial Sequence
  SARS-CoV-2__MT642081.1__ORF8 protein CDS gc
augaaguuccugguguuccucggcaucaucaccaccgucgccgccuuccaccaggagugcagccugcaguccugcacgcagcaccagcccuacgugguggacgacccgugccccauccacuucuacagcaagugguacauccgcgucggggcccggaaguccgcgccccugaucgagcucugcguggacgaggccggcagcaagucccccauccaguacaucgacaucugcaacuacaccgugagcugccugccguucaccaucaacugccaggagcccaagcuggggucccucgucgugcgcugcagcuucuacgaggacuuccuggaguaccacgacgugcgggucgugcuggacuucaucuga

SEQ ID NO: 18952 - RNA, 366 nt, Artificial Sequence
  SARS-CoV-2__MT642109.1__ORF8 protein CDS gc
augaaguuccugguguuccucggcaucaucaccaccgucgccgccagccaccaggagugcucccugcagagcugcacgcagcaccagcccuacgugguggacgacccgugccccauccacuucuacuccaagugguacauccgcgucggggcccgcaagagcgcgccccugaucgagcucugcguggacgaggccggcuccaagagccccauccaguacaucgacaucgggaacuacaccguguccugccugccguucaccaucaacugccaggagcccaagcugggcagccucgucgugcggugcuccuucuacgaggacuuccuggaguaccacgacgugcgggucgugcuggacuucaucuga

SEQ ID NO: 18953 - RNA, 366 nt, Artificial Sequence
  SARS-CoV-2__MT642177.1__ORF8 protein CDS gc
augaaguuccugguguuccucggcaucaucaccaccgucgccgccuuccaccaggagugcagccugcaguccugcacgcagcaccagcccuacgugguggacgacccgugccccauccacuucuacagcaagugguacauccgcgucggggcccggaaguccgcgccccugaucgagcucugcguggacgaggccggcagcaagucccccauccacuacaucgacaucgggaacuacaccgugagcugcuccccguucaccaucaacugccaggagcccaagcugggcagccuggucgugcgcugcuccuucuacgaggacuuccucgaguaccacgacgugcgggucgugcuggacuucaucuga

SEQ ID NO: 18954 - RNA, 366 nt, Artificial Sequence
  SARS-CoV-2__MT630423.1__ORF8 protein CDS gc
augaaguuccugguguuccucggcaucaucaccaccgucgccgccuuccaccaggagugcagccugcaguccugcacgcagcaccagcccuacgugguggacgacccgugccccauccacuucuacagcaagcuguacauccgcgucggggcccggaaguccgcgccccucaucgagcugugcguggacgaggccggcagcaagucccccauccaguacaucgacaucgggaacuacaccgugagcugcuccccguucaccaucaacugccaggagcccaagcugggcagccucgucgugcgcugcuccuucuacgaggacuuccuggaguaccacgacgugcgggucgugcuggacuucaucuga

SEQ ID NO: 18955 - RNA, 366 nt, Artificial Sequence
  SARS-CoV-2__MT632817.1__ORF8 protein CDS gc
augaaguuccugguguuccucggcaucaucaccaccgucgccgccuuccaccaggagugcagccugcaguccugcacgcagcaccagcccuacgugguggacgacccgugccccauccacuucuacagcaagugguacauccgcgucggggcccggaaguccgcgccccugaucgagcucugcguggacgaggccggcuucaagagccccauccaguacaucgacaucgggaacuacaccguguccugcagcccguucaccaucaacugccaggagcccaagcugggcucccuggucgugcgcugcagcuucuacgaggacuuccucgaguaccacgacgugcgggucgugcuggacuucaucuga

SEQ ID NO: 18956 - RNA, 366 nt, Artificial Sequence
  SARS-CoV-2__MT632919.1__ORF8 protein CDS gc
augaaguuccugguguuccucggcaucaucgccaccgucgccgccuuccaccaggagugcagccugcaguccugcacccagcaccagcccuacgugguggacgacccgugccccauccacuucuacagcaagugguacauccgcgucggggcccggaaguccgcgccccugaucgagcucugcguggacgaggccggcagcaagucccccauccaguacaucgacaucgggaacuacacggugagcugcuccccguucaccaucaacugccaggagcccaagcugggcagccuggucgugcgcugcuccuucuacgaggacuuccucgaguaccacgacgugcgggucgugcuggacuucaucuga

SEQ ID NO: 18957 - RNA, 366 nt, Artificial Sequence
  SARS-CoV-2__MT607245.1__ORF8 protein CDS gc
augaaguuccugguguuccucggcaucaucaccaccgucgccgccuuccaccaggagugcagccugcaguccugcacgcagcaccagcccuacgugguggacgacccgugccccauccacuucuacagcaagugguacauccgcgucggggcccggaaguccgcgccccugaucgagcucugcguggacgaggccugcagcaagucccccauccaguacaucgacaucggcaacuacaccgugagcugccugccguucaccaucaacugccaggagcccaagcuggggucccucgucgugcgcugcagcuucuacgaggacuuccuggaguaccacgacgugcgggucgugcuggacuucaucuga

SEQ ID NO: 18958 - RNA, 366 nt, Artificial Sequence
  SARS-CoV-2__MT609558.1__ORF8 protein CDS gc
augaaguuccugguguuccucggcaucaucaccaccgucgccgccuuccaccaggagugcagccugcaguccugcacgcagcaccagcccuacgugguggacgaccugugcccgauccacuucuacagcaagugguacauccgcgucggggcccggaaguccgcgccccucaucgagcugugcguggacgaggccggcagcaagucccccauccaguacaucgacaucgggaacuacaccgugagcugccugcccuucaccaucaacugccaggagccgaagcucggcucccuggucgugcgcugcagcuucuacgaggacuuccuggaguaccacgacgugcgggucgugcucgacuucaucuga

SEQ ID NO: 18959 - RNA, 378 nt, Artificial Sequence
  SARS-CoV-2__MT568638.1__ORF8 protein CDS gc
augaaguuccugguguuccucggcaucaucaccaccgucgccgccuuccaccaggagugcagccugcaguccugcacgcagcaccagcccuacgugguggacgacccgugccccauccacuucuacagcaagugguacauccgcgucggggcccggaaguccgcgccccugaucgagcucugcguggacgaggccggcagcaagucccccauccaguacaucgacaucgggaacuacaccgugagcugcuccccguucaccaucaacugccaggagcccaagcugggcagccuggucgugcgcugcuccuucuacgaggacuuccucgaguaccacgacgugcgggucgugcuggaguucagcaagcgcaccaacuga

SEQ ID NO: 18960 - RNA, 366 nt, Artificial Sequence
  SARS-CoV-2__MT520189.1__ORF8 protein CDS gc
augaaguuccugguguuccucggcaucaucaccaccgucgccgccuuccaccaggagugcagccugcaguccugcacgcagcaccagcccuacgugguggacgacagcugcccgauccacuucuacuccaagugguacauccgcgucggggcccgcaagagcgcgccccugaucgagcucugccuggacgaggccggcuccaagagccccauccaguacaucgacaucgggaacuacaccguguccugcagccccuucaccaucaacugccaggagccgaagcugggcucccucgugguccggugcagcuucuacgaggacuuccuggaguaccacgacgugcgggugguccuggacuucaucuga

SEQ ID NO: 18961 - RNA, 366 nt, Artificial Sequence
  SARS-CoV-2__MT534313.1__ORF8 protein CDS gc
augaaguuccugguguuccucggcaucaucaagaccgucgccgccuuccaccaggagugcagccugcaguccugcacccagcaccagcccuacgugguggacgacccgugccccauccacuucuacagcaagugguacauccgcgucggggcccggaaguccgcgccccugaucgagcucugcguggacgaggccggcagcaagucccccauccaguacaucgacaucgggaacuacacggugagcugccugccguucaccaucaacugccaggagcccaagcugggcucccucgucgugcgcugcagcuucuacgaggacuuccuggaguaccacgacgugcgggucgugcuggacuucaucuga

SEQ ID NO: 18962 - RNA, 366 nt, Artificial Sequence
  SARS-CoV-2__MT511079.1__ORF8 protein CDS gc
augaaguuccugguguuccucggcaucaucaccaccgucgccgccuuccaccaggagugcagccugcaguccugcacgcagcaccagcccuacgugguggacgacccgugcagcauccacuucuacuccaagugguacauccgcgucggggcccgcaagagcgcgccccugaucgagcucugcguggacgaggccggcuccaagagccccauccaguacaucgacaucgggaacuacaccguguccugccugcccuucaccaucaacugccaggagccgaagcugggcagccucgucgugcggugcuccuucuacgaggacuuccuggaguaccacgacgugcgggucgugcuggacuucaucuga

SEQ ID NO: 18963 - RNA, 366 nt, Artificial Sequence
  SARS-CoV-2__MT509510.1__ORF8 protein CDS gc
augaaguuccugguguuccucgagaucaucaccaccgucgccgccuuccaccaggagugcagccugcaguccugcacgcagcaccagcccuacgugguggacgacccgugccccauccacuucuacagcaagugguacauccgcgucggcgcccggaaguccgcgccccugaucgagcucugcguggacgaggccgggagcaagucccccauccaguacaucgacaucggcaacuacaccgugagcugccugccguucaccaucaacugccaggagcccaagcuggggucccucgucgugcgcugcagcuucuacgaggacuuccuggaguaccacgacgugcgggucgugcuggacuucaucuga

SEQ ID NO: 18964 - RNA, 366 nt, Artificial Sequence
  SARS-CoV-2__MT506707.1__ORF8 protein CDS gc
augaaguuccugguguuccucggcaucaucaccaccgucgccgccuuccaccaggagugcagccugcaguccugcacgcagcaccagcccuacgugguggacgacccgugccccauccacuucuacagcaagugguacauccgcgucgggucccgcaagagcgcgccccugaucgagcucugcguggacgaggccggcuccaagagccccauccaguacaucgacaucgggaacuacaccguguccugccugccguucaccaucaacugccaggagcccaagcugggcagccucgucgugcggugcuccuucuacgaggacuuccuggaguaccacgacgugcgggucgugcuggacuucaucuga

SEQ ID NO: 18965 - RNA, 366 nt, Artificial Sequence
  SARS-CoV-2__MT482119.1__ORF8 protein CDS gc
augaaguuccugguguuccucggcaucaucaccaccgucgccgccuuccaccaggagugcagccugcaguccugcacgcagcaccagcccuacgugguggacgacccgugccccauccacuucuacagcaagugguacauccgcgucggggcccggaaguccgcgccccugaucgagcucugcguggacgaggccggcagcaagucccccauccaguacaucgacaucgggaacuacaccgugagcugccugccguucaccaucaacugccaggagcccaagcugggcucccucgucgugcgcugcagcuucuacgagaacuuccuggaguaccacgacgugcgggucgugcuggacuucaucuga

SEQ ID NO: 18966 - RNA, 366 nt, Artificial Sequence
  SARS-CoV-2__MT467253.1__ORF8 protein CDS gc
augaaguuccugguguuccucggcaucaucaccaccgucgccgccuuccaccaggagugcagccugcaguccugcacgcagcaccagcccuacgugguggacgacccgugccccauccacuucuacagcaagugguacauccgcgucggggcccggaaguccgcgccccugaucgagcucugcguggacgaggccggcagcaagucccccauccaguacaucgacaucgggaacuacaccgugagcugccugccguucaccaucaacugccaggagcccaagcugggcucccucgucgugcgcugcagcuucuacgaggacuuccuggaguaccacgacgugcgggucgugcuggacuuccucuga

SEQ ID NO: 18967 - RNA, 366 nt, Artificial Sequence
  SARS-CoV-2__MT470123.1__ORF8 protein CDS gc
augaaguuccugguguuccucggcaucaucaccaccgucgccgccuuccaccaggagugcagccugcaguccugcacgcagcaccagcccuacgugguggacgacccgugccccauccacuucuacagcaagugguacauccgcgucggggcccggaaguccgcgccccugaucgagcucugcguggacgaggccggcagcaagucccccauccaguacaucgacaucgggaacuacaccgugagcugccugccguucaccaucaacugccaggagcccaagcugggcucccucgucgugcgcugcagcuucuacgaggacuuccuggaguaccacgacgugcgggucgugcuggacuucuucuga

SEQ ID NO: 18968 - RNA, 366 nt, Artificial Sequence
  SARS-CoV-2__MT459881.1__ORF8 protein CDS gc
augaaguuccugguguuccucggcaucaucaccaccgucgccgccuuccaccaggagugcagccugcaguccugcacgcagcaccagcccuacgugguggacgacccgugccccauccacuucuacagcaagugguacauccgcgucggggcccggaaguccgcgccccugaucgagcucugcguggacgaggccggcagcaagucccccauccaguacaucgacaucgggaacuacaccgugagcugccugccguucaccaucaacugccaggagcccaagcugggcucccucgucgugcgcugcagcuucuacggggacuuccuggaguaccacgacgugcgggucgugcuggacuucaucuga

SEQ ID NO: 18969 - RNA, 366 nt, Artificial Sequence
  SARS-CoV-2__MT461632.1__ORF8 protein CDS gc
augaaguuccugguguuccucggcaucaucaccaccgucgccgccuuccaccaggagugcagccugcagcugugcacgcagcaccagcccuacgugguggacgacccgugccccauccacuucuacuccaagagcuacauccgcgucggggcccggaaguccgcgccccucaucgagcugugcguggacgaggccggcagcaagucccccauccaguacaucgacaucgggaacuacaccgugagcugccugccguucaccaucaacugccaggagcccaagcucggcucccuggucgugcgcugcagcuucuacgaggacuuccuggaguaccacgacgugcgggucgugcucgacuucaucuga

SEQ ID NO: 18970 - RNA, 366 nt, Artificial Sequence
  SARS-CoV-2__MT461664.1__ORF8 protein CDS gc
augaaguuccugguguuccucggcaucaucaccaccgucgccgccuuccaccaggagugcagccugcaguccugcacgcagcaccagcccuacgugguggacgacccgugccccauccacuucuacagcaagugguacauccgcgucggggcccggaaguccgcgccccugaucgagcucugcguggacgaggccgccagcaagucccccauccaguacaucgacaucggcaacuacaccgugagcugccugccguucaccaucaacugccaggagcccaagcuggggucccucgucgugcgcugcagcuucuacgaggacuuccuggaguaccacgacgugcgggucgugcuggacuucaucuga

SEQ ID NO: 18971 - RNA, 366 nt, Artificial Sequence
  SARS-CoV-2__MT451177.1__ORF8 protein CDS gc
augaaguuccugguguuccucggcaucaucaccaccgucgccgccuuccaccaggagugcagccugcaguccugcacgcagcaccagcccuacgugguggacgacccgugccccauccacuucuacagcaagugguacauccgcgucggggcccggaaguccgcgccccugaucgagcucugcguggacgaggccggcagcaagucccccauccaguacaucgacaucgggaacuacaccgugagcugccugccguucaccaucaacugccaggagcccaagcugggcucccucgucgugcgcugcagcuucuacgaggacuuccuggaguaccacgacuuccgggugguccuggacuucaucuga

SEQ ID NO: 18972 - RNA, 366 nt, Artificial Sequence
  SARS-CoV-2__MT451592.1__ORF8 protein CDS gc
augaaguuccugguguuccucgucaucaucaccaccguggccgccuuccaccaggagugcagccugcaguccugcacgcagcaccagcccuacguggucgacgacccgugccccauccacuucuacagcaagugguacauccgcgugggcgcccggaaguccgcgccccugaucgagcucugcguggacgaggccgggagcaagucccccauccaguacaucgacaucggcaacuacaccgucagcugccugccguucaccaucaacugccaggagcccaagcuggggucccucguggugcgcugcagcuucuacgaggacuuccuggaguaccacgacguccggguggugcuggacuucaucuga

SEQ ID NO: 18973 - RNA, 366 nt, Artificial Sequence
  SARS-CoV-2__MT252757.1__ORF8 protein CDS gc
augaaguuccugguguuccucggcaucaucaccaccgucgccgccuuccaccaggagugcagccugcaguccugcacgcagcaccagcccuacgugguggacgacccgugccccauccacuucuacagcaagugguacauccgcgucggggcccggaaguccgcgccccugaucgagcucugcguggacgaggccggcagcaagucccccauccaguacaucgacaucgggaacuacaccgugagcugcuccccguucaccaucaacugccaggagcccaagcugggcagccuggucgugcgcugcuccuucuacgaggacuuccucgaguaccaggacgugcgggucgugcuggacuucaucuga

SEQ ID NO: 18974 - RNA, 366 nt, Artificial Sequence
  SARS-CoV-2__MT358654.1__ORF8 protein CDS gc
augaaguuccugguguuccucggcaucaucaccaccgucgccgccuuccaccaggagugcagccugcaguccugcacgcagcaccagcccuacgugguggacgacccgugccccauccacuucuacagcaagugguacauccgcgucggggcccggaaguccgcgccccugaucgagcucugcguggacgaggccggcagcaagucccccauccaguacaucgacaucgggaacuacaccgugagcugccugccguucaccaucaacugccaggagcccaagcugggcucccucguccugcgcugcagcuucuacgaggacuuccuggaguaccacgacgugcgggugguccucgacuucaucuga

SEQ ID NO: 18975 - RNA, 932 nt, Artificial Sequence
  MERS-CoV/MERS-CoV-Jeddah-human-1__KF958702.1__membrane protein (M) mRNA gc
aggagagucccgcagucggcguccagcggcucugcuuguucgugugugugucguugcaggccuuauucaagcuuaccaugagcaacaugacccagcugaccgaggcccagaucaucgccaucaucaaggacuggaacuucgcguggucccucaucuuccugcugaucacgaucgugcuccaguacggcuaccccagccgcuccaugaccgucuacguguucaagauguucgugcuguggcugcucuggccgagcuccauggcccugagcaucuucuccgccaucuaccccaucgaccuggccagccagaucaucuccgggaucgucgccgcggugagcgccaugauguggaucuccuacuucgugcagagcauccgccucuucaugcggaccggcuccugguggagcuucaaccccgagaccaacugccugcugaacguccccuucgggggcacgaccguggugcggccgcucgucgaggacuccaccagcgugaccgccguggucacgaacgggcaccugaagauggccggcaugcacuucggcgcgugcgacuacgaccgccugcccaacgaggugaccguggccaagcccaacguccucaucgcccugaagauggugaagcggcaguccuacgggaccaacagcggcguggccaucuaccaccgcuacaaggccgggaacuaccgguccccgcccaucaccgcggacaucgagcuggcccuccugcgcgccugaggacuagucccuguucccagagcccacuuuuuuuucuuuuuuugaaauaaaauagccugucuuucagaucucaaaggcucuuuucagagccaccaaaaaaaaaaaaaaaaaaaaaaaaaaaaaaaaaaaaaaaaaaaaaaaaaaaaaaaaaaaaaaaaaaaaaaaaaaaaaaaaaaaaaaaaaaaaaaaaaaaaa

SEQ ID NO: 18976 - RNA, 932 nt, Artificial Sequence
  MERS-CoV/Al-Hasa_4_2013__KF186564.1__membrane protein (M) mRNA gc
aggagagucccgcagucggcguccagcggcucugcuuguucgugugugugucguugcaggccuuauucaagcuuaccaugagcaacaugacccagcugaccgaggcccagaucaucgccaucaucaaggacuggaacuucgcguggucccucaucuuccugcugaucacgaucgugcuccaguacggcuaccccagccgcuccaugaccgucuacguguucaagauguucgugcuguggcugcucuggccgagcuccauggcccugagcaucuucuccgccgucuaccccaucgaccuggccagccagaucaucuccgggaucguggccgcggugagcgccaugauguggaucuccuacuucguccagagcauccgccucuucaugcggaccggcuccugguggagcuucaaccccgagaccaacugccugcugaacgugcccuucgggggcacgaccgugguccggccgcucguggaggacuccaccagcgugaccgccgucgugacgaacgggcaccugaagauggccggcaugcacuucggcgcgugcgacuacgaccgccugcccaacgaggugaccgucgccaagcccaacgugcucaucgcccugaagauggugaagcggcaguccuacgggaccaacagcggcgucgccaucuaccaccgcuacaaggccgggaacuaccgguccccgcccaucaccgcggacaucgagcuggcccuccugcgcgccugaggacuagucccuguucccagagcccacuuuuuuuucuuuuuuugaaauaaaauagccugucuuucagaucucaaaggcucuuuucagagccaccaaaaaaaaaaaaaaaaaaaaaaaaaaaaaaaaaaaaaaaaaaaaaaaaaaaaaaaaaaaaaaaaaaaaaaaaaaaaaaaaaaaaaaaaaaaaaaaaaaaaa

SEQ ID NO: 18977 - RNA, 932 nt, Artificial Sequence; identical to SEQ ID NO: 18975
  MERS-CoV/Riyadh_14_2013__KJ156934.1__membrane protein (M) mRNA gc

SEQ ID NO: 18978 - RNA, 932 nt, Artificial Sequence; identical to SEQ ID NO: 18976
  MERS-CoV/England 1__NC_038294.1__membrane protein (M) mRNA gc

SEQ ID NO: 18979 - RNA, 938 nt, Artificial Sequence
  SARS-CoV/Tor2__NC_004718.3__membrane protein (M) mRNA gc
aggagagucccgcagucggcguccagcggcucugcuuguucgugugugugucguugcaggccuuauucaagcuuaccauggccgacaacggcaccaucaccguggaggagcugaagcagcuccuggagcaguggaaccuggucaucggguuccucuuccuggccuggaucaugcugcuccaguucgcguacagcaaccgcaaccgguuccuguacaucaucaagcugguguuccucuggcugcuguggcccgugacgcucgccugcuucguccuggccgccguguaccgcaucaacugggugaccggcgggaucgccaucgcgauggccugcaucgucggccugauguggcucuccuacuucguggccagcuuccggcuguucgcccgcacccgguccauguggagcuucaacccggagaccaacauccugcucaacgugccccugcgcgggacgaucgucacccggccccugauggaguccgagcucgugaucggcgcggugaucauccgcggccaccuccggauggccgggcacagccugggccgcugcgacaucaaggaccugcccaaggagaucaccgucgccaccucccggacgcugagcuacuacaagcugggggccucccagcgcgugggcaccgacagcggguucgccgcguacaaccgguaccgcaucggcaacuacaagcucaacaccgaccacgccggcuccaacgacaacaucgcccugcuggugcagugaggacuagucccuguucccagagcccacuuuuuuuucuuuuuuugaaauaaaauagccugucuuucagaucucaaaggcucuuuucagagccaccaaaaaaaaaaaaaaaaaaaaaaaaaaaaaaaaaaaaaaaaaaaaaaaaaaaaaaaaaaaaaaaaaaaaaaaaaaaaaaaaaaaaaaaaaaaaaaaaaaaaa

SEQ ID NO: 18980 - RNA, 965 nt, Artificial Sequence
  HCoV/OC43__NC_006213.1__membrane protein (M) mRNA gc
aggagagucccgcagucggcguccagcggcucugcuuguucgugugugugucguugcaggccuuauucaagcuuaccaugagcuccaagaccacccccgccccgguguacaucuggacggccgacgaggcgaucaaguuccugaaggaguggaacuucagccucggcaucauccugcuguucaucaccaucauccuccaguucggguacaccucccgcagcauguucguguacgugaucaagaugaucauccuguggcugauguggccccucaccaucauccugacgaucuucaacugcguguacgcccugaacaacgucuaccucggccuguccaucguguucaccaucguggccaucaucauguggaucgucuacuucgugaacagcauccggcuguucauccgcaccggguccuucuggagcuucaaccccgagaccaacaaccucaugugcaucgacaugaagggcacgauguacgugcggcccaucaucgaggacuaccacacccugaccgucaccaucauccgcgggcaccuguacauccagggcaucaagcucggcacgggguacucccuggccgaccugccggccuacaugaccguggcgaaggugacccaccucugcaccuacaagcggggcuuccuggaccgcaucagcgacacguccggguucgccgucuacgucaagagcaaggugggcaacuaccggcugcccuccacccagaaggggagcggcauggacaccgcccuccugcgcaacaacaucugaggacuagucccuguucccagagcccacuuuuuuuucuuuuuuugaaauaaaauagccugucuuucagaucucaaaggcucuuuucagagccaccaaaaaaaaaaaaaaaaaaaaaaaaaaaaaaaaaaaaaaaaaaaaaaaaaaaaaaaaaaaaaaaaaaaaaaaaaaaaaaaaaaaaaaaaaaaaaaaaaaaaa

SEQ ID NO: 18981 - RNA, 944 nt, Artificial Sequence
  HCoV/HKU1__NC_006577.2__membrane protein (M) mRNA gc
aggagagucccgcagucggcguccagcggcucugcuuguucgugugugugucguugcaggccuuauucaagcuuaccaugaacaagagcuuccugccccaguucaccuccgaccaggccgugaccuuccucaaggaguggaacuucagccugggcgugauccuccuguucaucacgaucauccugcaguucggguacaccucccgcagcauguucguguaccugaucaagaugaucauccucuggcugauguggccgcugaccaucacccucacgaucuucaacugcuucuacgcccugaacaacgcguuccuggccuucuccaucguguucaccaucaucagcaucgucaucuggauccucuacuucgugaacuccauccggcuguucauccgcaccggcagcuggugguccuucaaccccgagaccaacaaccugaugugcaucgacaugaaggggaagauguucgugcggcccgucaucgaggacuaccacacgcucaccgccaccgugauccgcggccaccuguacauccagggggugaagcugggcaccggcuacacgcucagcgaccugcccgucuacgugaccguggccaagguccaggugcugugcaccuacaagcgggccuuccucgacaagcuggacgugaacuccggguucgcggucuucgucaagagcaaggugggcaacuaccgccugccguccagcaagcccuccgggauggacaccgcccuccugcgggccugaggacuagucccuguucccagagcccacuuuuuuuucuuuuuuugaaauaaaauagccugucuuucagaucucaaaggcucuuuucagagccaccaaaaaaaaaaaaaaaaaaaaaaaaaaaaaaaaaaaaaaaaaaaaaaaaaaaaaaaaaaaaaaaaaaaaaaaaaaaaaaaaaaaaaaaaaaaaaaaaaaaaa

SEQ ID NO: 18982 - RNA, 950 nt, Artificial Sequence
  HCoV/229E/BN1/GER/2015__KU291448.1__membrane protein (M) mRNA gc
aggagagucccgcagucggcguccagcggcucugcuuguucgugugugugucguugcaggccuuauucaagcuuaccaugagcaacgacaacugcaccggcgacaucgugacccaccugaagaacuggaacuucggguggaacgucauccucacgaucuucaucgugauccugcaguucggccacuacaaguacucccgccuguucuacgggcucaagaugcuggugcuguggcuccuguggccccugguccucgcccugagcaucuucgacaccugggccaacugggacuccaacugggcguucguggccuucagcuuccugauggccguguccacccucgucaugugggugauguacuucgccaacagcuuccggcuguuccgccgggcccgcaccuucugggcguggaacccggaggugaacgccaucacggucaccaccgugcugggccagaccuacuaccagcccauccagcaggcccccacggggaucaccgugacccuccuguccggcguccuguacguggacggccaccggcucgccagcggggugcagguccacaaccugcccgaguacaugaccguggcggugccguccacgaccaucaucuacagccgcgucggccgguccgugaacagccagaacuccaccggguggguguucuacguccgcgugaagcacggcgacuucagcgccguguccagccccauguccaacaugaccgagaacgagcggcugcuccacuucuucugaggacuagucccuguucccagagcccacuuuuuuuucuuuuuuugaaauaaaauagccugucuuucagaucucaaaggcucuuuucagagccaccaaaaaaaaaaaaaaaaaaaaaaaaaaaaaaaaaaaaaaaaaaaaaaaaaaaaaaaaaaaaaaaaaaaaaaaaaaaaaaaaaaaaaaaaaaaaaaaaaaaaa

SEQ ID NO: 18983 - RNA, 953 nt, Artificial Sequence
  HCoV/NL63/RPTEC/2004__JX504050.1__membrane protein (M) mRNA gc
aggagagucccgcagucggcguccagcggcucugcuuguucgugugugugucguugcaggccuuauucaagcuuaccaugagcaacuccagcgugccccugcucgaggucuacgugcaccuccgcaacuggaacuucuccuggaaccugauccugacccuguucaucgugguccugcaguacggccacuacaaguacagccggcuccuguacgggcugaagauguccgugcucuggugccuguggccgcuggugcucgcccugagcaucuucgacugcuucgucaacuucaacguggacuggguguucuucggcuucuccauccugaugagcaucaucacccucugccugugggucauguacuucgugaacuccuuccgccuguggcggcgcgugaagacguucugggccuucaaccccgagaccaacgcgaucaucagccuccaggucuacgggcacaacuacuaccugcccgugauggccgcccccaccggcgugacccugacgcuccuguccgggguccugcucguggacggccacaagaucgccacccgggugcaggucggccagcugccgaaguacgugaucguggccacccccagcaccacgaucgucugcgaccgcguggggcgguccgugaacgagaccagccagaccggcugggcguucuacguccgcgccaagcacggggacuucuccggcguggccagccaggaggggguccuguccgagcgggagaagcuccugcaccugaucugaggacuagucccuguucccagagcccacuuuuuuuucuuuuuuugaaauaaaauagccugucuuucagaucucaaaggcucuuuucagagccaccaaaaaaaaaaaaaaaaaaaaaaaaaaaaaaaaaaaaaaaaaaaaaaaaaaaaaaaaaaaaaaaaaaaaaaaaaaaaaaaaaaaaaaaaaaaaaaaaaaaaa

SEQ ID NO: 18984 - RNA, 938 nt, Artificial Sequence
  Bat SARS-like CoV/WIV1__KF367457.1__membrane protein (M) mRNA gc
aggagagucccgcagucggcguccagcggcucugcuuguucgugugugugucguugcaggccuuauucaagcuuaccauggccgagaacggcaccaucagcguggaggagcugaagcgccuccuggagcaguggaaccuggucaucggguuccucuuccuggccuggaucaugcugcuccaguucgcguacuccaaccggaaccgcuuccuguacaucaucaagcugguguuccucuggcugcuguggcccgugacccucgccugcuucguccuggccgccguguaccggaucaacugggugacgggcgggaucgccaucgcgauggccugcaucgucggccugauguggcucagcuacuucaucgccuccuuccgccuguucgcccggacccgcagcaugugguccuucaacccggagaccaacauccugcucaacgugccccugcgggggaccaucgugacgcgcccccugauggagagcgagcucgucaucggcgcggugaucauccggggccaccuccgcauggccgggcacucccugggccggugcgacaucaaggaccugcccaaggagaucaccguggccaccagccgcacccuguccuacuacaagcugggggccagccagcgggucggcacggacuccggguucgccgcguacaaccgcuaccggaucggcaacuacaagcucaacaccgaccacgccggcagcaacgacaacaucgcccugcuggugcagugaggacuagucccuguucccagagcccacuuuuuuuucuuuuuuugaaauaaaauagccugucuuucagaucucaaaggcucuuuucagagccaccaaaaaaaaaaaaaaaaaaaaaaaaaaaaaaaaaaaaaaaaaaaaaaaaaaaaaaaaaaaaaaaaaaaaaaaaaaaaaaaaaaaaaaaaaaaaaaaaaaaaa

SEQ ID NO: 18985 - RNA, 941 nt, Artificial Sequence
  BatCoV/HKU9-1 BF_005I__NC_009021.1__membrane protein (M) mRNA gc
aggagagucccgcagucggcguccagcggcucugcuuguucgugugugugucguugcaggccuuauucaagcuuaccaugagcaacaacugcaccaacaccgugccccgcccggaggucaucgccgcccugaaggacuggaacuucgcgguguccgugauccuccuguucaucacgguccugcuccaguggggcuaccccagccggugcaagcccaucugggugaucaagauguucauccuguggcugcucuggccccuguccaucgccgccgccguguucgccgcgauccacccgaucaacagcgucgccuucggguucgccaucgccuucgcgugcaucuccggcaucauguggcugagcuacuucaucuccagcuuccgccuccugugccggaccggguccgccuggagcuucaugcccgagaccgacaugcugaucaacaucccccuccugggccgcaccgugacgcggcccaucaucuccgacagcccggccgugcaguuccugaucauccgcggggagcuccgguucgacggcuucacccugggccgcugcgaccccggggacaugcccgacaucgucaccaucgcccggcccaacgcccugcacugguacaagcgcgcgcucacccggaacauguacacgcgcuccgccauccugguguacaucaaguacaaggugggcaaccaccggguccagaacaccaccgaggacggggaccgccuggccauguucguggccugaggacuagucccuguucccagagcccacuuuuuuuucuuuuuuugaaauaaaauagccugucuuucagaucucaaaggcucuuuucagagccaccaaaaaaaaaaaaaaaaaaaaaaaaaaaaaaaaaaaaaaaaaaaaaaaaaaaaaaaaaaaaaaaaaaaaaaaaaaaaaaaaaaaaaaaaaaaaaaaaaaaaa

SEQ ID NO: 18986 - RNA, 926 nt, Artificial Sequence
  PDCoV/Swine/Thailand/S5011/2015__KU051641.1__membrane protein (M) mRNA gc
aggagagucccgcagucggcguccagcggcucugcuuguucgugugugugucguugcaggccuuauucaagcuuaccaugagcgacgccgaggaguggcagaucaucguguucaucgccaucaucugggcgcugggcgucauccuccagggcggguacgccacccgcaaccgggugaucuacgugaucaagcugauccugcucuggcugcugcagcccuucacccucgucgugacgaucuggaccgccguggaccgcuccagcaagaaggacgccgucuucaucguguccaucaucuucgccgugcugaccuucaucagcugggcgaaguacugguacgacuccauccggcugcucaugaagacccgcagcgccugggcccuguccccggagagccggcugcucgccgggaucauggaccccaugggcacguggcgcugcauccccaucgaccacauggcgcccauccugaccccggucgugaagcacgggaagcugaagcuccacggccaggagcuggccaacggcaucuccgugcggaacccgccccaggacauggucaucgugagccccuccgacaccuuccacuacaccuucaagaagcccguggagagcaacaacgaccccgaguucgccguccugaucuaccagggggaccgcgccuccaacgccggccuccacacgaucaccaccagcaaggcgggggacgcccggcuguacaaguacaugugaggacuagucccuguucccagagcccacuuuuuuuucuuuuuuugaaauaaaauagccugucuuucagaucucaaaggcucuuuucagagccaccaaaaaaaaaaaaaaaaaaaaaaaaaaaaaaaaaaaaaaaaaaaaaaaaaaaaaaaaaaaaaaaaaaaaaaaaaaaaaaaaaaaaaaaaaaaaaaaaaaaaa

SEQ ID NO: 18987 - RNA, 953 nt, Artificial Sequence
  PEDV/NPL-PEDv/2013/P10__KJ778616.1__membrane protein (M) mRNA gc
aggagagucccgcagucggcguccagcggcucugcuuguucgugugugugucguugcaggccuuauucaagcuuaccaugagcaacggcuccauccccguggacgaggucauccagcaccuccgcaacuggaacuucaccuggaacaucauccugaccauccugcugguggugcuccaguacgggcacuacaaguacagcgccuuccuguacggcgucaagauggccauccuguggauccucuggccgcuggugcuggcgcucucccuguucgacgccugggccagcuuccaggugaacugggucuucuucgccuucuccauccugauggccugcaucacgcucaugcuguggaucauguacuucgugaacagcauccggcuguggcgccggacccacuccugguggagcuucaaccccgagaccgacgcgcuccugaccacguccgugauggggcgccaggucugcauccccgugcugggcgcccccaccggggugacccucacccugcugagcggcacgcuccuggucgagggcuacaagguggccaccggggugcaggucucccagcugccgaacuucgugaccguggccaaggcgaccacgaccaucgucuacggccggguggggcgcagcgugaacgccuccagcggcaccgggugggccuucuacguccgguccaagcacggcgacuacagcgccguguccaaccccagcuccgugcucaccgacagcgagaagguccugcaccuggugugaggacuagucccuguucccagagcccacuuuuuuuucuuuuuuugaaauaaaauagccugucuuucagaucucaaaggcucuuuucagagccaccaaaaaaaaaaaaaaaaaaaaaaaaaaaaaaaaaaaaaaaaaaaaaaaaaaaaaaaaaaaaaaaaaaaaaaaaaaaaaaaaaaaaaaaaaaaaaaaaaaaaa

SEQ ID NO: 18988 - RNA, 959 nt, Artificial Sequence
  MHV/A59__NC_048217.1__membrane protein (M) mRNA gc
aggagagucccgcagucggcguccagcggcucugcuuguucgugugugugucguugcaggccuuauucaagcuuaccaugagcuccaccacccaggcccccgagccgguguaccaguggacggccgacgaggcggugcaguuccugaaggaguggaacuucagccucggcaucauccugcuguucaucaccaucauccuccaguucggguacaccucccgcagcauguucaucuacguggugaagaugaucauccuguggcugauguggccccucaccaucguccugugcaucuucaacugcguguacgcccugaacaacguguaccucggcuucuccaucgucuucacgaucgugagcaucgugaucuggaucauguacuucgucaacuccauccggcuguucauccgcaccgggagcuggugguccuucaaccccgagaccaacaaccugaugugcaucgacaugaagggcaccguguacgugcggcccaucaucgaggacuaccacacgcucaccgccaccaucauccgcgggcaccuguacaugcagggcgucaagcugggcaccggguucagccucuccgaccugccggccuacgugacgguggccaaggucagccaccugugcaccuacaagcgggcguuccucgacaagguggacggcguguccggguucgccgucuacgucaagagcaaggugggcaacuaccgccugcccuccaacaagcccagcggggccgacaccgcccugcuccggaccugaggacuagucccuguucccagagcccacuuuuuuuucuuuuuuugaaauaaaauagccugucuuucagaucucaaaggcucuuuucagagccaccaaaaaaaaaaaaaaaaaaaaaaaaaaaaaaaaaaaaaaaaaaaaaaaaaaaaaaaaaaaaaaaaaaaaaaaaaaaaaaaaaaaaaaaaaaaaaaaaaaaaa

SEQ ID NO: 18989 - RNA, 941 nt, Artificial Sequence
  SARS-CoV-2/Wuhan-Hu-1__NC_045512.2/MN908947.2/EPI_ISL_402128__mem brane protein (M) mRNA gc R9924
aggagagucccgcagucggcguccagcggcucugcuuguucgugugugugucguugcaggccuuauucaagcuuaccauggccgacagcaacggcaccaucaccguggaggagcugaagaagcuccuggagcaguggaaccuggucaucggguuccucuuccugacguggaucugccugcuccaguucgccuacgcgaaccgcaaccgguuccuguacaucaucaagcugaucuuccucuggcugcuguggcccgugacccucgccugcuucgugcuggccgccgucuaccgcaucaacuggaucaccggcgggaucgccaucgcgauggccugccuggugggccucauguggcuguccuacuucaucgccagcuuccggcuguucgcccgcacccgguccauguggagcuucaacccggagacgaacauccuccugaacgugccccugcacgggaccauccucacccgcccccugcuggaguccgagcucgucaucggcgcggugauccugcggggccaccuccgcaucgccgggcaccaccugggccggugcgacaucaaggaccugcccaaggagaucaccguggccacgagccgcacccuguccuacuacaagcucggggccagccagcgggucgccggcgacuccggguucgcggccuacagccgcuaccggaucggcaacuacaagcugaacaccgaccacuccagcuccagcgacaacaucgcccugcucgugcagugaggacuagucccuguucccagagcccacuuuuuuuucuuuuuuugaaauaaaauagccugucuuucagaucucaaaggcucuuuucagagccaccaaaaaaaaaaaaaaaaaaaaaaaaaaaaaaaaaaaaaaaaaaaaaaaaaaaaaaaaaaaaaaaaaaaaaaaaaaaaaaaaaaaaaaaaaaaaaaaaaaaaa

SEQ ID NO: 18990 - RNA, 941 nt, Artificial Sequence
  SARS-CoV-2__MT919771.1__membrane protein (M) mRNA gc
aggagagucccgcagucggcguccagcggcucugcuuguucgugugugugucguugcaggccuuauucaagcuuaccauggccgacagcaacggcaccaucaccguggaggagcugaagaagcuccuggagcaguggaaccuggucaucggguuccucuucuucacguggaucugccugcugcaguucgccuacgcgaaccgcaaccgguuccucuacaucaucaagcugaucuuccuguggcuccuguggcccgugacccuggccugcuucgugcucgccgccgucuaccgcaucaacuggaucaccggcgggaucgccaucgcgauggccugccuggugggccugauguggcucuccuacuucaucgccagcuuccggcuguucgcccgcacccgguccauguggagcuucaacccggagacgaacauccugcucaacgugccccugcacgggaccauccugacccgcccccuccuggaguccgagcuggucaucggcgcggugauccuccggggccaccuccgcaucgccgggcaccaccugggccggugcgacaucaaggaccugcccaaggagaucaccguggccacgagccgcacccuguccuacuacaagcugggggccagccagcgggucgccggcgacuccggguucgcggccuacagccgcuaccggaucggcaacuacaagcucaacaccgaccacuccagcuccagcgacaacaucgcccugcuggugcagugaggacuagucccuguucccagagcccacuuuuuuuucuuuuuuugaaauaaaauagccugucuuucagaucucaaaggcucuuuucagagccaccaaaaaaaaaaaaaaaaaaaaaaaaaaaaaaaaaaaaaaaaaaaaaaaaaaaaaaaaaaaaaaaaaaaaaaaaaaaaaaaaaaaaaaaaaaaaaaaaaaaaa

SEQ ID NO: 18991 - RNA, 941 nt, Artificial Sequence
  SARS-CoV-2__MT913062.1__membrane protein (M) mRNA gc
aggagagucccgcagucggcguccagcggcucugcuuguucgugugugugucguugcaggccuuauucaagcuuaccauggccgacagcaacggcaccaucaccguggaggagcugaagaagcuccuggagcaguggaaccuggucaucggguuccucuuccugacguggaucugccugcuccaguucgccuacgcgaaccgcaaccgguuccuguacaucaucaagcugaucuuccucuggcugcuguggcccgugacccucgccugcuucgugcuggccgccgucuaccgcaucaacuggaucaccggcgggaucgccaucgcgauggccugccuggugggccucauguggcuguccuacuucaucgccagcuuccggcuguucgcccgcacccgguccauguggagcuucaacccggagacgaacauccuccugaacgugccccugcacgggaccauccucacccgcccccugcuggaguccgagcucgucaucggcgcggugauccugcggggccaccuccgcaucgccgggcaccaccugggccggugcgacaucaaggaccugcccaaggagaucaccguggccacgagccgcaugcuguccuacuacaagcucggggccagccagcgggucgccggcgacuccggguucgcggccuacagccgcuaccggaucggcaacuacaagcugaacaccgaccacuccagcuccagcgacaacaucgcccugcucgugcagugaggacuagucccuguucccagagcccacuuuuuuuucuuuuuuugaaauaaaauagccugucuuucagaucucaaaggcucuuuucagagccaccaaaaaaaaaaaaaaaaaaaaaaaaaaaaaaaaaaaaaaaaaaaaaaaaaaaaaaaaaaaaaaaaaaaaaaaaaaaaaaaaaaaaaaaaaaaaaaaaaaaaa

SEQ ID NO: 18992 - RNA, 941 nt, Artificial Sequence
  SARS-CoV-2__MT913095.1__membrane protein (M) mRNA gc
aggagagucccgcagucggcguccagcggcucugcuuguucgugugugugucguugcaggccuuauucaagcuuaccauggccgacagcaacggcaccaucaccguggaggagcugaagaagcuccuggagcaguggaaccuggucaucggguuccucuuccugacguggaucugccugcuccaguucgccuacgcgaaccgcaaccgguuccuguacaucaucaagcugaucuuccucuggcugcuguggcccgugacccucgccugcuucgugcuggccgccuucuaccgcaucaacuggaucaccggcgggaucgccaucgcgauggccugccuggucggccucauguggcuguccuacuucaucgccagcuuccggcuguucgcccgcacccgguccauguggagcuucaacccggagacgaacauccuccugaacgugccccugcacgggaccauccucacccgcccccugcuggaguccgagcucgugaucggcgcggucauccugcggggccaccuccgcaucgccgggcaccaccugggccggugcgacaucaaggaccugcccaaggagaucaccguggccacgagccgcacccuguccuacuacaagcucggggccagccagcggguggccggcgacuccggguucgcggccuacagccgcuaccggaucggcaacuacaagcugaacaccgaccacuccagcuccagcgacaacaucgcccugcucguccagugaggacuagucccuguucccagagcccacuuuuuuuucuuuuuuugaaauaaaauagccugucuuucagaucucaaaggcucuuuucagagccaccaaaaaaaaaaaaaaaaaaaaaaaaaaaaaaaaaaaaaaaaaaaaaaaaaaaaaaaaaaaaaaaaaaaaaaaaaaaaaaaaaaaaaaaaaaaaaaaaaaaaa

SEQ ID NO: 18993 - RNA, 941 nt, Artificial Sequence
  SARS-CoV-2__MT913138.1__membrane protein (M) mRNA gc
aggagagucccgcagucggcguccagcggcucugcuuguucgugugugugucguugcaggccuuauucaagcuuaccauggccgacagcaacggcaccaucaccguggaggagcugaagaagcuccuggagcaguggaaccuggucaucggguuccucuuccugacguggaucugccugcuccaguucgccuacgcgaaccgcaaccgguuccuguacaucaucaagcugaucuuccucuggcugcuguggcccgugacccucgccugcuucgugcuggccgccgucuaccgcaucaacuggaucaccggcgggaucgccaucgcgauggccugccuggugggccucauguggcuguccuacuucaucgccagcuuccggcuguucgcccgcacccgguccauguggagcuucaacccggagacgaacauccuccugaacgugccccugcacgggaccauccucacccgcccccugcuggaguccgagcucgucaucggcgcggugauccugcggggccaccuccgcaucgccgggcaccaccugggccggugcgacaucaaggaccugcccaaggagaucaccguggccacgagccugacccucuccuacuacaagcugggggccagccagcgcgucgccggcgacuccggguucgcggccuacagccgguaccgcaucggcaacuacaagcugaacaccgaccacuccagcuccagcgacaacaucgcccuccuggugcagugaggacuagucccuguucccagagcccacuuuuuuuucuuuuuuugaaauaaaauagccugucuuucagaucucaaaggcucuuuucagagccaccaaaaaaaaaaaaaaaaaaaaaaaaaaaaaaaaaaaaaaaaaaaaaaaaaaaaaaaaaaaaaaaaaaaaaaaaaaaaaaaaaaaaaaaaaaaaaaaaaaaaa

SEQ ID NO: 18994 - RNA, 941 nt, Artificial Sequence
  SARS-CoV-2__MT913144.1__membrane protein (M) mRNA gc
aggagagucccgcagucggcguccagcggcucugcuuguucgugugugugucguugcaggccuuauucaagcuuaccauggccgacagcaacggcaccaucaccguggaggagcugaagaagcuccuggagcaguggaaccugaucaucggguuccucuuccugacguggaucugccugcuccaguucgccuacgcgaaccgcaaccgguuccuguacaucaucaagcugaucuuccucuggcugcuguggcccgucacccucgccugcuucgugcuggccgccguguaccgcaucaacuggaucaccggcgggaucgccaucgcgauggccugccuggucggccucauguggcuguccuacuucaucgccagcuuccggcuguucgcccgcacccgguccauguggagcuucaacccggagacgaacauccuccugaacgugccccugcacgggaccauccucacccgcccccugcuggaguccgagcucgugaucggcgcggucauccugcggggccaccuccgcaucgccgggcaccaccugggccggugcgacaucaaggaccugcccaaggagaucaccguggccacgagccgcacccuguccuacuacaagcucggggccagccagcggguggccggcgacuccggguucgcggccuacagccgcuaccggaucggcaacuacaagcugaacaccgaccacuccagcuccagcgacaacaucgcccugcucguccagugaggacuagucccuguucccagagcccacuuuuuuuucuuuuuuugaaauaaaauagccugucuuucagaucucaaaggcucuuuucagagccaccaaaaaaaaaaaaaaaaaaaaaaaaaaaaaaaaaaaaaaaaaaaaaaaaaaaaaaaaaaaaaaaaaaaaaaaaaaaaaaaaaaaaaaaaaaaaaaaaaaaaa

SEQ ID NO: 18995 - RNA, 941 nt, Artificial Sequence
  SARS-CoV-2__MT911566.1__membrane protein (M) mRNA gc
aggagagucccgcagucggcguccagcggcucugcuuguucgugugugugucguugcaggccuuauucaagcuuaccauggccggcagcaacgggaccaucaccguggaggagcugaagaagcuccuggagcaguggaaccuggucaucggcuuccucuuccugacguggaucugccugcuccaguucgccuacgcgaaccgcaaccgguuccuguacaucaucaagcugaucuuccucuggcugcuguggcccgugacccucgccugcuucgugcuggccgccgucuaccgcaucaacuggaucaccgggggcaucgccaucgcgauggccugccugguggggcucauguggcuguccuacuucaucgccagcuuccggcuguucgcccgcacccgguccauguggagcuucaacccggagacgaacauccuccugaacgugccccugcacggcaccauccucacccgcccccugcuggaguccgagcucgucaucggcgcggugauccugcgggggcaccuccgcaucgccggccaccaccuggggcggugcgacaucaaggaccugcccaaggagaucaccguggccacgagccgcacccuguccuacuacaagcucggcgccagccagcgggucgccggggacuccggcuucgcggccuacagccgcuaccggaucggcaacuacaagcugaacaccgaccacuccagcuccagcgacaacaucgcccugcucgugcagugaggacuagucccuguucccagagcccacuuuuuuuucuuuuuuugaaauaaaauagccugucuuucagaucucaaaggcucuuuucagagccaccaaaaaaaaaaaaaaaaaaaaaaaaaaaaaaaaaaaaaaaaaaaaaaaaaaaaaaaaaaaaaaaaaaaaaaaaaaaaaaaaaaaaaaaaaaaaaaaaaaaaa

SEQ ID NO: 18996 - RNA, 941 nt, Artificial Sequence
  SARS-CoV-2__MT892971.1__membrane protein (M) mRNA gc
aggagagucccgcagucggcguccagcggcucugcuuguucgugugugugucguugcaggccuuauucaagcuuaccauggccgacagcaacggcaccaucaccguggaggagcugaagaagcuccuggagcaguggaaccuggucaucggguuccucuuccugacguggaucugccugcuccaguucgccuacgcgaaccgcaaccgguuccuguacaucaucaagcugaucuuccucuggcugcuguggcccgugacccucgccuccuucgugcuggccgccgucuaccgcaucaacuggaucaccggcgggaucgccaucgcgauggccugccuggugggccucauguggcugagcuacuucaucgccuccuuccggcuguucgcccgcacccggagcaugugguccuucaacccggagacgaacauccuccugaacgugccccugcacgggaccauccucacccgcccccugcuggagagcgagcucgucaucggcgcggugauccugcggggccaccuccgcaucgccgggcaccaccugggccggugcgacaucaaggaccugcccaaggagaucaccguggccacgucccgcacccugagcuacuacaagcucggggccucccagcgggucgccggcgacagcggguucgcggccuacucccgcuaccggaucggcaacuacaagcugaacaccgaccacagcuccagcuccgacaacaucgcccugcucgugcagugaggacuagucccuguucccagagcccacuuuuuuuucuuuuuuugaaauaaaauagccugucuuucagaucucaaaggcucuuuucagagccaccaaaaaaaaaaaaaaaaaaaaaaaaaaaaaaaaaaaaaaaaaaaaaaaaaaaaaaaaaaaaaaaaaaaaaaaaaaaaaaaaaaaaaaaaaaaaaaaaaaaaa

SEQ ID NO: 18997 - RNA, 941 nt, Artificial Sequence
  SARS-CoV-2__MT883499.1__membrane protein (M) mRNA gc
aggagagucccgcagucggcguccagcggcucugcuuguucgugugugugucguugcaggccuuauucaagcuuaccauggccuacagcaacggcaccaucaccguggaggagcugaagaagcuccuggagcaguggaaccuggucaucggguuccucuuccugacguggaucugccugcuccaguucgccuacgcgaaccgcaaccgguuccuguacaucaucaagcugaucuuccucuggcugcuguggcccgugacccucgccugcuucgugcuggccgccgucuaccgcaucaacuggaucaccggcgggaucgccaucgcgauggccugccuggugggccucauguggcuguccuacuucaucgccagcuuccggcuguucgcccgcacccgguccauguggagcuucaacccggagacgaacauccuccugaacgugccccugcacgggaccauccucacccgcccccugcuggaguccgagcucgucaucggcgcggugauccugcggggccaccuccgcaucgccgggcaccaccugggccggugcgacaucaaggaccugcccaaggagaucaccguggccacgagccgcacccuguccuacuacaagcucggggccagccagcgggucgccggcgacuccggguucgcggccuacagccgcuaccggaucggcaacuacaagcugaacaccgaccacuccagcuccagcgacaacaucgcccugcucgugcagugaggacuagucccuguucccagagcccacuuuuuuuucuuuuuuugaaauaaaauagccugucuuucagaucucaaaggcucuuuucagagccaccaaaaaaaaaaaaaaaaaaaaaaaaaaaaaaaaaaaaaaaaaaaaaaaaaaaaaaaaaaaaaaaaaaaaaaaaaaaaaaaaaaaaaaaaaaaaaaaaaaaaa

SEQ ID NO: 18998 - RNA, 941 nt, Artificial Sequence
  SARS-CoV-2__MT883502.1__membrane protein (M) mRNA gc
aggagagucccgcagucggcguccagcggcucugcuuguucgugugugugucguugcaggccuuauucaagcuuaccauggccgacagcaacggcaccaucaccguggaggagcugaagaagcuccuggagcaguggaaccuggucaucggguuccucuuccugacguggaucugccugcuccaguucgccuacgcgaaccgcaaccgguuccuguacaucaucaagcugaucuuccucuggcugcuguggccccucacccuggccugcuucgugcuggccgccguguaccgcaucaacuggaucaccggcgggaucgccaucgcgauggccugccucgucggccugauguggcuguccuacuucaucgccagcuuccgccucuucgcccggacccgguccauguggagcuucaacccggagacgaacauccugcugaacgugccccuccacgggaccauccugacccgcccccugcucgaguccgagcuggugaucggcgcggucauccugcggggccaccuccgcaucgccgggcaccaccugggccggugcgacaucaaggaccugcccaaggagaucaccguggccacgagccgcacccucuccuacuacaagcugggggccagccagcggguggccggcgacuccggguucgcggccuacagccgcuaccggaucggcaacuacaagcugaacaccgaccacuccagcuccagcgacaacaucgcccuccugguccagugaggacuagucccuguucccagagcccacuuuuuuuucuuuuuuugaaauaaaauagccugucuuucagaucucaaaggcucuuuucagagccaccaaaaaaaaaaaaaaaaaaaaaaaaaaaaaaaaaaaaaaaaaaaaaaaaaaaaaaaaaaaaaaaaaaaaaaaaaaaaaaaaaaaaaaaaaaaaaaaaaaaaa

SEQ ID NO: 18999 - RNA, 941 nt, Artificial Sequence
  SARS-CoV-2__MT873185.1__membrane protein (M) mRNA gc
aggagagucccgcagucggcguccagcggcucugcuuguucgugugugugucguugcaggccuuauucaagcuuaccauggccgacagcaacggcaccaucaccguggaggagcugaagaagcuccuggagcaguggaaccuggucaucggguuccucuuccugacguggaucugccugcuccaguucgccuacgcgaaccgcaaccgguuccuguacaucaucaagcugaucuuccucuggcugcuguggcccgugacccucgccugcuucgugcuggccgccgucuaccgcaucaacuggaucaccggcgggaucgccaucgcgauguccugccuggugggccucauguggcugagcuacuucaucgccuccuuccggcuguucgcccgcacccggagcaugugguccuucaacccggagacgaacauccuccugaacgugccccugcacgggaccauccucacccgcccccugcuggagagcgagcucgucaucggcgccgugauccugcggggccaccuccgcaucgcggggcaccaccugggccggugcgacaucaaggaccugcccaaggagaucaccguggccacgucccgcacccugagcuacuacaagcucggggccucccagcgggucgccggcgacagcggguucgccgcguacucccgcuaccggaucggcaacuacaagcugaacaccgaccacagcuccagcuccgacaacaucgcccugcucgugcagugaggacuagucccuguucccagagcccacuuuuuuuucuuuuuuugaaauaaaauagccugucuuucagaucucaaaggcucuuuucagagccaccaaaaaaaaaaaaaaaaaaaaaaaaaaaaaaaaaaaaaaaaaaaaaaaaaaaaaaaaaaaaaaaaaaaaaaaaaaaaaaaaaaaaaaaaaaaaaaaaaaaaa

SEQ ID NO: 19000 - RNA, 941 nt, Artificial Sequence
  SARS-CoV-2__MT873187.1__membrane protein (M) mRNA gc
aggagagucccgcagucggcguccagcggcucugcuuguucgugugugugucguugcaggccuuauucaagcuuaccauggccgacagcaacggcaccaucaccguggaggagcugaagaagcuccuggagcaguggaaccuggucaucggguuccucuuccugacguggaucugccugcuccaguucgccuacgcgaaccgcaaccgguuccuguacaucaucaagcugaucuuccucuggcugcuguggcccgugacccucgccugcuucgugcuggccgccgucuaccgcaucaacuggaucaccggcgggaucgccaucgcgauggccugccuggugggccucauguggcuguccuacuucaucgccagcuuccggcuguucgcccgcacccgguccauguggagcuucaacccggagacgaacauccuccugaacgugccccugcacgggaccauccucacccgcccccugcuggaguccgagcucgucaucggcgcggugauccugcggggccaccuccgcaucgccgggcaccaccugggccggugcgacaucaaggaccugcccaaggagaucaccguggccacgagccgcacccuguccuacuacaagcucggggccagccagcgggucgccggcgacuccggguucgcggccuacagccgcuaccggaucggcaacuacaagcugaacaccuaccacuccagcuccagcgacaacaucgcccugcucgugcagugaggacuagucccuguucccagagcccacuuuuuuuucuuuuuuugaaauaaaauagccugucuuucagaucucaaaggcucuuuucagagccaccaaaaaaaaaaaaaaaaaaaaaaaaaaaaaaaaaaaaaaaaaaaaaaaaaaaaaaaaaaaaaaaaaaaaaaaaaaaaaaaaaaaaaaaaaaaaaaaaaaaaa

SEQ ID NO: 19001 - RNA, 941 nt, Artificial Sequence
  SARS-CoV-2__MT873268.1__membrane protein (M) mRNA gc
aggagagucccgcagucggcguccagcggcucugcuuguucgugugugugucguugcaggccuuauucaagcuuaccauggccgacagcaacggcaccaucaccguggaggagcugaagaagcuccuggagcaguggaaccuggucaucggguuccucuuccugacguggaucugccugcuccaguucgccuacgcgaaccgcaaccgguuccuguacaucaucaagcugaucuuccucuggcugcuguggcccgugacccucgccugcuucgugcuggccgccgucuaccgcaucaacuggaucaccggcgggaucgccaucgcgauggccugccuggugggccucauguggcuguccuacuucaucgccagcuuccggcuguucgcccgcacccgguccauguggagcuucaacccggagacgaacauccuccugaacgugccccugcacgacaccauccucacccgcccccugcuggaguccgagcucgucaucggggcggugauccugcggggccaccuccgcaucgccggccaccaccuggggcggugcgacaucaaggaccugcccaaggagaucaccguggccacgagccgcacccuguccuacuacaagcucggcgccagccagcgggucgccggggacuccggcuucgcggccuacagccgcuaccggaucgggaacuacaagcugaacaccgaccacuccagcuccagcgacaacaucgcccugcucgugcagugaggacuagucccuguucccagagcccacuuuuuuuucuuuuuuugaaauaaaauagccugucuuucagaucucaaaggcucuuuucagagccaccaaaaaaaaaaaaaaaaaaaaaaaaaaaaaaaaaaaaaaaaaaaaaaaaaaaaaaaaaaaaaaaaaaaaaaaaaaaaaaaaaaaaaaaaaaaaaaaaaaaaa

SEQ ID NO: 19002 - RNA, 941 nt, Artificial Sequence
  SARS-CoV-2__MT873272.1__membrane protein (M) mRNA gc
aggagagucccgcagucggcguccagcggcucugcuuguucgugugugugucguugcaggccuuauucaagcuuaccaugagcgacuccaacggcaccaucaccguggaggagcugaagaagcuccuggagcaguggaaccuggucaucggguuccucuuccugacguggaucugccugcuccaguucgccuacgccaaccgcaaccgguuccuguacaucaucaagcugaucuuccucuggcugcuguggcccgugacccucgcgugcuucgugcuggccgccgucuaccgcaucaacuggaucaccggcgggaucgccaucgccauggcgugccuggugggccucauguggcugagcuacuucaucgccuccuuccggcuguucgcccgcacccggagcaugugguccuucaacccggagacgaacauccuccugaacgugccccugcacgggaccauccucacccgcccccugcuggagagcgagcucgucaucggcgccgugauccugcggggccaccuccgcaucgcggggcaccaccugggccggugcgacaucaaggaccugcccaaggagaucaccguggccacgucccgcacccugagcuacuacaagcucggggccucccagcgggucgccggcgacagcggguucgccgcguacucccgcuaccggaucggcaacuacaagcugaacaccgaccacagcuccagcuccgacaacaucgcccugcucgugcagugaggacuagucccuguucccagagcccacuuuuuuuucuuuuuuugaaauaaaauagccugucuuucagaucucaaaggcucuuuucagagccaccaaaaaaaaaaaaaaaaaaaaaaaaaaaaaaaaaaaaaaaaaaaaaaaaaaaaaaaaaaaaaaaaaaaaaaaaaaaaaaaaaaaaaaaaaaaaaaaaaaaaa

SEQ ID NO: 19003 - RNA, 941 nt, Artificial Sequence
  SARS-CoV-2__MT873351.1__membrane protein (M) mRNA gc
aggagagucccgcagucggcguccagcggcucugcuuguucgugugugugucguugcaggccuuauucaagcuuaccauggccgacagcaacggcaccaucaccguggaggagcugaagaagcuccuggagcaguggaaccuggucaucggguuccucuuccugacguggaucugccugcuccaguucgccuacgcgaaccgcaaccgguuccuguacaucaucaagcugaucuuccucuggcugcuguggcccgugacccucgccugcuucgugcuggccgccgucuaccgcaucaacuggaucaccggcgggaucgccaucgcgauggccugccuggugggccucauguggcuguccuacuucaucgccagccugcgccucuucgcccggacccgguccauguggagcuucaacccggagacgaacauccugcugaacgugccccuccacgggaccauccugacccgcccccugcucgaguccgagcuggucaucggcgcggugauccugcggggccaccuccgcaucgccgggcaccaccugggccggugcgacaucaaggaccugcccaaggagaucaccguggccacgagccgcacccucuccuacuacaagcugggggccagccagcgggucgccggcgacuccggguucgcggccuacagccgcuaccggaucggcaacuacaagcugaacaccgaccacuccagcuccagcgacaacaucgcccuccuggugcagugaggacuagucccuguucccagagcccacuuuuuuuucuuuuuuugaaauaaaauagccugucuuucagaucucaaaggcucuuuucagagccaccaaaaaaaaaaaaaaaaaaaaaaaaaaaaaaaaaaaaaaaaaaaaaaaaaaaaaaaaaaaaaaaaaaaaaaaaaaaaaaaaaaaaaaaaaaaaaaaaaaaaa

SEQ ID NO: 19004 - RNA, 941 nt, Artificial Sequence
  SARS-CoV-2__MT872501.1__membrane protein (M) mRNA gc
aggagagucccgcagucggcguccagcggcucugcuuguucgugugugugucguugcaggccuuauucaagcuuaccauggccgacagcaacggcaccaucaccguggaggagcugaagaagcuccuggagcaguggaaccuggucaucggguuccucuuccugacguggaucugccugcuccaguucgccuacgcgaaccgcaaccgguuccuguacaucaucaagcugaucuuccucuggcugcuguggcccgugacccucgccugcuucgugcuggccgccgucuaccgcaucaacuggaucaccggcgggaucgccaucgcgauggccugccuggugggccucauguggcuguccuacuucaucgccagcuuccggcuguucgcccgcacccgguccaucuggagcuucaacccggagacgaacauccuccugaacgugccccugcacgggaccauccucacccgcccccugcuggaguccgagcucgucaucggcgcggugauccugcggggccaccuccgcaucgccgggcaccaccugggccggugcgacaucaaggaccugcccaaggagaucaccguggccacgagccgcacccuguccuacuacaagcucggggccagccagcgggucgccggcgacuccggguucgcggccuacagccgcuaccggaucggcaacuacaagcugaacaccgaccacuccagcuccagcgacaacaucgcccugcucgugcagugaggacuagucccuguucccagagcccacuuuuuuuucuuuuuuugaaauaaaauagccugucuuucagaucucaaaggcucuuuucagagccaccaaaaaaaaaaaaaaaaaaaaaaaaaaaaaaaaaaaaaaaaaaaaaaaaaaaaaaaaaaaaaaaaaaaaaaaaaaaaaaaaaaaaaaaaaaaaaaaaaaaaa

SEQ ID NO: 19005 - RNA, 941 nt, Artificial Sequence
  SARS-CoV-2__MT846468.1__membrane protein (M) mRNA gc
aggagagucccgcagucggcguccagcggcucugcuuguucgugugugugucguugcaggccuuauucaagcuuaccauggccgacagcaacggcaccaucaccguggaggagcugaagaagcuccuggagcaguggaaccuggucaucggguuccucuuccugacguggaucugccugcuccaguucgccuacgcgaaccgcaaccgguuccuguacaucaucaagcugaccuuccucuggcugcuguggcccgugacccucgccugcuucgugcuggccgccgucuaccgcaucaacuggaucaccggcgggaucgccaucgcgauggccugccuggugggccucauguggcuguccuacuucaucgccagcuuccggcuguucgcccgcacgcgguccauguggagcuucaacccggagaccaacauccuccugaacgugccccugcacgggaccauccucacccgcccccugcuggaguccgagcucgucaucggcgcggugauccugcggggccaccuccgcaucgccgggcaccaccugggccggugcgacaucaaggaccugcccaaggagaucacgguggccaccagccgcacccuguccuacuacaagcucggggccagccagcgggucgccggcgacuccggguucgcggccuacagccgcuaccggaucggcaacuacaagcugaacaccgaccacuccagcuccagcgacaacaucgcccugcucgugcagugaggacuagucccuguucccagagcccacuuuuuuuucuuuuuuugaaauaaaauagccugucuuucagaucucaaaggcucuuuucagagccaccaaaaaaaaaaaaaaaaaaaaaaaaaaaaaaaaaaaaaaaaaaaaaaaaaaaaaaaaaaaaaaaaaaaaaaaaaaaaaaaaaaaaaaaaaaaaaaaaaaaaa

SEQ ID NO: 19006 - RNA, 941 nt, Artificial Sequence
  SARS-CoV-2__MT846494.1__membrane protein (M) mRNA gc
aggagagucccgcagucggcguccagcggcucugcuuguucgugugugugucguugcaggccuuauucaagcuuaccauggccgacagcaacggcaccaucaccguggaggagcugaagaagcuccuggagcaguggaaccuggucaucggguuccucuuccugacguggaucugccugcuccaguucgccuacgcgaaccgcaaccgguuccuguacaucaucaagcugaucuuccucuggcugcuguggcccgugacccucgccugcuucgugcuggccuccgucuaccgcaucaacuggaucaccggcgggaucgccaucgccauggcgugccuggugggccucauguggcugagcuacuucaucgccuccuuccggcuguucgcccgcacccggagcaugugguccuucaacccggagacgaacauccuccugaacgugccccugcacgggaccauccucacccgcccccugcuggagagcgagcucgucaucggcgccgugauccugcggggccaccuccgcaucgcggggcaccaccugggccggugcgacaucaaggaccugcccaaggagaucaccguggccacgucccgcacccugagcuacuacaagcucggggccucccagcgggucgccggcgacagcggguucgccgcguacucccgcuaccggaucggcaacuacaagcugaacaccgaccacagcuccagcuccgacaacaucgcccugcucgugcagugaggacuagucccuguucccagagcccacuuuuuuuucuuuuuuugaaauaaaauagccugucuuucagaucucaaaggcucuuuucagagccaccaaaaaaaaaaaaaaaaaaaaaaaaaaaaaaaaaaaaaaaaaaaaaaaaaaaaaaaaaaaaaaaaaaaaaaaaaaaaaaaaaaaaaaaaaaaaaaaaaaaaa

SEQ ID NO: 19007 - RNA, 941 nt, Artificial Sequence
  SARS-CoV-2__MT846567.1__membrane protein (M) mRNA gc
aggagagucccgcagucggcguccagcggcucugcuuguucgugugugugucguugcaggccuuauucaagcuuaccaugguggacagcaacggcaccaucaccgucgaggagcugaagaagcuccuggagcaguggaaccuggugaucggguuccucuuccugacguggaucugccugcuccaguucgccuacgccaaccgcaaccgguuccuguacaucaucaagcugaucuuccucuggcugcuguggcccgugacccucgcgugcuucguccuggccgccguguaccgcaucaacuggaucaccggcgggaucgccaucgccauggcgugccuggugggccucauguggcuguccuacuucaucgccagcuuccggcuguucgcccgcacccgguccauguggagcuucaacccggagacgaacauccuccugaacgucccccugcacgggaccauccucacccgcccccugcuggaguccgagcucgugaucggcgccgugauccugcggggccaccuccgcaucgcggggcaccaccugggccggugcgacaucaaggaccugcccaaggagaucaccgucgccacgagccgcacccuguccuacuacaagcucggggccagccagcggguggccggcgacuccggguucgccgcguacagccgcuaccggaucggcaacuacaagcugaacaccgaccacuccagcuccagcgacaacaucgcccugcucgugcagugaggacuagucccuguucccagagcccacuuuuuuuucuuuuuuugaaauaaaauagccugucuuucagaucucaaaggcucuuuucagagccaccaaaaaaaaaaaaaaaaaaaaaaaaaaaaaaaaaaaaaaaaaaaaaaaaaaaaaaaaaaaaaaaaaaaaaaaaaaaaaaaaaaaaaaaaaaaaaaaaaaaaa

SEQ ID NO: 19008 - RNA, 941 nt, Artificial Sequence
  SARS-CoV-2__MT846668.1__membrane protein (M) mRNA gc
aggagagucccgcagucggcguccagcggcucugcuuguucgugugugugucguugcaggccuuauucaagcuuaccauggccgacagcaacggcaccaucaccguggaggagcugaagaagcuccuggagcaguggaaccuggucaucggguuccucuuccugacguggaucugccugcuccaguucgccuacgcgaaccgcaaccgguuccuguacaucaucaagcugaucuuccucuggcugcuguggcccgugacccucgccugcuucgugcuggccgccgucuaccgcaucaacuggaucaccggcgggaucgccaucgcgauggccugccuggugggccucauguggcuguccuacuucaucgccagcuuccggcuguucgcccgcacccgguccauguggagcuucaacccggagacgaacauccuccugaacgugccccugcacgggaccauccucacccgcccccugcuggaguccgagcucgucaucggcgcggugauccugcggggccaccuccgcaucgccgggcaccaccugggccggugcgacaucaaggaccugcccaaggagaucaccguggccacgagccgcacccuguccuacuacaagcucggggccagccagcgggucaccggcgacuccggguucgccgcguacagccgcuaccggaucggcaacuacaagcugaacaccgaccacuccagcuccagcgacaacaucgcccugcucgugcagugaggacuagucccuguucccagagcccacuuuuuuuucuuuuuuugaaauaaaauagccugucuuucagaucucaaaggcucuuuucagagccaccaaaaaaaaaaaaaaaaaaaaaaaaaaaaaaaaaaaaaaaaaaaaaaaaaaaaaaaaaaaaaaaaaaaaaaaaaaaaaaaaaaaaaaaaaaaaaaaaaaaaa

SEQ ID NO: 19009 - RNA, 941 nt, Artificial Sequence
  SARS-CoV-2__MT843737.1__membrane protein (M) mRNA gc
aggagagucccgcagucggcguccagcggcucugcuuguucgugugugugucguugcaggccuuauucaagcuuaccauggccgacagcaacggcaccaucaccguggaggagcugaagaagcuccuggagcaguggaaccugcucaucggguuccuguuccugacguggaucugccuccugcaguucgccuacgcgaaccgcaaccgguuccuguacaucaucaagcucaucuuccuguggcugcucuggcccgucacccuggccugcuucgugcuggccgccguguaccgcaucaacuggaucaccggcgggaucgccaucgcgauggccugccucgucggccugauguggcuguccuacuucaucgccagcuuccgccucuucgcccggacccgguccauguggagcuucaacccggagacgaacauccugcugaacgugccccuccacgggaccauccugacccgcccccugcucgaguccgagcuggugaucggcgcggucauccugcggggccaccuccgcaucgccgggcaccaccugggccggugcgacaucaaggaccugcccaaggagaucaccguggccacgagccgcacccucuccuacuacaagcugggggccagccagcggguggccggcgacuccggguucgcggccuacagccgcuaccggaucggcaacuacaagcugaacaccgaccacuccagcuccagcgacaacaucgcccuccugguccagugaggacuagucccuguucccagagcccacuuuuuuuucuuuuuuugaaauaaaauagccugucuuucagaucucaaaggcucuuuucagagccaccaaaaaaaaaaaaaaaaaaaaaaaaaaaaaaaaaaaaaaaaaaaaaaaaaaaaaaaaaaaaaaaaaaaaaaaaaaaaaaaaaaaaaaaaaaaaaaaaaaaaa

SEQ ID NO: 19010 - RNA, 941 nt, Artificial Sequence
  SARS-CoV-2__MT831141.1__membrane protein (M) mRNA gc
aggagagucccgcagucggcguccagcggcucugcuuguucgugugugugucguugcaggccuuauucaagcuuaccauggccgacagcaacggcaccaucaccguggaggagcugaagaagcuccuggagcaguggaaccuggucaucggguuccucuuccugacguggaucugccugcuccaguucgccuacgcgaaccgcaaccgguuccuguacaucaucaagcugaucuuccucuggcugcuguggcccgugacccucgccugcuucgugcuggccgccgucuaccgcaucaacuggaucaccggcgggaucgccaucgcgauggccugccuggugggccucauguggcuguccuacuucaucgccagcuuccggcuguucgugcgcacccgguccauguggagcuucaacccggagacgaacauccuccugaacgucccccugcacgggaccauccucacccgcccccugcuggaguccgagcucgugaucggcgccgugauccugcggggccaccuccgcaucgcggggcaccaccugggccggugcgacaucaaggaccugcccaaggagaucaccgucgccacgagccgcacccuguccuacuacaagcucggggccagccagcggguggccggcgacuccggguucgccgcguacagccgcuaccggaucggcaacuacaagcugaacaccgaccacuccagcuccagcgacaacaucgcccugcucgugcagugaggacuagucccuguucccagagcccacuuuuuuuucuuuuuuugaaauaaaauagccugucuuucagaucucaaaggcucuuuucagagccaccaaaaaaaaaaaaaaaaaaaaaaaaaaaaaaaaaaaaaaaaaaaaaaaaaaaaaaaaaaaaaaaaaaaaaaaaaaaaaaaaaaaaaaaaaaaaaaaaaaaaa

SEQ ID NO: 19011 - RNA, 941 nt, Artificial Sequence
  SARS-CoV-2__MT831423.1__membrane protein (M) mRNA gc
aggagagucccgcagucggcguccagcggcucugcuuguucgugugugugucguugcaggccuuauucaagcuuaccauggccgacagcaacggcaccaucaccguggaggagcugaagaagcuccuggagcaguggaaccuggucaucggguuccucuuccugacguggaucugccugcuccaguucgccuacgcgaaccgcaaccgguuccuguacaucaucaagcugaucuuccucuggcugcuguggcccgugacccucgccugcuucgugcuggccgccgucuaccgcaucaacuggaucacgugcggcaucgccaucgcgauggccugccugguggggcucauguggcuguccuacuucaucgccagcuuccggcuguucgcccgcacccgguccauguggagcuucaacccggagaccaacauccuccugaacgugccccugcacggcaccauccucacccgcccccugcuggaguccgagcucgucaucggggcggugauccugcggggccaccuccgcaucgccggccaccaccuggggcggugcgacaucaaggaccugcccaaggagaucaccguggccacgagccgcacccuguccuacuacaagcucggcgccagccagcgggucgccggggacuccggcuucgcggccuacagccgcuaccggaucgggaacuacaagcugaacaccgaccacuccagcuccagcgacaacaucgcccugcucgugcagugaggacuagucccuguucccagagcccacuuuuuuuucuuuuuuugaaauaaaauagccugucuuucagaucucaaaggcucuuuucagagccaccaaaaaaaaaaaaaaaaaaaaaaaaaaaaaaaaaaaaaaaaaaaaaaaaaaaaaaaaaaaaaaaaaaaaaaaaaaaaaaaaaaaaaaaaaaaaaaaaaaaaa

SEQ ID NO: 19012 - RNA, 941 nt, Artificial Sequence
  SARS-CoV-2__MT831469.1__membrane protein (M) mRNA gc
aggagagucccgcagucggcguccagcggcucugcuuguucgugugugugucguugcaggccuuauucaagcuuaccauggccgacagcaacggcaccaucaccguggaggagcugaagcgccuccuggagcaguggaaccuggucaucggguuccucuuccugacguggaucugccugcuccaguucgccuacgcgaaccggaaccgcuuccuguacaucaucaagcugaucuuccucuggcugcuguggcccgugacccucgccugcuucgugcuggccgccgucuaccggaucaacuggaucaccggcgggaucgccaucgcgauggccugccuggugggccucauguggcuguccuacuucaucgccagcuuccgccuguucgcccggacccgcuccauguggagcuucaacccggagacgaacauccuccugaacgugccccugcacgggaccauccucacccggccccugcuggaguccgagcucgucaucggcgcggugauccugcgcggccaccuccggaucgccgggcaccaccugggccgcugcgacaucaaggaccugcccaaggagaucaccguggccacgagccggacccuguccuacuacaagcucggggccagccagcgcgucgccggcgacuccggguucgcggccuacagccgguaccgcaucggcaacuacaagcugaacaccgaccacuccagcuccagcgacaacaucgcccugcucgugcagugaggacuagucccuguucccagagcccacuuuuuuuucuuuuuuugaaauaaaauagccugucuuucagaucucaaaggcucuuuucagagccaccaaaaaaaaaaaaaaaaaaaaaaaaaaaaaaaaaaaaaaaaaaaaaaaaaaaaaaaaaaaaaaaaaaaaaaaaaaaaaaaaaaaaaaaaaaaaaaaaaaaaa

SEQ ID NO: 19013 - RNA, 941 nt, Artificial Sequence
  SARS-CoV-2__MT834027.1__membrane protein (M) mRNA gc
aggagagucccgcagucggcguccagcggcucugcuuguucgugugugugucguugcaggccuuauucaagcuuaccauggccgacagcaacggcaccaucaccguggaggagcugaagaagcuccuggagcaguggaaccuggucaucggguuccucuuccugacguggaucugccugcuccaguucgccuacgcgaaccgcaaccgguuccuguacaucaucaagcugaucuuccucuggcugcuguggcccgugacccucgccugcuucgugcuggccgccgucuaccgcaucaacuggaucaccggcgggaucgccaucgcgauggccugccuggugggccucauguggcuguccuacuucaucgccagcuuccggcuguucgcccgcacccgguccauguggagcuucaacccggagacgaacauccuccugaacgugccccuguacgggaccauccucacccgcccccugcuggaguccgagcucgucaucggcgcggugauccugcggggccaccuccgcaucgccgggcaccaccugggccggugcgacaucaaggaccugcccaaggagaucaccguggccacgagccgcacccuguccuacuacaagcucggggccagccagcgggucgccggcgacuccggguucgcggccuacagccgcuaccggaucggcaacuacaagcugaacaccgaccacuccagcuccagcgacaacaucgcccugcucgugcagugaggacuagucccuguucccagagcccacuuuuuuuucuuuuuuugaaauaaaauagccugucuuucagaucucaaaggcucuuuucagagccaccaaaaaaaaaaaaaaaaaaaaaaaaaaaaaaaaaaaaaaaaaaaaaaaaaaaaaaaaaaaaaaaaaaaaaaaaaaaaaaaaaaaaaaaaaaaaaaaaaaaaa

SEQ ID NO: 19014 - RNA, 941 nt, Artificial Sequence
  SARS-CoV-2__MT834697.1__membrane protein (M) mRNA gc
aggagagucccgcagucggcguccagcggcucugcuuguucgugugugugucguugcaggccuuauucaagcuuaccauggccgacagcaacggcaccaucaccguggaggagcugaagaagcuccuggagcaguggaaccuggucaucggguuccucuuccugacguggaucugccugcuccaguucgccuacgcgaaccgcaaccgguuccuguacaucaucaagcugaucuuccucuggcugcuguggcccgugacccucgccugcuucgugcuggccgccgucuaccgcaucaacuggaucaccggcgggaucgccaucgcgauggccugccuggugggccucauguggcuguccuacuucaucagcuccuuccggcuguucgcccgcacccggagcaugugguccuucaacccggagacgaacauccuccugaacgugccccugcacgggaccauccucacccgcccccugcuggagagcgagcucgucaucggcgccgugauccugcggggccaccuccgcaucgcggggcaccaccugggccggugcgacaucaaggaccugcccaaggagaucaccguggccacgucccgcacccugagcuacuacaagcucggggccucccagcgggucgccggcgacagcggguucgccgcguacucccgcuaccggaucggcaacuacaagcugaacaccgaccacagcuccagcuccgacaacaucgcccugcucgugcagugaggacuagucccuguucccagagcccacuuuuuuuucuuuuuuugaaauaaaauagccugucuuucagaucucaaaggcucuuuucagagccaccaaaaaaaaaaaaaaaaaaaaaaaaaaaaaaaaaaaaaaaaaaaaaaaaaaaaaaaaaaaaaaaaaaaaaaaaaaaaaaaaaaaaaaaaaaaaaaaaaaaaa

SEQ ID NO: 19015 - RNA, 941 nt, Artificial Sequence
  SARS-CoV-2__MT825091.1__membrane protein (M) mRNA gc
aggagagucccgcagucggcguccagcggcucugcuuguucgugugugugucguugcaggccuuauucaagcuuaccauggccgacagcaacggcaccaucaccguggaggagcuggagaagcuccuggagcaguggaaccuggucaucggguuccucuuccugacguggaucugccugcuccaguucgccuacgcgaaccgcaaccgguuccuguacaucaucaagcugaucuuccucuggcugcuguggaccgugacccucgccugcuucgugcuggccgccgucuaccgcaucaacuggaucaccggcgggaucgccaucgcgauggccugccuggugggccucauguggcuguccuacuucaucgccagcuuccggcuguucgcccgcacgcgguccauguggagcuucaaccccgagaccaacauccuccugaacgugccgcugcacgggaccauccucacccgcccccugcuggaguccgagcucgucaucggcgcggugauccugcggggccaccuccgcaucgccgggcaccaccugggccggugcgacaucaaggaccugcccaaggagaucacgguggccaccagccgcacccuguccuacuacaagcucggggccagccagcgggucgccggcgacuccggguucgcggccuacagccgcuaccggaucggcaacuacaagcugaacaccgaccacuccagcuccagcgacaacaucgcccugcucgugcagugaggacuagucccuguucccagagcccacuuuuuuuucuuuuuuugaaauaaaauagccugucuuucagaucucaaaggcucuuuucagagccaccaaaaaaaaaaaaaaaaaaaaaaaaaaaaaaaaaaaaaaaaaaaaaaaaaaaaaaaaaaaaaaaaaaaaaaaaaaaaaaaaaaaaaaaaaaaaaaaaaaaaa

SEQ ID NO: 19016 - RNA, 941 nt, Artificial Sequence
  SARS-CoV-2__MT821547.1__membrane protein (M) mRNA gc
aggagagucccgcagucggcguccagcggcucugcuuguucgugugugugucguugcaggccuuauucaagcuuaccauggccgacagcaacggcaccaucaccguggaggagcuggagaagcuccuggagcaguggaaccuggucaucggguuccucuuccugacguggaucugccugcuccaguucgccuacgcgaaccgcaaccgguuccuguacaucaucaagcugaucuuccucuggcugcuguggcccgugacccucgccugcuucgugcuggccgccgucuaccgcaucaacuggaucaccggcgggaucgccaucgcgauggccugccuggugggccucauguggcuguccuacuucaucgccagcuuccggcuguucgcccgcacccgguccauguggagcuucaacccggagacgaacauccuccugaacgugccccugcacgggaccauccucacccgcccccugcuggaguccgagcucgucaucggcgcggugauccugcggggccaccuccgcaucgccgggcaccaccugggccggugcgacaucaaggaccugcccaaggagaucaccguggccacgagccgcacccuguccuacuacaagcucggggccagccagcgggucgccggcgacuccggguucgcggccuacagccgcuaccggaucggcaacuacaagcugaacaccgaccacuccagcuccagcgacaacaucgcccugcucgugcagugaggacuagucccuguucccagagcccacuuuuuuuucuuuuuuugaaauaaaauagccugucuuucagaucucaaaggcucuuuucagagccaccaaaaaaaaaaaaaaaaaaaaaaaaaaaaaaaaaaaaaaaaaaaaaaaaaaaaaaaaaaaaaaaaaaaaaaaaaaaaaaaaaaaaaaaaaaaaaaaaaaaaa

SEQ ID NO: 19017 - RNA, 941 nt, Artificial Sequence
  SARS-CoV-2__MT821560.1__membrane protein (M) mRNA gc
aggagagucccgcagucggcguccagcggcucugcuuguucgugugugugucguugcaggccuuauucaagcuuaccauggccgacagcaacggcaccaucaccguggaggagcuggagaagcuccuggagcaguggaaccuggucaucggguuccucuuccugacguggaucugccugcuccaguucgccuacgcgaaccgcaaccgguuccuguacaucaucaagcugaucuuccucuggcugcuguggcccgugacccucgccuucuucgugcuggccgccgucuaccgcaucaacuggaucaccggcgggaucgccaucgcgauggccugccuggugggccucauguggcuguccuacuucaucgccagcuuccggcuguucgcccgcacccgguccauguggagcuucaacccggagacgaacauccuccugaacgugccccugcacgggaccauccucacccgcccccugcuggaguccgagcucgucaucggcgcggugauccugcggggccaccuccgcaucgccgggcaccaccugggccggugcgacaucaaggaccugcccaaggagaucaccguggccacgagccgcacccuguccuacuacaagcucggggccagccagcgggucgccggcgacuccggguucgcggccuacagccgcuaccggaucggcaacuacaagcugaacaccgaccacuccagcuccagcgacaacaucgcccugcucgugcagugaggacuagucccuguucccagagcccacuuuuuuuucuuuuuuugaaauaaaauagccugucuuucagaucucaaaggcucuuuucagagccaccaaaaaaaaaaaaaaaaaaaaaaaaaaaaaaaaaaaaaaaaaaaaaaaaaaaaaaaaaaaaaaaaaaaaaaaaaaaaaaaaaaaaaaaaaaaaaaaaaaaaa

SEQ ID NO: 19018 - RNA, 941 nt, Artificial Sequence
  SARS-CoV-2__MT811164.1__membrane protein (M) mRNA gc
aggagagucccgcagucggcguccagcggcucugcuuguucgugugugugucguugcaggccuuauucaagcuuaccauggccgacagcaacggcaccaucaccguggaggagcugaagaagcuccuggagcaguggaaccuggucaucggguuccucuuccugacguggaucugccugcuccaguucgccuacgcgaaccgcaaccgguuccuguacaucaucaagcugaucuuccucuggcugcuguggcccgugacccucgccugcuucgugcuggccgccgucuaccgcaucaacuggaucaccggcgggaucgccaucgcgauggccugccuggugggccucauguggcuguccuacuucaucgccagcuuccggcuguucgcccgcacccgguccauguggagcuucaacccggagacgaacauccuccugaacgugccccugcacgggaccauccucacccgcccccugcuggagaacgagcucgucaucggcgcggugauccugcggggccaccuccgcaucgccgggcaccaccugggccggugcgacaucaaggaccugcccaaggagaucaccguggccacgucccgcacccugagcuacuacaagcucggggccucccagcgggucgccggcgacagcggguucgcggccuacucccgcuaccggaucggcaacuacaagcugaacaccgaccacagcuccagcuccgacaacaucgcccugcucgugcagugaggacuagucccuguucccagagcccacuuuuuuuucuuuuuuugaaauaaaauagccugucuuucagaucucaaaggcucuuuucagagccaccaaaaaaaaaaaaaaaaaaaaaaaaaaaaaaaaaaaaaaaaaaaaaaaaaaaaaaaaaaaaaaaaaaaaaaaaaaaaaaaaaaaaaaaaaaaaaaaaaaaaa

SEQ ID NO: 19019 - RNA, 941 nt, Artificial Sequence
  SARS-CoV-2__MT811448.1__membrane protein (M) mRNA gc
aggagagucccgcagucggcguccagcggcucugcuuguucgugugugugucguugcaggccuuauucaagcuuaccauggccgacagcaacggcaccaucaccguggaggagcugaagaagcuccuggagcaguggaaccuggucaucggguuccucuuccugacguggaucugccugcuccaguucgccuacgcgaaccgcaaccgguuccuguacaucaucaagcugaucuuccucuggcugcuguggcccgugacccucgccugcuucgugcuggccgccgucuaccgcaucaacuggaucaccggcgggaucgccaucuccauggcgugccuggugggccucauguggcugagcuacuucaucgccuccuuccggcuguucgcccgcacccggagcaugugguccuucaacccggagacgaacauccuccugaacgugccccugcacgggaccauccucacccgcccccugcuggagagcgagcucgucaucggcgccgugauccugcggggccaccuccgcaucgcggggcaccaccugggccggugcgacaucaaggaccugcccaaggagaucaccguggccacgucccgcacccugagcuacuacaagcucggggccucccagcgggucgccggcgacagcggguucgccgcguacucccgcuaccggaucggcaacuacaagcugaacaccgaccacagcuccagcuccgacaacaucgcccugcucgugcagugaggacuagucccuguucccagagcccacuuuuuuuucuuuuuuugaaauaaaauagccugucuuucagaucucaaaggcucuuuucagagccaccaaaaaaaaaaaaaaaaaaaaaaaaaaaaaaaaaaaaaaaaaaaaaaaaaaaaaaaaaaaaaaaaaaaaaaaaaaaaaaaaaaaaaaaaaaaaaaaaaaaaa

SEQ ID NO: 19020 - RNA, 941 nt, Artificial Sequence
  SARS-CoV-2__MT806776.1__membrane protein (M) mRNA gc
aggagagucccgcagucggcguccagcggcucugcuuguucgugugugugucguugcaggccuuauucaagcuuaccauggccgacagcaacggcaccaucaccguggaggagcugaagaagcuccuggagcaguggaaccuggucaucggguuccucuuccugacguggaucugccugcuccaguucgccuacgcgaaccgcaaccgguuccuguacaucaucaagcugaucuuccucuggcugcuguggcccgugacccucgccugcuucgugcuggccgccgucuaccgcaucaacuggaucaccggcgggaucgccaucgcgauggccugccuggugggccucauguggcugaucuacuucaucgccuccuuccggcuguucgcccgcacccggagcaugugguccuucaacccggagacgaacauccuccugaacgugccccugcacgggaccauccucacccgcccccugcuggagagcgagcucgucaucggcgcggugauccugcggggccaccuccgcaucgccgggcaccaccugggccggugcgacaucaaggaccugcccaaggagaucaccguggccacgucccgcacccugagcuacuacaagcucggggccucccagcgggucgccggcgacagcggguucgcggccuacucccgcuaccggaucggcaacuacaagcugaacaccgaccacagcuccagcuccgacaacaucgcccugcucgugcagugaggacuagucccuguucccagagcccacuuuuuuuucuuuuuuugaaauaaaauagccugucuuucagaucucaaaggcucuuuucagagccaccaaaaaaaaaaaaaaaaaaaaaaaaaaaaaaaaaaaaaaaaaaaaaaaaaaaaaaaaaaaaaaaaaaaaaaaaaaaaaaaaaaaaaaaaaaaaaaaaaaaaa

SEQ ID NO: 19021 - RNA, 941 nt, Artificial Sequence
  SARS-CoV-2__MT806783.1__membrane protein (M) mRNA gc
aggagagucccgcagucggcguccagcggcucugcuuguucgugugugugucguugcaggccuuauucaagcuuaccauggccgacagcaacggcaccaucaccguggaggagcugaagaagcuccuggagcaguggaaccuggucaucggguuccucuuccugacguggaucugccugcuccaguucgccuacgcgaaccgcaaccgguuccuguacaucaucaagcugaucuuccucuggcugcuguggcccgugacccucgccugcuucgugcuggccgccgucuaccgcaucaacuggaucaccggcgggaucgccaucgcgauggccugccuggugggccucauguggcuguccuacuucaucgccagcuuccggcuguucgcccgcacccgguccauguggagcuucaacccggagacgaacauccuccugaacgugccccugcacgggaccauccucacccgcccccugcuggaguccgagcucgucaucggcgcggugauccugcggggccaccuccgcaucgccgggcaccaccugggccggugcgacaucaaggaccugcccaaggagaucaccguggccacgagccgcacccuguccuacuacaagcucggggccagccagcgggucgccggcgacuccggguucgcggccuacagccgcuaccggaucggcaacuacaagcugaacaucgaccacuccagcuccagcgacaacaucgcccugcucgugcagugaggacuagucccuguucccagagcccacuuuuuuuucuuuuuuugaaauaaaauagccugucuuucagaucucaaaggcucuuuucagagccaccaaaaaaaaaaaaaaaaaaaaaaaaaaaaaaaaaaaaaaaaaaaaaaaaaaaaaaaaaaaaaaaaaaaaaaaaaaaaaaaaaaaaaaaaaaaaaaaaaaaaa

SEQ ID NO: 19022 - RNA, 941 nt, Artificial Sequence
  SARS-CoV-2__MT799972.1__membrane protein (M) mRNA gc
aggagagucccgcagucggcguccagcggcucugcuuguucgugugugugucguugcaggccuuauucaagcuuaccauggccgacagcaacggcaccaucaccguggaggagcugaagaagcuccuggagcaguggaaccuggucaucggguuccucuuccugacguggaucugccugcuccaguucgccuacgcgaaccgcaaccgguuccuguacaucaucaagcugaucuuccucuggcugcuguggcccgugacccucgccugcuucgugcuggccgccgucuaccgcaucaacuggaucaccggcgggaucgccaucgcgauggccugccuggugggccucauguggcuguccuacuucaucgccagcuuccggcuguucgcccgcacccgguccauguggagcuucaacccggagacgaacauccuccugaacgugccccugcacgggaccauccucacccgcccccugcuggaguccgagcucgucaucggcguggugauccugcggggccaccuccgcaucgcggggcaccaccugggccggugcgacaucaaggaccugcccaaggagaucaccgucgccacgagccgcacccuguccuacuacaagcucggggccagccagcggguggccggcgacuccggguucgccgcguacagccgcuaccggaucggcaacuacaagcugaacaccgaccacuccagcuccagcgacaacaucgcccugcucgugcagugaggacuagucccuguucccagagcccacuuuuuuuucuuuuuuugaaauaaaauagccugucuuucagaucucaaaggcucuuuucagagccaccaaaaaaaaaaaaaaaaaaaaaaaaaaaaaaaaaaaaaaaaaaaaaaaaaaaaaaaaaaaaaaaaaaaaaaaaaaaaaaaaaaaaaaaaaaaaaaaaaaaaa

SEQ ID NO: 19023 - RNA, 941 nt, Artificial Sequence
  SARS-CoV-2__MT799976.1__membrane protein (M) mRNA gc
aggagagucccgcagucggcguccagcggcucugcuuguucgugugugugucguugcaggccuuauucaagcuuaccauggccgacagcaacggcaccaucaccguggaggagcugaagaagcuccuggagcaguggaaccuggucaucggguuccucuuccugacguggaucugccugcuccaguucgccuacgcgaaccgcaaccgguuccuguacaucaucaagcugaucuuccucuggcugcuguggcccgugacccucgugugcuucguccuggccgccguguaccgcaucaacuggaucaccggcgggaucgccaucgccauggcgugccuggugggccucauguggcuguccuacuucaucgccagcuuccggcuguucgcccgcacccgguccauguggagcuucaacccggagacgaacauccuccugaacgucccccugcacgggaccauccucacccgcccccugcuggaguccgagcucgugaucggcgccgugauccugcggggccaccuccgcaucgcggggcaccaccugggccggugcgacaucaaggaccugcccaaggagaucaccgucgccacgagccgcacccuguccuacuacaagcucggggccagccagcggguggccggcgacuccggguucgccgcguacagccgcuaccggaucggcaacuacaagcugaacaccgaccacuccagcuccagcgacaacaucgcccugcucgugcagugaggacuagucccuguucccagagcccacuuuuuuuucuuuuuuugaaauaaaauagccugucuuucagaucucaaaggcucuuuucagagccaccaaaaaaaaaaaaaaaaaaaaaaaaaaaaaaaaaaaaaaaaaaaaaaaaaaaaaaaaaaaaaaaaaaaaaaaaaaaaaaaaaaaaaaaaaaaaaaaaaaaaa

SEQ ID NO: 19024 - RNA, 941 nt, Artificial Sequence
  SARS-CoV-2__MT795901.1__membrane protein (M) mRNA gc
aggagagucccgcagucggcguccagcggcucugcuuguucgugugugugucguugcaggccuuauucaagcuuaccauggccgacagcaacggcaccaucaccguggaggagcugaagaagcuccuggagcaguggaaccuggucaucggguuccucuuccugacguggaucugccugcuccaguucgccuacgcgaaccgcaaccgguuccuguacaucaucaagcugaucuuccucuggcugcuguggcccgugacccucgccugcuucgugcuggccgccgucuaccgcaucaacuggaucaccggcgggaucgccaucgcgauggccugccuggugggccucauguggcuguccuacuucaucgccagcuuccggcuguucgcccgcacccgguccauguggagcuucaacccggagacgaacauccuccugaacgugccccugcacgggaccauccucacccgcccccugcuggaguccgagcucgucaucggcgcggugauccugcggggccaccuccgcaucgccgggcacuaccugggccggugcgacaucaaggaccugcccaaggagaucaccguggccacgagccgcacccuguccuacuacaagcucggggccagccagcgggucgccggcgacuccggguucgcggccuacagccgcuaccggaucggcaacuacaagcugaacaccgaccacuccagcuccagcgacaacaucgcccugcucgugcagugaggacuagucccuguucccagagcccacuuuuuuuucuuuuuuugaaauaaaauagccugucuuucagaucucaaaggcucuuuucagagccaccaaaaaaaaaaaaaaaaaaaaaaaaaaaaaaaaaaaaaaaaaaaaaaaaaaaaaaaaaaaaaaaaaaaaaaaaaaaaaaaaaaaaaaaaaaaaaaaaaaaaa

SEQ ID NO: 19025 - RNA, 941 nt, Artificial Sequence
  SARS-CoV-2__MT791885.1__membrane protein (M) mRNA gc
aggagagucccgcagucggcguccagcggcucugcuuguucgugugugugucguugcaggccuuauucaagcuuaccauggccgacagcaacggcaccaucaccguggaggagcugaagaagcuccuggagcaguggaaccuggucaucggguuccucuuccugacguggaucugccugcuccaguucgccuacgcgaaccgcaaccgguuccuguacaucaucaagcugaucuuccucuggcugcuguggcccgugacccucgccugcuucgugcuggccgccgucuaccgcaucaacuggaucaccggcgggaucgccaucgcgauggccugccuggugggccucauguggcuguccuacuucaucgccagcuuccggcuguucgcccgcacccgguccauguggagcuucaacccggagacgaacauccuccugaacgugccccugcacgggaccauccucacccgcccccugcuggaguccgagcucgucaucggcgcggugauccugcggggccaccuccgcaucgccgggcaccaccugggccugugcgacaucaaggaccugcccaaggagaucaccguggccacgagccggacccucuccuacuacaagcugggggccagccagcgcgucgccggcgacuccggguucgcggccuacagccgguaccgcaucggcaacuacaagcugaacaccgaccacuccagcuccagcgacaacaucgcccuccuggugcagugaggacuagucccuguucccagagcccacuuuuuuuucuuuuuuugaaauaaaauagccugucuuucagaucucaaaggcucuuuucagagccaccaaaaaaaaaaaaaaaaaaaaaaaaaaaaaaaaaaaaaaaaaaaaaaaaaaaaaaaaaaaaaaaaaaaaaaaaaaaaaaaaaaaaaaaaaaaaaaaaaaaaa

SEQ ID NO: 19026 - RNA, 941 nt, Artificial Sequence
  SARS-CoV-2__MT759588.1__membrane protein (M) mRNA gc
aggagagucccgcagucggcguccagcggcucugcuuguucgugugugugucguugcaggccuuauucaagcuuaccauggccgacagcaacggcaccaucaccguggaggagcugaagaagcuccuggagcaguggaaccuggucaucggguuccucuuccugacguggaucugccugcuccaguucgccuacgcgaaccgcaaccgguuccuguacaucaucaagcugaucuuccucuggcugcuguggcccgugacccucgccugcuucgugcuggccgccgucuaccgcaucaacuggaucaccggcgggaucgccaucgcgauggccugccuggugggccucauguggcuguccuacuucaucgccagcuuccggcuguucgcccgcacccucuccauguggagcuucaacccggagacgaacauccugcugaacgugccccuccacgggaccauccugacccggccccugcucgaguccgagcuggucaucggcgcggugauccugcgcggccaccuccggaucgccgggcaccaccugggccgcugcgacaucaaggaccugcccaaggagaucaccguggccacgagccggacccucuccuacuacaagcugggggccagccagcgcgucgccggcgacuccggguucgcggccuacagccgguaccgcaucggcaacuacaagcugaacaccgaccacuccagcuccagcgacaacaucgcccuccuggugcagugaggacuagucccuguucccagagcccacuuuuuuuucuuuuuuugaaauaaaauagccugucuuucagaucucaaaggcucuuuucagagccaccaaaaaaaaaaaaaaaaaaaaaaaaaaaaaaaaaaaaaaaaaaaaaaaaaaaaaaaaaaaaaaaaaaaaaaaaaaaaaaaaaaaaaaaaaaaaaaaaaaaaa

SEQ ID NO: 19027 - RNA, 941 nt, Artificial Sequence
  SARS-CoV-2__MT745712.1__membrane protein (M) mRNA gc
aggagagucccgcagucggcguccagcggcucugcuuguucgugugugugucguugcaggccuuauucaagcuuaccauggccgacagcaacggcaccaucaccguggaggagcugaagaagcuccuggagcaguggaaccuggucaucggguuccucuuccugacguggaucugccugcuccaguucgccuacgcgaaccgcaaccgguuccuguacaucaucaagcugaucuuccucuggcugcuguggcccgugacccucgccugcuucgugcuggccgccgucuaccgcaucaaccugaucaccggcgggaucgccaucgcgauggccugccucgugggccugauguggcuguccuacuucaucgccagcuuccgccucuucgcccggacccgguccauguggagcuucaacccggagacgaacauccugcugaacgugccccuccacgggaccauccugacccgcccccugcucgaguccgagcuggucaucggcgcggugauccugcggggccaccuccgcaucgccgggcaccaccugggccggugcgacaucaaggaccugcccaaggagaucaccguggccacgagccgcacccucuccuacuacaagcugggggccagccagcgggucgccggcgacuccggguucgcggccuacagccgcuaccggaucggcaacuacaagcugaacaccgaccacuccagcuccagcgacaacaucgcccuccuggugcagugaggacuagucccuguucccagagcccacuuuuuuuucuuuuuuugaaauaaaauagccugucuuucagaucucaaaggcucuuuucagagccaccaaaaaaaaaaaaaaaaaaaaaaaaaaaaaaaaaaaaaaaaaaaaaaaaaaaaaaaaaaaaaaaaaaaaaaaaaaaaaaaaaaaaaaaaaaaaaaaaaaaaa

SEQ ID NO: 19028 - RNA, 941 nt, Artificial Sequence
  SARS-CoV-2__MT750032.1__membrane protein (M) mRNA gc
aggagagucccgcagucggcguccagcggcucugcuuguucgugugugugucguugcaggccuuauucaagcuuaccauggccgacagcaacggcaccaucaccguggaggagcugaagaagcuccuggagcaguggaaccuggucaucggguuccucuuccugacguggaucugccugcuccaguucgccuacgcgaaccgcaaccgguuccuguacaucaucaagcugaucuuccucuggcugcuguggcccgugacccucgccugcuucgugcuggccgccgucuaccgcaucaacuggaucaccggcgggaucgccaucgcgauggccugccuggugggccucauguggcuguccuacuucaucgccagcuuccggcuguucgcccgcacccgguccauguggagcuucaacccggagacgaacauccuccugaacgugccccugcacgggaccauccucacccgcccccugcuggaguccgagcucgucaucggcgcggugauccugcggggccaccuccgcaucgccgggcaccaccugggccggugcgacaucaaggaccugcccaaggagaucaccguggccacgagccgcacccuguccuacuacaagcucggggccagccagcgggucgccggcgacuccggguucgcggccuacagccgcugccggaucggcaacuacaagcugaacaccgaccacuccagcuccagcgacaacaucgcccugcucgugcagugaggacuagucccuguucccagagcccacuuuuuuuucuuuuuuugaaauaaaauagccugucuuucagaucucaaaggcucuuuucagagccaccaaaaaaaaaaaaaaaaaaaaaaaaaaaaaaaaaaaaaaaaaaaaaaaaaaaaaaaaaaaaaaaaaaaaaaaaaaaaaaaaaaaaaaaaaaaaaaaaaaaaa

SEQ ID NO: 19029 - RNA, 941 nt, Artificial Sequence
  SARS-CoV-2__MT750363.1__membrane protein (M) mRNA gc
aggagagucccgcagucggcguccagcggcucugcuuguucgugugugugucguugcaggccuuauucaagcuuaccauggccgacagcaacggcaccaucaccguggaggagcugaagaagcuccuggagcaguggaaccuggucaucggguuccucuuccugacguggaucugccugcuccaguucgccuacgcgaaccgcaaccgguuccuguacaucaucaagcugaucuuccucuggcugcuguggcccgugacccucgccugcuucgugcuggccgccgucuaccgcaucaacuggaucaccggcgggaucgccaucgcgauggccugcuucgugggccugauguggcucuccuacuucaucgccagcuuccggcuguucgcccgcacccgguccauguggagcuucaacccggagacgaacauccugcucaacgugccccugcacgggaccauccugacccgcccccuccuggaguccgagcuggucaucggcgcggugauccuccggggccaccuccgcaucgccgggcaccaccugggccggugcgacaucaaggaccugcccaaggagaucaccguggccacgagccgcacccuguccuacuacaagcugggggccagccagcgggucgccggcgacuccggguucgcggccuacagccgcuaccggaucggcaacuacaagcucaacaccgaccacuccagcuccagcgacaacaucgcccugcuggugcagugaggacuagucccuguucccagagcccacuuuuuuuucuuuuuuugaaauaaaauagccugucuuucagaucucaaaggcucuuuucagagccaccaaaaaaaaaaaaaaaaaaaaaaaaaaaaaaaaaaaaaaaaaaaaaaaaaaaaaaaaaaaaaaaaaaaaaaaaaaaaaaaaaaaaaaaaaaaaaaaaaaaaa

SEQ ID NO: 19030 - RNA, 941 nt, Artificial Sequence
  SARS-CoV-2__MT740395.1__membrane protein (M) mRNA gc
aggagagucccgcagucggcguccagcggcucugcuuguucgugugugugucguugcaggccuuauucaagcuuaccauggccgacagcaacggcaccaucaccgccgaggagcugaagaagcuccuggagcaguggaaccuggugaucggguuccucuuccugacguggaucugccugcuccaguucgcguacgccaaccgcaaccgguuccuguacaucaucaagcugaucuuccucuggcugcuguggcccgucacccucgccugcuucgugcuggccgccguguaccgcaucaacuggaucaccggcgggaucgcgaucgccauggccugccuggucggccucauguggcuguccuacuucaucgccagcuuccggcuguucgcgcgcacccgguccauguggagcuucaacccggagacgaacauccuccugaacgugccccugcacgggaccauccucacccgcccccugcuggaguccgagcucgugaucggcgccgucauccugcggggccaccuccgcaucgccgggcaccaccugggccggugcgacaucaaggaccugcccaaggagaucaccguggccacgagccgcacccuguccuacuacaagcucggggccagccagcggguggcgggcgacuccggguucgccgccuacagccgcuaccggaucggcaacuacaagcugaacaccgaccacuccagcuccagcgacaacaucgcccugcucguccagugaggacuagucccuguucccagagcccacuuuuuuuucuuuuuuugaaauaaaauagccugucuuucagaucucaaaggcucuuuucagagccaccaaaaaaaaaaaaaaaaaaaaaaaaaaaaaaaaaaaaaaaaaaaaaaaaaaaaaaaaaaaaaaaaaaaaaaaaaaaaaaaaaaaaaaaaaaaaaaaaaaaaa

SEQ ID NO: 19031 - RNA, 941 nt, Artificial Sequence
  SARS-CoV-2__MT731744.1__membrane protein (M) mRNA gc
aggagagucccgcagucggcguccagcggcucugcuuguucgugugugugucguugcaggccuuauucaagcuuaccauggccgacuucaacggcaccaucaccguggaggagcugaagaagcuccuggagcaguggaaccuggucaucggguuccucuuccugacguggaucugccugcuccaguucgccuacgcgaaccgcaaccgguuccuguacaucaucaagcugaucuuccucuggcugcuguggcccgugacccucgccugcuucgugcuggccgccgucuaccgcaucaacuggaucaccggcgggaucgccaucgcgauggccugccuggugggccucauguggcugagcuacuucaucgccuccuuccggcuguucgcccgcacccggagcaugugguccuucaacccggagacgaacauccuccugaacgugccccugcacgggaccauccucacccgcccccugcuggagagcgagcucgucaucggcgcggugauccugcggggccaccuccgcaucgccgggcaccaccugggccggugcgacaucaaggaccugcccaaggagaucaccguggccacgucccgcacccugagcuacuacaagcucggggccucccagcgggucgccggcgacagcggguucgcggccuacucccgcuaccggaucggcaacuacaagcugaacaccgaccacagcuccagcuccgacaacaucgcccugcucgugcagugaggacuagucccuguucccagagcccacuuuuuuuucuuuuuuugaaauaaaauagccugucuuucagaucucaaaggcucuuuucagagccaccaaaaaaaaaaaaaaaaaaaaaaaaaaaaaaaaaaaaaaaaaaaaaaaaaaaaaaaaaaaaaaaaaaaaaaaaaaaaaaaaaaaaaaaaaaaaaaaaaaaaa

SEQ ID NO: 19032 - RNA, 941 nt, Artificial Sequence
  SARS-CoV-2__MT706390.1__membrane protein (M) mRNA gc
aggagagucccgcagucggcguccagcggcucugcuuguucgugugugugucguugcaggccuuauucaagcuuaccauggccgacagcaacggcaccaucaccguggaggagcugaagaagcuccuggagcaguggaaccuggucaucggguuccucuuccugacguggaucugccugcuccaguucgccuacgcgaaccgcaaccgguuccuguacaucaucaagcugaucuuccucuggcugcuguggcccgugacccucgccugcuucgugcuggccgccgucuaccgcaucaacuggaucaccggcgggaucgccaucgcgauggccugccuggugggccucauguggcuguccuacuucaucgccagcuuccggcuguucgcccgcacccgguccauguggagcuucaacccggagacgaacauccuccugaacgugccccugcacgggaccaucgucacccgcccccuccuggaguccgagcuggugaucggcgcggugauccuccggggccaccuccgcaucgccgggcaccaccugggccggugcgacaucaaggaccugcccaaggagaucaccgucgccacgagccgcacccuguccuacuacaagcugggggccagccagcggguggccggcgacuccggguucgcggccuacagccgcuaccggaucggcaacuacaagcucaacaccgaccacuccagcuccagcgacaacaucgcccugcuggugcagugaggacuagucccuguucccagagcccacuuuuuuuucuuuuuuugaaauaaaauagccugucuuucagaucucaaaggcucuuuucagagccaccaaaaaaaaaaaaaaaaaaaaaaaaaaaaaaaaaaaaaaaaaaaaaaaaaaaaaaaaaaaaaaaaaaaaaaaaaaaaaaaaaaaaaaaaaaaaaaaaaaaaa

SEQ ID NO: 19033 - RNA, 941 nt, Artificial Sequence
  SARS-CoV-2__MT655135.1__membrane protein (M) mRNA gc
aggagagucccgcagucggcguccagcggcucugcuuguucgugugugugucguugcaggccuuauucaagcuuaccauggccgacagcaacggcaccaucaccguggaggagcugaagaagcuccuggagcaguggaaccuggucaucggguuccucuuccugacguggaucugccugcuccaguucgccuacgcgaaccgcaaccgguuccuguacaucaucaagcugaucuuccucuggcugcuguggcccgugacccugaccugcuucgugcuggccgccgucuaccgcaucaacuggaucaccggcgggaucgccaucgccauggcgugccuggugggccucauguggcuguccuacuucaucgccagcuuccggcuguucgcccgcacgcgguccauguggagcuucaacccggagaccaacauccuccugaacgugccccugcacgggaccauccucacccgcccccugcuggaguccgagcucgucaucggcgccgugauccugcggggccaccuccgcaucgcggggcaccaccucggccggugcgacaucaaggaccugcccaaggagaucacgguggccaccagccgcacccuguccuacuacaagcucggggccagccagcgggucgccggcgacuccggguucgccgcguacagccgcuaccggaucggcaacuacaagcugaacaccgaccacuccagcuccagcgacaacaucgcccugcucgugcagugaggacuagucccuguucccagagcccacuuuuuuuucuuuuuuugaaauaaaauagccugucuuucagaucucaaaggcucuuuucagagccaccaaaaaaaaaaaaaaaaaaaaaaaaaaaaaaaaaaaaaaaaaaaaaaaaaaaaaaaaaaaaaaaaaaaaaaaaaaaaaaaaaaaaaaaaaaaaaaaaaaaaa

SEQ ID NO: 19034 - RNA, 941 nt, Artificial Sequence
  SARS-CoV-2__MT641735.1__membrane protein (M) mRNA gc
aggagagucccgcagucggcguccagcggcucugcuuguucgugugugugucguugcaggccuuauucaagcuuaccauggccgacagcaacggcaccaucaccguggaggagcugaagaagcuccuggagcaguggaaccuggucaucggguuccucuuccugacguggaucugccugcuccaguucgccuacgcgaaccgcaaccgguucuucuacaucaucaagcugaucuuccuguggcuccuguggcccgugacccuggccugcuucgugcucgccgccgucuaccgcaucaacuggaucaccggcgggaucgccaucgcgauggccugccuggugggccugauguggcucuccuacuucaucgccagcuuccggcuguucgcccgcacccgguccauguggagcuucaacccggagacgaacauccugcucaacgugccccugcacgggaccauccugacccgcccccuccuggaguccgagcuggucaucggcgcggugauccuccggggccaccuccgcaucgccgggcaccaccugggccggugcgacaucaaggaccugcccaaggagaucaccguggccacgagccgcacccuguccuacuacaagcugggggccagccagcgggucgccggcgacuccggguucgcggccuacagccgcuaccggaucggcaacuacaagcucaacaccgaccacuccagcuccagcgacaacaucgcccugcuggugcagugaggacuagucccuguucccagagcccacuuuuuuuucuuuuuuugaaauaaaauagccugucuuucagaucucaaaggcucuuuucagagccaccaaaaaaaaaaaaaaaaaaaaaaaaaaaaaaaaaaaaaaaaaaaaaaaaaaaaaaaaaaaaaaaaaaaaaaaaaaaaaaaaaaaaaaaaaaaaaaaaaaaaa

SEQ ID NO: 19035 - RNA, 941 nt, Artificial Sequence
  SARS-CoV-2__MT641744.1__membrane protein (M) mRNA gc
aggagagucccgcagucggcguccagcggcucugcuuguucgugugugugucguugcaggccuuauucaagcuuaccauggccgacagcaacggcaccaucaccguggaggagcugaagaagcuccuggagcaguggaaccuggucaucggguuccucuuccugacguggaucugccugcuccaguucgccuacgcgaaccgcaaccgguuccuguacaucaucaagcugaucuuccucuggcugcuguggcccgugacccucgccugcuucgugcuggccgccgucuaccgcaucaacuggaucaccggcgggaucgccaucgcgauggccugccuggugggccucauguggcuguccuacuucaucgccagcuuccggcuguucgcccgcacccgguccauguggagcuucaacccggagacgaacauccuccugaacgugccccugcacgggaccauccucacccgcccccugcuggaguccgagcucgucaucggcgcggugauccugcacggccaccuccggaucgccgggcaccaccugggccgcugcgacaucaaggaccugcccaaggagaucaccguggccacgagccggacccuguccuacuacaagcucggggccagccagcgcgucgccggcgacuccggguucgcggccuacagccgguaccgcaucggcaacuacaagcugaacaccgaccacuccagcuccagcgacaacaucgcccugcucgugcagugaggacuagucccuguucccagagcccacuuuuuuuucuuuuuuugaaauaaaauagccugucuuucagaucucaaaggcucuuuucagagccaccaaaaaaaaaaaaaaaaaaaaaaaaaaaaaaaaaaaaaaaaaaaaaaaaaaaaaaaaaaaaaaaaaaaaaaaaaaaaaaaaaaaaaaaaaaaaaaaaaaaaa

SEQ ID NO: 19036 - RNA, 941 nt, Artificial Sequence
  SARS-CoV-2__MT642078.1__membrane protein (M) mRNA gc
aggagagucccgcagucggcguccagcggcucugcuuguucgugugugugucguugcaggccuuauucaagcuuaccauggccgacagcaacggcaccaucaccguggaggagcugaagaagcuccuggagcaguggaaccuggucaucggguuccucuuccugacguggaucugccugcuccaguucgccuacgcgaaccgcaaccgguuccuguacaucaucaagcugaucuuccucuggcugcuguggcccgugacccucgccuucuucgugcuggccgccgucuaccgcaucaacuggaucaccggcgggaucgccaucgcgauggccugccuggugggccucauguggcuguccuacuucaucgccagcuuccggcuguucgcccgcacccgguccauguggagcuucaacccggagacgaacauccuccugaacgugccccugcacgggaccauccucacccgcccccugcuggaguccgagcucgucaucggcgcggugauccugcggggccaccuccgcaucgccgggcaccaccugggccggugcgacaucaaggaccugcccaaggagaucaccguggccacgagccgcacccuguccuacuacaagcucggggccagccagcgggucgccggcgacuccggguucgcggccuacagccgcuaccggaucggcaacuacaagcugaacaccgaccacuccagcuccagcgacaacaucgcccugcucgugcagugaggacuagucccuguucccagagcccacuuuuuuuucuuuuuuugaaauaaaauagccugucuuucagaucucaaaggcucuuuucagagccaccaaaaaaaaaaaaaaaaaaaaaaaaaaaaaaaaaaaaaaaaaaaaaaaaaaaaaaaaaaaaaaaaaaaaaaaaaaaaaaaaaaaaaaaaaaaaaaaaaaaaa

SEQ ID NO: 19037 - RNA, 941 nt, Artificial Sequence
  SARS-CoV-2__MT627217.1__membrane protein (M) mRNA gc
aggagagucccgcagucggcguccagcggcucugcuuguucgugugugugucguugcaggccuuauucaagcuuaccauggccgacagcaacggcaccaucaccguggaggagcugaagaagcuccuggagcaguggaaccuggucaucguguuccucuuccugacguggaucugccugcuccaguucgccuacgcgaaccgcaaccgguuccuguacaucaucaagcugaucuuccucuggcugcuguggcccgugacccucgccugcuucguccuggccgccguguaccgcaucaacuggaucaccgggggcaucgccaucgcgauggccugccugguggggcucauguggcuguccuacuucaucgccagcuuccggcuguucgcccgcacccgguccauguggagcuucaacccggagacgaacauccuccugaacgucccccugcacggcaccauccucacccgcccccugcuggaguccgagcucgugaucggggcggugauccugcggggccaccuccgcaucgccggccaccaccuggggcggugcgacaucaaggaccugcccaaggagaucaccgucgccacgagccgcacccuguccuacuacaagcucggcgccagccagcggguggccggggacuccggcuucgcggccuacagccgcuaccggaucgggaacuacaagcugaacaccgaccacuccagcuccagcgacaacaucgcccugcucgugcagugaggacuagucccuguucccagagcccacuuuuuuuucuuuuuuugaaauaaaauagccugucuuucagaucucaaaggcucuuuucagagccaccaaaaaaaaaaaaaaaaaaaaaaaaaaaaaaaaaaaaaaaaaaaaaaaaaaaaaaaaaaaaaaaaaaaaaaaaaaaaaaaaaaaaaaaaaaaaaaaaaaaaa

SEQ ID NO: 19038 - RNA, 941 nt, Artificial Sequence
  SARS-CoV-2__MT627751.1__membrane protein (M) mRNA gc
aggagagucccgcagucggcguccagcggcucugcuuguucgugugugugucguugcaggccuuauucaagcuuaccauggccgacagcaacggcaccaucaccguggaggagcugaagaagcuccuggagcaguggaaccuggucaucggguuccucuuccugacguggaucugccugcuccaguucgccuacgcgaaccgcaaccgguuccuguacaucaucaagcugaucuuccucuggcugcuguggcccgugacccucgccugcuucgugcuggccgccaucuaccgcaucaacuggaucaccggcgggaucgccaucgcgauggccugccuggucggccucauguggcuguccuacuucaucgccagcuuccggcuguucgcccgcacccgguccauguggagcuucaacccggagacgaacauccuccugaacgugccccugcacgggaccauccucacccgcccccugcuggaguccgagcucgugaucggcgcggucauccugcggggccaccuccgcaucgccgggcaccaccugggccggugcgacaucaaggaccugcccaaggagaucaccguggccacgagccgcacccuguccuacuacaagcucggggccagccagcggguggccggcgacuccggguucgcggccuacagccgcuaccggaucggcaacuacaagcugaacaccgaccacuccagcuccagcgacaacaucgcccugcucguccagugaggacuagucccuguucccagagcccacuuuuuuuucuuuuuuugaaauaaaauagccugucuuucagaucucaaaggcucuuuucagagccaccaaaaaaaaaaaaaaaaaaaaaaaaaaaaaaaaaaaaaaaaaaaaaaaaaaaaaaaaaaaaaaaaaaaaaaaaaaaaaaaaaaaaaaaaaaaaaaaaaaaaa

SEQ ID NO: 19039 - RNA, 866 nt, Artificial Sequence
  SARS-CoV-2__MT632615.1__membrane protein (M) mRNA gc
aggagagucccgcagucggcguccagcggcucugcuuguucgugugugugucguugcaggccuuauucaagcuuaccuuccuguuccucaccuggaucugccugcugcaguucgccuacgccaaccgcaaccgguuccucuacaucaucaagcugaucuuccuguggcuccuguggcccgugacccuggcgugcuucguccucgccgccguguaccgcaucaacuggaucacgggcgggaucgccaucgccauggcgugccuggugggccugauguggcucagcuacuucaucgccuccuuccggcuguucgcccgcacccggagcaugugguccuucaacccggagaccaacauccugcucaacgucccccugcacgggaccauccugacgcgcccccuccuggagagcgagcuggugaucggcgccgugauccuccgggggcaccuccgcaucgcgggccaccaccugggccggugcgacaucaaggaccugcccaaggagaucaccgucgccaccucccgcacccugagcuacuacaagcugggggccucccagcggguggccggcgacagcggguucgccgcguacucccgcuaccggaucggcaacuacaagcucaacacggaccacagcuccagcuccgacaacaucgcccugcuggugcagugaggacuagucccuguucccagagcccacuuuuuuuucuuuuuuugaaauaaaauagccugucuuucagaucucaaaggcucuuuucagagccaccaaaaaaaaaaaaaaaaaaaaaaaaaaaaaaaaaaaaaaaaaaaaaaaaaaaaaaaaaaaaaaaaaaaaaaaaaaaaaaaaaaaaaaaaaaaaaaaaaaaaa

SEQ ID NO: 19040 - RNA, 941 nt, Artificial Sequence
  SARS-CoV-2__MT568645.1__membrane protein (M) mRNA gc
aggagagucccgcagucggcguccagcggcucugcuuguucgugugugugucguugcaggccuuauucaagcuuaccauggccgacagcaacggcaccaucaccguggaggaguucaagaagcugcucgagcaguggaaccuggucaucggguuccuguuccucacguggaucugccugcugcaguucgccuacgcgaaccgcaaccgguuccucuacaucaucaagcugaucuuccuguggcuccuguggcccgugacccuggccugcuucgugcucgccgccgucuaccgcaucaacuggaucaccggcgggaucgccaucgcgauggccugccuggugggccugauguggcucuccuacuucaucgccagcuuccggcuguucgcccgcacccgguccauguggagcuucaacccggagacgaacauccugcucaacgugccccugcacgggaccauccugacccgcccccuccuggaguccgagcuggucaucggcgcggugauccuccggggccaccuccgcaucgccgggcaccaccugggccggugcgacaucaaggaccugcccaaggagaucaccguggccacgagccgcacccuguccuacuacaagcugggggccagccagcgggucgccggcgacuccggguucgcggccuacagccgcuaccggaucggcaacuacaagcucaacaccgaccacuccagcuccagcgacaacaucgcccugcuggugcagugaggacuagucccuguucccagagcccacuuuuuuuucuuuuuuugaaauaaaauagccugucuuucagaucucaaaggcucuuuucagagccaccaaaaaaaaaaaaaaaaaaaaaaaaaaaaaaaaaaaaaaaaaaaaaaaaaaaaaaaaaaaaaaaaaaaaaaaaaaaaaaaaaaaaaaaaaaaaaaaaaaaaa

SEQ ID NO: 19041 - RNA, 941 nt, Artificial Sequence
  SARS-CoV-2__MT520347.1__membrane protein (M) mRNA gc
aggagagucccgcagucggcguccagcggcucugcuuguucgugugugugucguugcaggccuuauucaagcuuaccauggccgacagcaacggcaccaucaccguggaggagcugaagaagcuccuggagcaguggaaccuggucaucggguuccucuuccugacguggaucugccugcuccaguucgccuacgcgaaccgcaaccgguuccuguacaucaucaagcugaucuuccucuggcugcuguggcccgugacccucgccugcuucgugcuggccgccgucuaccgcaucaacuggaucaccggcgggaucgccaucgcgauggccugccuggugucccucauguggcugagcuacuucaucgccuccuuccggcuguucgcccgcacccggagcaugugguccuucaacccggagacgaacauccuccugaacgugccccugcacggcaccauccucacccgcccccugcuggagagcgagcucgucaucggggcggugauccugcggggccaccuccgcaucgccggccaccaccuggggcggugcgacaucaaggaccugcccaaggagaucaccguggccacgucccgcacccugagcuacuacaagcucggcgccucccagcgggucgccggggacagcggcuucgcggccuacucccgcuaccggaucgggaacuacaagcugaacaccgaccacagcuccagcuccgacaacaucgcccugcucgugcagugaggacuagucccuguucccagagcccacuuuuuuuucuuuuuuugaaauaaaauagccugucuuucagaucucaaaggcucuuuucagagccaccaaaaaaaaaaaaaaaaaaaaaaaaaaaaaaaaaaaaaaaaaaaaaaaaaaaaaaaaaaaaaaaaaaaaaaaaaaaaaaaaaaaaaaaaaaaaaaaaaaaaa

SEQ ID NO: 19042 - RNA, 941 nt, Artificial Sequence
  SARS-CoV-2__MT520458.1__membrane protein (M) mRNA gc
aggagagucccgcagucggcguccagcggcucugcuuguucgugugugugucguugcaggccuuauucaagcuuaccauggccgacagcaacggcaccaucaccguggaggagcugaagaagcuccuggagcaguggaaccuggucaucggguuccucuuccugacguggaucugccugcuccaguucgccuacgcgaaccgcaaccgguuccuguacaucaucaagcugaucuuccucuggcugcuguggcccgugacccucgccugcuucgugcuggccgccgucuaccgcaucaacuggaucaccggcgggaucgccaucgcgauggccugccuggugggccucauguggcuguccuacuucaucgccagcuuccggcuguucgcccgcacccgguccauguggagcuucaacccggagacgaacauccuccugaacgugccccugcacgggaccauccucacccgcucccugcuggagagcgagcucgucaucggcgcggugauccugcggggccaccuccgcaucgccgggcaccaccugggccggugcgacaucaaggaccugcccaaggagaucaccguggccacgucccgcacccugagcuacuacaagcucggggccucccagcgggucgccggcgacagcggguucgcggccuacucccgcuaccggaucggcaacuacaagcugaacaccgaccacagcuccagcuccgacaacaucgcccugcucgugcagugaggacuagucccuguucccagagcccacuuuuuuuucuuuuuuugaaauaaaauagccugucuuucagaucucaaaggcucuuuucagagccaccaaaaaaaaaaaaaaaaaaaaaaaaaaaaaaaaaaaaaaaaaaaaaaaaaaaaaaaaaaaaaaaaaaaaaaaaaaaaaaaaaaaaaaaaaaaaaaaaaaaaa

SEQ ID NO: 19043 - RNA, 941 nt, Artificial Sequence
  SARS-CoV-2__MT558681.1__membrane protein (M) mRNA gc
aggagagucccgcagucggcguccagcggcucugcuuguucgugugugugucguugcaggccuuauucaagcuuaccauggccgacagcaacggcaccaucaccguggaggagcugaagaagcuccuggagcaguggaaccuggucaucggguuccucuuccugacguggaucugccugcuccaguucgccuacgcgaaccgcaaccgguuccuguacaucaucaagcugaucuuccucuggcugcuguggcccgugacccucgccugcuucgugcuggccgccgucuaccgcaucaacuggaucaccggcgggaucgccaucgcgauggccugccuggugggccucauguggcuguccuacuucaucgccagcuuccggcuguucgcccgcacccgguccauguggagcuucaacccggagacgaacauccuccugaacgugccccugcacgggaccauccucacccgcccccugcuggaguccgagcucgucaucggcgcggugaucuuccggggccaccuccgcaucgccgggcaccaccugggccggugcgacaucaaggaccugcccaaggagaucaccguggccacgagccgcacccuguccuacuacaagcugggggccagccagcgggucgccggcgacuccggguucgcggccuacagccgcuaccggaucggcaacuacaagcucaacaccgaccacuccagcuccagcgacaacaucgcccugcuggugcagugaggacuagucccuguucccagagcccacuuuuuuuucuuuuuuugaaauaaaauagccugucuuucagaucucaaaggcucuuuucagagccaccaaaaaaaaaaaaaaaaaaaaaaaaaaaaaaaaaaaaaaaaaaaaaaaaaaaaaaaaaaaaaaaaaaaaaaaaaaaaaaaaaaaaaaaaaaaaaaaaaaaaa

SEQ ID NO: 19044 - RNA, 941 nt, Artificial Sequence
  SARS-CoV-2__MT507282.1__membrane protein (M) mRNA gc
aggagagucccgcagucggcguccagcggcucugcuuguucgugugugugucguugcaggccuuauucaagcuuaccauggccgacagcaacggcaccaucaccguggaggagcugaagaagcuccuggagcaguggaaccuggucaucggguuccucuuccugacguggaucugccugcuccaguucgccuacgcgaaccgcaaccgguuccuguacaucaucaagcugaucuuccucuggcugcuguggcccgugacccucgccugcuucgugcuggccgccgucuaccgcaucaacuggaucaccggcgggaucgccaucgcgauggccugccuggugggccucauguggcuguccuacuucaucgccagcuuccggcuguucgcccgcacccgguccauguggagcuucaacccggagacgaacauccuccugaacgugccccugcacgggaccauccucacccgcccccugcuggaguccgagaucgucaucggcgcggugauccuccggggccaccuccgcaucgccgggcaccaccugggccggugcgacaucaaggaccugcccaaggagaucaccguggccacgagccgcacccuguccuacuacaagcugggggccagccagcgggucgccggcgacuccggguucgcggccuacagccgcuaccggaucggcaacuacaagcucaacaccgaccacuccagcuccagcgacaacaucgcccugcuggugcagugaggacuagucccuguucccagagcccacuuuuuuuucuuuuuuugaaauaaaauagccugucuuucagaucucaaaggcucuuuucagagccaccaaaaaaaaaaaaaaaaaaaaaaaaaaaaaaaaaaaaaaaaaaaaaaaaaaaaaaaaaaaaaaaaaaaaaaaaaaaaaaaaaaaaaaaaaaaaaaaaaaaaa

SEQ ID NO: 19045 - RNA, 941 nt, Artificial Sequence
  SARS-CoV-2__MT477859.1__membrane protein (M) mRNA gc
aggagagucccgcagucggcguccagcggcucugcuuguucgugugugugucguugcaggccuuauucaagcuuaccauggccgacagcaacggcaccaucaccguggaggagcugaagaagcuccuggagcaguggaaccuggucaucggguuccucuuccugacguggaucugccugcuccaguucgccuacgcgaaccgcaaccgguuccuguacaucaucaagcugaucuuccucuggcugcuguggcccgugacccucgccugcuucgugcuggccgccgucuaccgcaucaacuggaucaccggcgggaucgccaucgcgauggccugccuggugggccucauguggcuguccuacuucaucgccagcuuccggcuguucgcccgcacccgguccauguggagcuucaacccggagacgaacauccuccugaacgugcccuuccacgggaccauccugacccgcccccuccuggaguccgagcuggucaucggcgcggugauccuccggggccaccuccgcaucgccgggcaccaccugggccggugcgacaucaaggaccugcccaaggagaucaccguggccacgagccgcacccuguccuacuacaagcugggggccagccagcgggucgccggcgacuccggguucgcggccuacagccgcuaccggaucggcaacuacaagcucaacaccgaccacuccagcuccagcgacaacaucgcccugcuggugcagugaggacuagucccuguucccagagcccacuuuuuuuucuuuuuuugaaauaaaauagccugucuuucagaucucaaaggcucuuuucagagccaccaaaaaaaaaaaaaaaaaaaaaaaaaaaaaaaaaaaaaaaaaaaaaaaaaaaaaaaaaaaaaaaaaaaaaaaaaaaaaaaaaaaaaaaaaaaaaaaaaaaaa

SEQ ID NO: 19046 - RNA, 941 nt, Artificial Sequence
  SARS-CoV-2__MT470125.1__membrane protein (M) mRNA gc
aggagagucccgcagucggcguccagcggcucugcuuguucgugugugugucguugcaggccuuauucaagcuuaccauggccgacagcaacggcaccaucaccguggaggagcugaagaagcuccuggagcaguggaaccuggucaucggguuccucuuccugacguggaucugccugcuccaguucgccuacgcgaaccgcaaccgguuccuguacaucaucaagcugaucuuccucuggcugcuguggcccgugacccucgccugcuucgugcuggccgucguguaccgcaucaacuggaucaccggcgggaucgccaucgccauggcgugccuggugggccucauguggcuguccuacuucaucgccagcuuccggcuguucgcccgcacccgguccauguggagcuucaacccggagacgaacauccuccugaacgucccccugcacgggaccauccucacccgcccccugcuggaguccgagcucgugaucggcgccgugauccugcggggccaccuccgcaucgcggggcaccaccugggccggugcgacaucaaggaccugcccaaggagaucaccgucgccacgagccgcacccuguccuacuacaagcucggggccagccagcggguggccggcgacuccggguucgccgcguacagccgcuaccggaucggcaacuacaagcugaacaccgaccacuccagcuccagcgacaacaucgcccugcucgugcagugaggacuagucccuguucccagagcccacuuuuuuuucuuuuuuugaaauaaaauagccugucuuucagaucucaaaggcucuuuucagagccaccaaaaaaaaaaaaaaaaaaaaaaaaaaaaaaaaaaaaaaaaaaaaaaaaaaaaaaaaaaaaaaaaaaaaaaaaaaaaaaaaaaaaaaaaaaaaaaaaaaaaa

SEQ ID NO: 19047 - RNA, 941 nt, Artificial Sequence
  SARS-CoV-2__MT451051.1__membrane protein (M) mRNA gc
aggagagucccgcagucggcguccagcggcucugcuuguucgugugugugucguugcaggccuuauucaagcuuaccauggccgacagcaacggcaccaucaccguggaggagcugaagaagcuccuggagcaguggaaccuggucaucggguuccucuuccugacguggaucugccugcuccaguucgccuacgcgaaccgcaaccgguuccuguacaucaucaagcugaucuuccucuggcugcuguggcccgugacccucgccugcuucgugcuggccgccgucuaccgcaucaacuggaucaccggcgggaucgccaucgcgauggccugccuggugggccucauguggcuguccuacuucaucgccagcuuccggcuguucgcccgcacccgguccauguggagcuucaacccggagacgaacauccuccugaacgugccccugcacgggaccauccucacccgcccccugcuggaguccgagcucgucaucggcgcggugauccugcggggccaccuccgcaucgccgggcaccaccugggccggugcgacaucaaggaccugcccaaggagaucaccguggccacgagccgcacccuguccuacuacaagcucggggccagccagcgggucgccggcgacuccggguucgcggccuacagccgcuaccggaucggcaacuacaagcugaacaccgaccacuccagcuccaucgacaacaucgcccugcucgugcagugaggacuagucccuguucccagagcccacuuuuuuuucuuuuuuugaaauaaaauagccugucuuucagaucucaaaggcucuuuucagagccaccaaaaaaaaaaaaaaaaaaaaaaaaaaaaaaaaaaaaaaaaaaaaaaaaaaaaaaaaaaaaaaaaaaaaaaaaaaaaaaaaaaaaaaaaaaaaaaaaaaaaa

SEQ ID NO: 19048 - RNA, 941 nt, Artificial Sequence
  SARS-CoV-2__MT429186.1__membrane protein (M) mRNA gc
aggagagucccgcagucggcguccagcggcucugcuuguucgugugugugucguugcaggccuuauucaagcuuaccauggccgacagcaacggcaccaucaccguggaggagcugaagaagcuccuggagcaguggaaccuggucaucggguuccucuuccugacguggaucugccugcuccaguucuccuacgccaaccgcaaccgguuccuguacaucaucaagcugaucuuccucuggcugcuguggcccgugacccucgcgugcuucgugcuggccgccgucuaccgcaucaacuggaucaccggcgggaucgccaucgccauggcgugccuggugggccucauguggcugagcuacuucaucgccuccuuccggcuguucgcccgcacccggagcaugugguccuucaacccggagacgaacauccuccugaacgugccccugcacgggaccauccucacccgcccccugcuggagagcgagcucgucaucggcgccgugauccugcggggccaccuccgcaucgcggggcaccaccugggccggugcgacaucaaggaccugcccaaggagaucaccguggccacgucccgcacccugagcuacuacaagcucggggccucccagcgggucgccggcgacagcggguucgccgcguacucccgcuaccggaucggcaacuacaagcugaacaccgaccacagcuccagcuccgacaacaucgcccugcucgugcagugaggacuagucccuguucccagagcccacuuuuuuuucuuuuuuugaaauaaaauagccugucuuucagaucucaaaggcucuuuucagagccaccaaaaaaaaaaaaaaaaaaaaaaaaaaaaaaaaaaaaaaaaaaaaaaaaaaaaaaaaaaaaaaaaaaaaaaaaaaaaaaaaaaaaaaaaaaaaaaaaaaaaa

SEQ ID NO: 19049 - RNA, 941 nt, Artificial Sequence
  SARS-CoV-2__MT358656.1__membrane protein (M) mRNA gc
aggagagucccgcagucggcguccagcggcucugcuuguucgugugugugucguugcaggccuuauucaagcuuaccauggccgacagcaacggcaccaucaccguggaggagcugaagaagcuccuggagcaguggaaccuggucaucggguuccucuuccugacguggaucugccugcuccaguucgccuacgcgaaccgcaaccgguuccuguacaucaucaagcugaucuuccucuggcugcuguggcccgugacccucgccugcuucgugcuggccgccgucuaccgcaucaacuggaucaccggcgggaucgccaucgcgauggccugccuggugggccucauguggcuguccuacuucaucgccagcuuccggcuguucgcccgcacccgguccauguggagcuucaacccggagacgaacauccuccugaacgugccccugcacgggaccauccucacccgcccccugcuggaguccgagcucgucaucggcgcggugauccugcggggccaccuccgcaucgccgggcaccaccugggccggugcgacaucaaggaccugcccaaggagaucaccguggccacgagccgcacccuguccuacuacaagcucggggccagccagcgggucgccggcaacuccggguucgcggccuacagccgcuaccggaucggcaacuacaagcugaacaccgaccacuccagcuccagcgacaacaucgcccugcucgugcagugaggacuagucccuguucccagagcccacuuuuuuuucuuuuuuugaaauaaaauagccugucuuucagaucucaaaggcucuuuucagagccaccaaaaaaaaaaaaaaaaaaaaaaaaaaaaaaaaaaaaaaaaaaaaaaaaaaaaaaaaaaaaaaaaaaaaaaaaaaaaaaaaaaaaaaaaaaaaaaaaaaaaa

SEQ ID NO: 19050 - RNA, 1514 nt, Artificial Sequence
  MERS-CoV/MERS-CoV-Jeddah-human-1__KF958702.1__nucleocapsid protein (N) mRNA gc
aggagagucccgcagucggcguccagcggcucugcuuguucgugugugugucguugcaggccuuauucaagcuuaccauggccagccccgccgcgccgcgcgccguguccuucgccgacaacaacgacaucaccaacaccaaccugagccggggccgcgggcggaaccccaagccccgcgccgcccccaacaacacggucuccugguacaccggccucacccagcacgggaaggugccgcugaccuucccgcccggccagggggugccccugaacgcgaacagcacgcccgcccagaacgccggcuacuggcggcgccaggaccggaagaucaacaccggcaacgggaucaagcagcucgcgccccgcugguacuucuacuacaccggcaccgggcccgaggccgcccugcccuuccgggccgucaaggacggcaucgugugggugcacgaggacggggccacggacgccccguccaccuucggcacccgcaaccccaacaacgacagcgcgaucgucacccaguucgcccccggcacgaagcugcccaagaacuuccacaucgaggggaccggcgggaacucccagagcuccagccgggccuccagcgugucccgcaacagcucccggagcuccagccagggcucccgcagcggcaacagcacccgggggaccuccccgggccccagcgggaucggcgccgucgggggcgaccuccuguaccuggaccuccugaaccgccugcaggcccucgaguccggcaaggugaagcagagccagcccaaggugaucacgaagaaggacgcggccgccgccaagaacaagaugcggcacaagcgcaccuccaccaagagcuucaacauggugcaggccuucgggcugcggggccccggggaccugcagggcaacuucggggaccuccagcugaacaagcugggcaccgaggacccgcgcuggccccagaucgcggagcucgcccccacggccuccgccuucaugggcaugagccaguucaagcugacccaccagaacaacgacgaccacgggaaccccgucuacuuccugcgguacuccggcgccaucaagcucgacccgaagaaccccaacuacaacaaguggcuggagcugcucgagcagaacaucgacgcguacaagaccuuccccaagaaggagaagaagcagaaggcccccaaggaggagagcaccgaccagauguccgagccgcccaaggagcagcgcgugcaggggagcaucacgcagcgcacccggacccgccccuccgugcagccgggccccaugaucgacgucaacaccgacugaggacuagucccuguucccagagcccacuuuuuuuucuuuuuuugaaauaaaauagccugucuuucagaucucaaaggcucuuuucagagccaccaaaaaaaaaaaaaaaaaaaaaaaaaaaaaaaaaaaaaaaaaaaaaaaaaaaaaaaaaaaaaaaaaaaaaaaaaaaaaaaaaaaaaaaaaaaaaaaaaaaaa

SEQ ID NO: 19051 - RNA, 1514 nt, Artificial Sequence; identical to SEQ ID NO: 19050
  MERS-CoV/Al-Hasa_4_2013__KF186564.1__nucleocapsid protein (N) mRNA gc

SEQ ID NO: 19052 - RNA, 1514 nt, Artificial Sequence; identical to SEQ ID NO: 19050
  MERS-CoV/Riyadh_14_2013__KJ156934.1__nucleocapsid protein (N) mRNA gc

SEQ ID NO: 19053 - RNA, 1508 nt, Artificial Sequence
  MERS-CoV/England 1__NC_038294.1__nucleocapsid protein (N) mRNA gc
aggagagucccgcagucggcguccagcggcucugcuuguucgugugugugucguugcaggccuuauucaagcuuaccauggccagccccgccgcgccgcgcgccguguccuucgccgacaacaacgacaucaccaacaccaaccugagccggggccgcgggcggaaccccaagccccgcgccgcccccaacaacacggucuccugguacaccggccucacccagcacgggaaggugccgcugaccuucccgcccggccagggggugccccugaacgcgaacagcacgcccgcccagaacgccggcuacuggcggcgccaggaccggaagaucaacaccggcaacgggaucaagcagcucgcgccccgcugguacuucuacuacaccggcaccgggcccgaggccgcccugcccuuccgggccgucaaggacggcaucgugugggugcacgaggacggggccacggacgccccguccaccuucggcacccgcaaccccaacaacgacagcgcgaucgucacccaguucgcccccggcacgaagcugcccaagaacuuccacaucgaggggaccggcgggaacucccagagcuccagccgggccuccagcgugucccgcaacagcucccggagcuccagccagggcucccgcagcggcaacagcacccgggggaccuccccgggccccagcgggaucggcgccgucgggggcgaccuccuguaccuggaccuccugaaccgccugcaggcccucgaguccggcaaggugaagcagagccagcccaaggugaucacgaagaaggacgcggccgccgccaagaacaagaugcggcacaagcgcaccuccaccaagagcuucaacauggugcaggccuucgggcugcggggccccggggaccugcagggcaacuucggggaccuccagcugaacaagcugggcaccgaggacccgcgcuggccccagaucgcggagcucgcccccacggccuccgccuucaugggcaugagccaguucaagcugacccaccagaacaacgacgaccacgggaaccccgucuacuuccugcgguacuccggcgccaucaagcucgacccgaagaaccccaacuacaacaaguggcuggagcugcucgagcagaacaucgacgcguacaagaccuuccccaagaaggagaagaagcagaaggcccccaaggaggagagcaccgaccagauguccgagccgcccaaggagcaccgcgugcaggggacgcagcgcacccggacccgccccagcgugcagccgggccccaugaucgacgucaacaccgacugaggacuagucccuguucccagagcccacuuuuuuuucuuuuuuugaaauaaaauagccugucuuucagaucucaaaggcucuuuucagagccaccaaaaaaaaaaaaaaaaaaaaaaaaaaaaaaaaaaaaaaaaaaaaaaaaaaaaaaaaaaaaaaaaaaaaaaaaaaaaaaaaaaaaaaaaaaaaaaaaaaaaa

SEQ ID NO: 19054 - RNA, 1541 nt, Artificial Sequence
  SARS-CoV/Tor2__NC_004718.3__nucleocapsid protein (N) mRNA gc
aggagagucccgcagucggcguccagcggcucugcuuguucgugugugugucguugcaggccuuauucaagcuuaccaugagcgacaacggcccccaguccaaccagcgcagcgccccgcggaucaccuucgggggccccaccgacuccacggacaacaaccagaacgggggccgcaacggggcccggcccaagcagcgccggccccagggccugccgaacaacaccgcgagcugguucaccgcccucacccagcacggcaaggaggagcugcgcuucccccgggggcagggcgugcccaucaacacgaacuccgggcccgacgaccagaucggcuacuaccgccgggccacccgccggguccgcgggggcgacggcaagaugaaggagcugagcccgcggugguacuucuacuaccucgggaccggccccgaggccucccugcccuacggggccaacaaggagggcaucguguggguggcgaccgagggcgcccugaacacgcccaaggaccacaucgggacccgcaacccgaacaacaacgccgccaccguccuccagcugccccagggcaccacgcugcccaagggguucuacgcggagggcagccgcgggggcucccaggccagcucccggagcuccagccggucccgcggcaacagccggaacuccacccccgggagcucccgcggcaacagcccggcccggauggccagcgggggcggggagaccgcccucgcgcugcugcuccuggaccgccugaaccagcucgaguccaaggugagcggcaagggccagcagcagcaggggcagaccgugacgaagaaguccgccgccgaggccagcaagaagccccgccagaagcggaccgccaccaagcaguacaacgucacccaggcguucggccgccgggggcccgagcagacgcagggcaacuucggggaccaggaccugauccgccagggcaccgacuacaagcacuggccccagaucgcccaguucgccccguccgccagcgccuucuucggcaugucccggaucgggauggaggugacccccagcggcaccuggcugacguaccacggggcgaucaagcucgacgacaaggacccccaguucaaggacaacgugauccugcugaacaagcacaucgacgccuacaagaccuucccgcccaccgagcccaagaaggacaagaagaagaagaccgacgaggcccagccccucccccagcgccagaagaagcagccgacggucacccugcugcccgccgccgacauggacgacuucucccggcagcuccagaacagcauguccggcgcgagcgccgacuccacccaggccugaggacuagucccuguucccagagcccacuuuuuuuucuuuuuuugaaauaaaauagccugucuuucagaucucaaaggcucuuuucagagccaccaaaaaaaaaaaaaaaaaaaaaaaaaaaaaaaaaaaaaaaaaaaaaaaaaaaaaaaaaaaaaaaaaaaaaaaaaaaaaaaaaaaaaaaaaaaaaaaaaaaaa

SEQ ID NO: 19055 - RNA, 1619 nt, Artificial Sequence
  HCoV/OC43__NC_006213.1__nucleocapsid protein (N) mRNA gc
aggagagucccgcagucggcguccagcggcucugcuuguucgugugugugucguugcaggccuuauucaagcuuaccaugagcuucacccccggcaagcaguccagcucccgcgccagcuccgggaaccggagcggcaacgggauccugaagugggccgaccaguccgaccaguuccgcaacgugcagacccggggccgccgggcgcagccgaagcagacggccaccagccagcagcccuccgggggcaacgucgugcccuacuacagcugguucuccggcaucacccaguuccagaaggggaaggaguucgaguucguggagggccaggggguccccaucgccccgggcgugcccgccaccgaggccaagggguacugguaccgccacaaccggcgcagcuucaagacggcggacggcaaccagcggcagcuccugccccgcugguacuucuacuaccugggcaccgggccccacgccaaggaccaguacggcaccgacaucgacgggguguacugggucgccuccaaccaggccgacgugaacaccccggcggacaucguggaccgggaccccagcuccgacgaggccauccccacgcgcuucccgcccggcaccguccucccccagggcuacuacaucgaggggagcggccgguccgcccccaacagccgcuccaccagccggaccagcucccgcgccagcuccgccgggagccggucccgcgcgaacagcggcaaccggacgcccaccuccggggugaccccggacauggccgaccagaucgccagccuggugcuggccaagcucggcaaggacgccaccaagccccagcaggucacgaagcacaccgcgaaggaggugcgccagaagauccugaacaagccccggcagaagcgcucccccaacaagcagugcaccgugcagcagugcuucggcaagcgcgggccgaaccagaacuucggcgggggcgagaugcugaagcucgggaccagcgacccccaguuccccauccuggccgagcuggcccccacggccggcgccuucuucuucggcucccggcucgagcuggcgaagguccagaaccugagcgggaacccggacgagccccagaaggacguguacgagcuccgcuacaacggcgccauccgguucgacuccacccugagcggguucgagaccaucaugaaggugcugaacgagaaccucaacgccuaccagcagcaggacggcaugaugaacaugucccccaagccccagcgccagcgggggcacaagaacggccagggcgagaacgacaacaucagcgucgccgugccgaagucccgcgugcagcagaacaagagccgggagcugaccgccgaggacaucucccugcucaagaagauggacgagcccuacacggaggacaccagcgagaucugaggacuagucccuguucccagagcccacuuuuuuuucuuuuuuugaaauaaaauagccugucuuucagaucucaaaggcucuuuucagagccaccaaaaaaaaaaaaaaaaaaaaaaaaaaaaaaaaaaaaaaaaaaaaaaaaaaaaaaaaaaaaaaaaaaaaaaaaaaaaaaaaaaaaaaaaaaaaaaaaaaaaa

SEQ ID NO: 19056 - RNA, 1598 nt, Artificial Sequence
  HCoV/HKU1__NC_006577.2__nucleocapsid protein (N) mRNA gc
aggagagucccgcagucggcguccagcggcucugcuuguucgugugugugucguugcaggccuuauucaagcuuaccaugagcuacacccccggccacuacgccgggucccgcagcuccagcggcaaccgguccgggauccugaagaagaccagcugggccgaccaguccgagcgcaacuaccagacguucaaccggggccgcaagacccagccgaaguucaccgugagcacccagccccaggggaacacgaucccccacuacuccugguucagcggcaucacccaguuccagaagggccgggacuucaaguucuccgacgggcagggcguccccaucgcguucggggugccgcccagcgaggccaagggcuacugguaccgccacucccggcgcagcuucaagaccgccgacgggcagcagaagcagcuccugccccggugguacuucuacuaccugggcaccggccccuacgccaacgccuccuacggggagagccucgagggcguguucugggucgcgaaccaccaggccgacacguccaccccgagcgacguguccagccgcgaccccaccacccaggaggccauccccacgcgguucccgcccgggaccauccugccccagggcuacuacguggagggcagcgggcgcuccgccagcaacucccggcccggcagccgcucccagagccgggggcccaacaaccgcucccugagccgguccaacagcaacuuccgccacuccgacagcaucgucaagccggacauggcggacgagaucgccaaccucgugcuggccaagcugggcaaggacuccaagccccagcaggucaccaagcagaacgccaaggagauccggcacaagauccucaccaagccccgccagaagcggacgcccaacaagcacugcaacgugcagcagugcuucgggaagcgcggcccgagccagaacuucggcaacgccgagaugcugaagcuggggaccaacgacccccaguuccccauccucgcggagcuggcccccaccccgggcgccuucuucuucggguccaagcuggaccucgugaagcgcgacagcgaggccgacucccccgugaaggacgucuucgagcugcacuacagcggcuccauccgguucgacagcacccugcccggguucgagacgaucaugaaggugcucgaggagaaccugaacgccuacgugaacagcaaccagaacaccgacuccgacagccuguccagcaagccccagcgcaagcggggcgucaagcagcucccggagcaguucgacucccugaaccugagcgcgggcacccagcacaucuccaacgacuucacccccgaggaccacagccuccuggccacgcuggacgaccccuacguggaggacuccguggccugaggacuagucccuguucccagagcccacuuuuuuuucuuuuuuugaaauaaaauagccugucuuucagaucucaaaggcucuuuucagagccaccaaaaaaaaaaaaaaaaaaaaaaaaaaaaaaaaaaaaaaaaaaaaaaaaaaaaaaaaaaaaaaaaaaaaaaaaaaaaaaaaaaaaaaaaaaaaaaaaaaaaa

SEQ ID NO: 19057 - RNA, 1442 nt, Artificial Sequence
  HCoV/229E/BN1/GER/2015__KU291448.1__nucleocapsid protein (N) mRNA gc
aggagagucccgcagucggcguccagcggcucugcuuguucgugugugugucguugcaggccuuauucaagcuuaccauggccaccgugaagugggccgacgcgagcgagccccagcgcggccggcaggggcgcaucccguacucccuguacagcccccuccuggucgacuccgagcagcccuggaaggugaucccccggaaccuggugccggucaacaagaaggacaagaacaagcucaucggcuacuggaacgugcagaagcgcuuccggacccgcaaggggaagcggguggaccugagccccaagcugcacuucuacuaccucggcacggggccccacaaggacgccaaguuccgcgagcgggucgagggcguggugugggucgccguggacggcgccaagaccgagcccaccggguacggcgugcgccggaagaacuccgagccggagaucccccacuucaaccagaagcugcccaacggggucaccguggccgaggagcccgacagccgcgcgccgucccggagccagucccgcagccagucccggagccgcggcgaguccaagagccagucccggaaccccagcuccgaccgcaaccacaacagccaggacgacaucaugaaggccguggccgccgcgcugaagucccucggguucgacaagccccaggagaaggacaagaaguccgccaagacgggcacccccaagccgagccggaaccagagccccgccagcucccagagcgccgccaagauccuggcgcgcucccagagcuccgagaccaaggagcagaagcacgagaugcagaagccccgguggaagcgccagcccaacgacgacgucaccagcaacgugacgcagugcuucggcccgcgcgaccuggaccacaacuucggguccgccggcguggucgccaacggggugaaggccaagggcuacccccaguucgccgagcucgugcccagcaccgcggccaugcuguucgacucccacaucgucagcaaggaguccggcaacaccguggugcugaccuucacgacccgggucaccgugcccaaggaccacccgcaccucgggaaguuccuggaggagcugaacgccuucacccgcgagaugcagcagcagccccuccugaaccccagcgcccuggaguucaaccccucccagacgagcccggccaccgucgagcccgugcgggacgagguguccaucgagaccgacaucaucgacgaggucaacugaggacuagucccuguucccagagcccacuuuuuuuucuuuuuuugaaauaaaauagccugucuuucagaucucaaaggcucuuuucagagccaccaaaaaaaaaaaaaaaaaaaaaaaaaaaaaaaaaaaaaaaaaaaaaaaaaaaaaaaaaaaaaaaaaaaaaaaaaaaaaaaaaaaaaaaaaaaaaaaaaaaaa

SEQ ID NO: 19058 - RNA, 1406 nt, Artificial Sequence
  HCoV/NL63/RPTEC/2004__JX504050.1__nucleocapsid protein (N) mRNA gc
aggagagucccgcagucggcguccagcggcucugcuuguucgugugugugucguugcaggccuuauucaagcuuaccauggccagcgugaacugggccgacgaccgcgcggcccggaagaaguucccgccgcccuccuucuacaugccccugcucgucagcuccgacaaggcccccuaccgcgugaucccccggaaccuggugcccaucggcaaggggaacaaggacgagcagaucggcuacuggaacguccaggagcgcuggcggaugcgccgggggcagcgcguggaccugccgcccaaggugcacuucuacuaccucggcaccgggccccacaaggaccugaaguuccggcagcgcagcgacggcgucguguggguggccaaggagggcgccaagaccgucaacacgucccuggggaaccggaagcgcaaccagaagccccucgagcccaaguucagcaucgcgcugcccccggagcuguccgugguggaguucgaggaccggagcaacaacuccagccgcgccuccagccgguccagcacccgcaacaacucccgggacagcucccgcagcaccucccggcagcagagccgcacccggagcgacuccaaccagagcuccagcgaccucgucgccgccgugacgcuggcgcugaagaaccucggcuucgacaaccaguccaagagccccuccagcuccgggaccagcacccccaagaagcccaacaagccgcugucccagccccgcgccgacaagcccagccagcugaagaagccccgcuggaagcgggugccgacccgcgaggagaacgucauccagugcuucggcccccgggacuucaaccacaacaugggggacuccgaccucgugcagaacggcguggacgccaagggcuucccccagcuggccgagcugauccccaaccaggccgcccucuucuucgacagcgaggucuccacggacgaggugggggacaacgugcagaucaccuacaccuacaagaugcuggucgcgaaggacaacaagaaccugccgaaguucaucgagcagaucagcgccuucaccaagcccuccagcaucaaggagaugcagucccagagcagccacguggcccagaacacggugcucaacgccuccauccccgagagcaagccccuggcggacgacgacuccgccaucaucgagaucgucaacgaggugcugcacugaggacuagucccuguucccagagcccacuuuuuuuucuuuuuuugaaauaaaauagccugucuuucagaucucaaaggcucuuuucagagccaccaaaaaaaaaaaaaaaaaaaaaaaaaaaaaaaaaaaaaaaaaaaaaaaaaaaaaaaaaaaaaaaaaaaaaaaaaaaaaaaaaaaaaaaaaaaaaaaaaaaaa

SEQ ID NO: 19059 - RNA, 1541 nt, Artificial Sequence
  Bat SARS-like CoV/WIV1__KF367457.1__nucleocapsid protein (N) mRNA gc
aggagagucccgcagucggcguccagcggcucugcuuguucgugugugugucguugcaggccuuauucaagcuuaccaugagcgacaacggcccccaguccaaccagcgcagcgccccgcggaucaccuucgggggccccaccgacuccacggacaacaaccagaacgggggccgcaacggggcccggcccaagcagcgccggccccagggccugccgaacaacaccgcgagcugguucaccgcccucacccagcacggcaaggaggagcugcgcuucccccgggggcagggcgugcccaucaacacgaacuccgggcccgacgaccagaucggcuacuaccgccgggccacccgccggguccgcgggggcgacggcaagaugaaggagcugagcccgcggugguacuucuacuaccucgggaccggccccgaggccucccugcccuacggggccaacaaggagggcaucguguggguggcgaccgagggcgcccugaacacgcccaaggaccacaucgggacccgcaacccgaacaacaacgccgccaccguccuccagcugccccagggcaccacgcugcccaagggguucuacgcggagggcagccgcgggggcucccaggccagcucccggagcuccagccggucccgcggcaacagccggaacuccacccccgggagcucccgcggcaacagcccggcccggauggccagcgggggcggggagaccgcccucgcgcugcugcuccuggaccgccugaaccagcucgaguccaaggugagcggcaagggccagcagcagcaggggcagaccgugacgaagaaguccgccgccgaggccagccgcaagccccggcagaagcgcaccgccaccaagcaguacaacgucacccaggcguucggccggcgcgggcccgagcagacgcagggcaacuucggggaccaggaccugauccggcagggcaccgacuacaagcacuggccccagaucgcccaguucgccccguccgccagcgccuucuucggcaugucccgcaucgggauggaggugacccccagcggcaccuggcugacguaccacggggcgaucaagcucgacgacaaggacccccaguucaaggacaacgugauccugcugaacaagcacaucgacgccuacaagaccuucccgcccaccgagcccaagaaggacaagaagaagaagaccgacgaggcccagccccucccccagcggcagaagaagcagccgacggucacccugcugcccgccgccgacauggacgacuucucccgccagcuccagaacagcauguccggcgcgagcgccgacuccacccaggccugaggacuagucccuguucccagagcccacuuuuuuuucuuuuuuugaaauaaaauagccugucuuucagaucucaaaggcucuuuucagagccaccaaaaaaaaaaaaaaaaaaaaaaaaaaaaaaaaaaaaaaaaaaaaaaaaaaaaaaaaaaaaaaaaaaaaaaaaaaaaaaaaaaaaaaaaaaaaaaaaaaaaa

SEQ ID NO: 19060 - RNA, 1679 nt, Artificial Sequence
  BatCoV/HKU9-1 BF_005I__NC_009021.1__nucleocapsid protein (N) mRNA gc
aggagagucccgcagucggcguccagcggcucugcuuguucgugugugugucguugcaggccuuauucaagcuuaccaugagcggccgcaaccggucccgcagcgggacccccuccccgaaggugaccuucaagcaggagagcgacggcuccgacagcgaguccgagcggcgcaacgggaaccggaacggcgcccgccccaagaacaacaacagccggggguccgcccccaagcccgagaagccgaaggcggccccgccccagaacgucagcugguucgcgccccuggugcagacgggcaaggccgagcuccgcuucccccggggcgagggggugcccgucucccagggcguggacagcaccuacgagcacggguacuggcugcgcacccagcgguccuuccagaagggcgggaagcagguccuggccaacccccgcugguacuucuacuacaccggcacgggccgguucggggaccuccgcuucggcaccaagaaccccgacaucguguggguggggcaggagggcgccaacaucaaccggcugggcgacauggggacccgcaacccgagcaacgacggcgccauccccgugcagcuggccgggggcauccccaagggguucuacgccgagggccggggcucccgcgggaacagccgguccagcucccgcaacagcagccgggcguccagccgcggcaacucccgcgccagcucccgcggggccagccccggccggccggccgccaaccccuccaccgagcccuggauggcguaccucguccagaagcuggagcggcuggagagccagguguccgggacgaagcccgccaccaagaacccggugcaggucaccaagaacgaggccgccgccaacgcgaagaagcuccgccacaagcggaccgcccacaagggcagcggcgugacggugaacuacgggcgccggggccccggggaccuggagggcaacuucggggaccgcgagaugaucaagcugggcaccgacgacccccgguucgccgccgccgcgcagauggcccccaacgucuccagcuuccucuucaugucccaccugagcacccgcgacgaggacgacgcccuguggcuccacuacaagggcgccaucaagcugccgaaggacgaccccaacuacgagcaguggaccaagauccuggccgagaaccucaacgcguacaaggacuucccgcccacggagcccaagaaggacaagaagaagaaggaggagaccgcccaggacaccgugaucuucgaggacgccuccaccgggacggaccagaccguggucaaggugugggugaaggaccaggacgcccagaccgacgacgaguggcugggcggggacgagaccgucuacgaggacgaggacgaccggcccaagacgcagcgccggcacaagaagcgcggcagcaccgcgucccgggugaccaucgccgaccccaccaacgccggcgccgagcgcagcugaggacuagucccuguucccagagcccacuuuuuuuucuuuuuuugaaauaaaauagccugucuuucagaucucaaaggcucuuuucagagccaccaaaaaaaaaaaaaaaaaaaaaaaaaaaaaaaaaaaaaaaaaaaaaaaaaaaaaaaaaaaaaaaaaaaaaaaaaaaaaaaaaaaaaaaaaaaaaaaaaaaaa

SEQ ID NO: 19061 - RNA, 1301 nt, Artificial Sequence
  PDCoV/Swine/Thailand/S5011/2015__KU051641.1__nucleocapsid protein (N) mRNA gc
aggagagucccgcagucggcguccagcggcucugcuuguucgugugugugucguugcaggccuuauucaagcuuaccauggccgcccccguggucccgaccaccgacgcgagcugguuccaggugcugaaggcccagaacaagaaggccacgcacccccaguuccgcggcaacggggugccccucaacuccgccaucaagcccgccgagaaccacggcuacuggcugcgguacacccgccagaagcccgggggcacccccaucccgcccagcuacgcguucuacuacaccgggacgggcccgcggggcaaccugaaguacggggagcucccgcccaacgacacccccgccaccacccgcgucacgugggugaagggcuccggggccgacaccagcaucaagccccacguggccaagcggaaccccaacaaccccaagcaccagcugcugccccuccgcuucccgaccggcgacgggcccgcgcagggcuuccgggucgaccccuucaacgcccgcggccggccccaggagcgcggguccggcccgcggagccaguccgugaacccccgcgggaccggcaaccagccccggaagcgcgaccagagcgcccccgccgccgugcggcgcaagacgcagcaccaggcgccgaagcggacccugcccaagggcaagaccaucucccaggucuucgggaaccgcagccggaccggcgccaacgugggguccgccgacacggagaagaccggcauggccgacccccgcaucauggcccuggcgcggcacgugcccgggguccaggagaugcuguucgccggccaccucgagagcaacuuccaggccggcgccaucacccugaccuucuccuacagcaugacggugaaggagggguccccggacuacgagcgccucaaggacgcccugaacaccguggucaaccagaccuacgagccgcccaccaagcccacgaaggacaagaagcccgacaagcaggaccagagcgcgaagcccaagcagcagaagaagcccaagaaggugacccugccggccgacaagcaggacugggagugggacgacgccuucgagaucaagcaggaguccgccgccugaggacuagucccuguucccagagcccacuuuuuuuucuuuuuuugaaauaaaauagccugucuuucagaucucaaaggcucuuuucagagccaccaaaaaaaaaaaaaaaaaaaaaaaaaaaaaaaaaaaaaaaaaaaaaaaaaaaaaaaaaaaaaaaaaaaaaaaaaaaaaaaaaaaaaaaaaaaaaaaaaaaaa

SEQ ID NO: 19062 - RNA, 1598 nt, Artificial Sequence
  PEDV/NPL-PEDv/2013/P10__KJ778616.1__nucleocapsid protein (N) mRNA gc
aggagagucccgcagucggcguccagcggcucugcuuguucgugugugugucguugcaggccuuauucaagcuuaccauggccagcguguccuuccaggaccgcggccggaagcgcgucccccugagccucuacgccccgcugcgggugaccaacgacaagccccuguccaaggugcucgcgaacaacgccguccccaccaacaaggggaacaaggaccagcagaucggcuacuggaacgagcagauccgcuggcggaugcgccgcggggagcggaucgagcagcccagcaacuggcacuucuacuaccugggcacggggccgcacgccgaccugcgguaccgcacccggaccgagggcguguucuggguggccaaggagggcgccaagaccgagcccacgaaccucgggguccgcaaggcguccgagaagcccaucauccccaacuucagccagcagcugccguccgugguggagaucgucgagcccaacaccccgcccaccagccgggccaacucccgcagccggucccgcggcaacgggaacaaccggagccgcucccccagcaacaaccggggcaacaaccagucccgcgggaacagccagaaccggggcaacaaccagggccgcggggccucccagaaccgcggcgggaacaacaacaacaacaacaagagccggaaccaguccaagaaccgcaaccagagcaacgaccggggcggcgugaccagccgcgacgaccugguggccgcggucaaggacgcccucaagucccuggggaucggcgagaaccccgacaagcugaagcagcagcagaagcccaagcaggagcggagcgacuccagcgggaagaacacgcccaagaagaacaagucccgcgccaccagcaaggagcgggaccucaaggacaucccggaguggcgccggauccccaagggcgagaacuccguggccgccugcuucgggccccgcggcggcuucaagaacuucggggacgcggaguucguggagaagggcgucgacgccagcggguacgcccagaucgccucccuggcccccaacguggcggcccuccuguucggcgggaacguggccguccgggagcuggccgacagcuacgagaucaccuacaacuacaagaugaccgugccgaaguccgaccccaacguggagcugcucgucagccagguggacgccuucaagacgggcaacgcgaagccccagcgcaagaaggagaagaagaacaagcgggagaccacccagcagcugaacgaggaggccaucuacgacgacgugggcguccccuccgacgugacccacgccaaccuggagugggacacggccgucgacgggggcgacaccgccguggagaucaucaacgagaucuucgacaccgggaacugaggacuagucccuguucccagagcccacuuuuuuuucuuuuuuugaaauaaaauagccugucuuucagaucucaaaggcucuuuucagagccaccaaaaaaaaaaaaaaaaaaaaaaaaaaaaaaaaaaaaaaaaaaaaaaaaaaaaaaaaaaaaaaaaaaaaaaaaaaaaaaaaaaaaaaaaaaaaaaaaaaaaa

SEQ ID NO: 19063 - RNA, 1637 nt, Artificial Sequence
  MHV/A59__NC_048217.1__nucleocapsid protein (N) mRNA gc
aggagagucccgcagucggcguccagcggcucugcuuguucgugugugugucguugcaggccuuauucaagcuuaccaugagcuucgugcccggccaggagaacgccgggggccgcuccagcuccgucaaccgggccgggaacggcauccugaagaagaccaccugggcggaccagacggagcgcgggccgaacaaccagaaccggggccgccggaaccagcccaagcagaccgccaccacccagcccaacagcggcuccguggugccccacuacagcugguucuccgggaucacgcaguuccagaagggcaaggaguuccaguucgccgaggggcagggcgucccgaucgccaacgggauccccgccagcgagcagaagggcuacugguaccgccacaaccggcgcuccuucaagacccccgacggccagcagaagcagcuccugccccggugguacuucuacuaccuggggaccggcccgcacgcgggggccagcuacggcgacuccaucgagggcguguucuggguggccaacagccaggccgacaccaacacgcgcuccgacaucgucgagcgggaccccagcucccacgaggcgauccccacccgcuucgcccccgggaccgugcucccgcagggcuucuacguggaggggagcggccgguccgcccccgccagccgcuccgggagccggagccagucccgcggccccaacaaccgggcccgcagcuccagcaaccagcggcagcccgcguccaccgucaagccggacauggccgaggagaucgccgcccuggugcuggccaagcucggcaaggacgcggggcagcccaagcaggucacgaagcagagcgccaaggaggugcgccagaagauccugaacaagccccggcagaagcgcacccccaacaagcagugcccggugcagcagugcuucggcaagcgcgggcccaaccagaacuucggcggguccgagaugcugaagcucggcaccagcgacccccaguuccccauccuggccgagcuggccccgaccgugggcgccuucuucuucggguccaagcucgagcuggucaagaagaacagcggcggggcggacgagcccacgaaggacguguacgagcugcaguacuccggcgccgugcgguucgacagcacccuccccggguucgagaccaucaugaagguccugaacgagaaccugaacgccuaccagaaggacggcggcgccgacguggugucccccaagccgcagcgcaaggggcggcgccaggcccaggagaagaaggacgaggucgacaacgugagcguggcgaagcccaaguccagcguccagcggaacgugucccgcgagcucacccccgaggaccggagccugcuggcccagauccucgacgacggcgucgugccggacgggcuggaggacgacuccaacgugugaggacuagucccuguucccagagcccacuuuuuuuucuuuuuuugaaauaaaauagccugucuuucagaucucaaaggcucuuuucagagccaccaaaaaaaaaaaaaaaaaaaaaaaaaaaaaaaaaaaaaaaaaaaaaaaaaaaaaaaaaaaaaaaaaaaaaaaaaaaaaaaaaaaaaaaaaaaaaaaaaaaaa

SEQ ID NO: 19064 - RNA, 1532 nt, Artificial Sequence
  SARS-CoV-2/Wuhan-Hu-1__NC_045512.2/MN908947.2/EPI_ISL_402128__nuc leocapsid protein (N) mRNA gc R9925
aggagagucccgcagucggcguccagcggcucugcuuguucgugugugugucguugcaggccuuauucaagcuuaccaugagcgacaacggcccccagaaccagcgcaacgccccgcggaucaccuucgggggccccuccgacagcaccggguccaaccagaacggcgagcgcagcggggcccgguccaagcagcgccggccccagggccugcccaacaacacggcgagcugguucaccgcccucacccagcacggcaaggaggaccugaaguucccgcgcgggcagggcgugcccaucaacaccaacuccagccccgacgaccagaucggguacuaccggcgcgccacgcggcgcauccggggcggggacggcaagaugaaggaccugagcccccgcugguacuucuacuaccucggcaccgggccggaggccggccugcccuacggggccaacaaggacggcaucaucugggucgcgaccgagggcgcccugaacacccccaaggaccacaucgggacgcggaaccccgccaacaacgccgcgaucgugcuccagcugccgcagggcaccacccugcccaagggguucuacgccgagggcucccgcgggggcucccaggccagcucccggagcuccagccgcucccggaacagcucccgcaacagcacccccggcagcucccgggggacgagccccgcccgcauggccggcaacgggggcgacgcggcccucgcccugcugcuccuggaccggcugaaccagcucgaguccaagaugagcgggaagggccagcagcagcagggccagaccgugaccaagaaguccgccgccgaggcgagcaagaagccgcgccagaagcgcaccgccacgaaggccuacaacgucacccaggccuucgggcggcgcggccccgagcagacccaggggaacuucggcgaccaggagcugauccggcaggggaccgacuacaagcacuggccccagaucgcccaguucgcgcccuccgccagcgccuucuucggcaugucccgcaucggcauggaggugacgccgagcgggaccuggcugaccuacaccggcgccaucaagcucgacgacaaggaccccaacuucaaggaccaggugauccugcugaacaagcacaucgacgccuacaagacguucccgcccaccgagcccaagaaggacaagaagaagaaggcggacgagacccaggcccucccccagcggcagaagaagcagcagaccgucacgcugcugcccgccgccgaccucgacgacuucuccaagcagcugcagcagagcauguccagcgcggacuccacccaggccugaggacuagucccuguucccagagcccacuuuuuuuucuuuuuuugaaauaaaauagccugucuuucagaucucaaaggcucuuuucagagccaccaaaaaaaaaaaaaaaaaaaaaaaaaaaaaaaaaaaaaaaaaaaaaaaaaaaaaaaaaaaaaaaaaaaaaaaaaaaaaaaaaaaaaaaaaaaaaaaaaaaaa

SEQ ID NO: 19065 - RNA, 1532 nt, Artificial Sequence
  SARS-CoV-2__MT919525.1__nucleocapsid protein (N) mRNA gc
aggagagucccgcagucggcguccagcggcucugcuuguucgugugugugucguugcaggccuuauucaagcuuaccaugagcgacaacggcccccagaaccagcgcaacgccccgcggaucaccuucgggggccccuccgacagcaccggguccaaccagaacggcgagcgcagcggggcccgguccaagcagcgccggccccagggccugcccaacaacacggcgagcugguucaccgcccucacccagcacggcaaggaggaccugaaguucccgcgcgggcagggcgugcccaucaacaccaacuccagccccgacgaccagaucggguacuaccggcgcgccacgcggcgcauccggggcggggacggcaagaugaaggaccugagcccccgcugguacuucuacuaccucggcaccgggccggaggccggccugcccuacggggccaacaaggacggcaucaucugggucgcgaccgagggcgcccugaacacccccaaggaccacaucgggacgcggaaccccgccaacaacgccgcgaucgugcuccagcugccgcagggcaccacccugcccaagggguucuacgccgagggcucccgcgggggcucccaggccagcucccggagcuccagccgcucccggaacagcucccgcaacagcacccccggcagcuccaagcggacgagccccgcccgcauggccgggaacggcggggacgcggcccucgcccugcugcuccuggaccggcugaaccagcucgaguccaagaugagcggcaaggggcagcagcagcagggccagaccgugaccaagaaguccgccgccgaggcgagcaagaagccgcgccagaagcgcaccgccacgaaggccuacaacgucacccaggccuucggccggcgcgggcccgagcagacccagggcaacuucggggaccaggagcugauccggcagggcaccgacuacaagcacuggccccagaucgcccaguucgcgcccuccgccagcgccuucuucgggaugucccgcaucggcauggaggugacgccgagcggcaccuggcugaccuacaccggggccaucaagcucgacgacaaggaccccaacuucaaggaccaggugauccugcugaacaagcacaucgacgccuacaagacguucccgcccaccgagcccaagaaggacaagaagaagaaggcggacgagacccaggcccucccccagcggcagaagaagcagcagaccgucacgcugcugcccgccgccgaccucgacgacuucuccaagcagcugcagcagagcauguccagcgcggacuccacccaggccugaggacuagucccuguucccagagcccacuuuuuuuucuuuuuuugaaauaaaauagccugucuuucagaucucaaaggcucuuuucagagccaccaaaaaaaaaaaaaaaaaaaaaaaaaaaaaaaaaaaaaaaaaaaaaaaaaaaaaaaaaaaaaaaaaaaaaaaaaaaaaaaaaaaaaaaaaaaaaaaaaaaaa

SEQ ID NO: 19066 - RNA, 1532 nt, Artificial Sequence
  SARS-CoV-2__MT919768.1__nucleocapsid protein (N) mRNA gc
aggagagucccgcagucggcguccagcggcucugcuuguucgugugugugucguugcaggccuuauucaagcuuaccaugagcgacaacggcccccagaaccagcgcaacgcccugcggaucaccuucgggggcccguccgacagcaccggguccaaccagaacggcgagcgcagcggggcccgguccaagcagcgccggccccagggccuccccaacaacacggcgagcugguucaccgcccugacccagcacggcaaggaggaccugaaguucccccgcgggcagggcgugccgaucaacaccaacuccagccccgacgaccagaucggguacuaccggcgcgccacgcggcgcauccggggcggggacggcaagaugaaggaccucagcccccgcugguacuucuacuaccugggcaccgggcccgaggccggccugccguacggggccaacaaggacggcaucaucugggucgcgaccgagggcgcccucaacacccccaaggaccacaucgggacgcggaaccccgccaacaacgccgcgaucgugcugcagcugccccagggcaccacccucccgaagggguucuacgccgagggcucccgcgggggcucccaggccagcucccggagcuccagccgcucccggaacagcucccgcaacagcacccccggcagcucccgggggacgagccccgcccgcauggccggcaacgggggcgacgcggcccuggcccugcuccugcuggaccggcucaaccagcuggaguccaagaugagcgggaagggccagcagcagcagggccagaccgugaccaagaaguccgccgccgaggcgagcaagaagccccgccagaagcgcaccgccacgaaggccuacaacgucacccaggccuucgggcggcgcggcccggagcagacccaggggaacuucggcgaccaggagcugauccggcaggggaccgacuacaagcacuggccccagaucgcccaguucgcgcccuccgccagcgccuucuucggcaugucccgcaucggcauggaggugacgcccagcgggaccuggcucaccuacaccggcgccaucaagcuggacgacaaggacccgaacuucaaggaccaggugauccugcucaacaagcacaucgacgccuacaagacguucccgcccaccgagcccaagaaggacaagaagaagaaggcggacgagacccaggcccugccccagcggcagaagaagcagcagaccgucacgcugcuccccgccgccgaccuggacgacuucuccaagcagcugcagcagagcauguccagcgcggacuccacccaggccugaggacuagucccuguucccagagcccacuuuuuuuucuuuuuuugaaauaaaauagccugucuuucagaucucaaaggcucuuuucagagccaccaaaaaaaaaaaaaaaaaaaaaaaaaaaaaaaaaaaaaaaaaaaaaaaaaaaaaaaaaaaaaaaaaaaaaaaaaaaaaaaaaaaaaaaaaaaaaaaaaaaaa

SEQ ID NO: 19067 - RNA, 1532 nt, Artificial Sequence
  SARS-CoV-2__MT919770.1__nucleocapsid protein (N) mRNA gc
aggagagucccgcagucggcguccagcggcucugcuuguucgugugugugucguugcaggccuuauucaagcuuaccaugagcgacaacggcccccagaaccagcgcaacgccccgcggaucaccuucgggggccccuccgacagcaccggguccaaccagaacggcgagcgcagcggggcccgguccaagcagcgccggccccagggccugcccaacaacacggcgagcugguucaccgcccucacccagcacggcaaggaggaccugaaguucccgcgcgggcagggcgugcccaucaacaccaacuccagccccgacgaccagaucggguacuaccggcgcgccacgcggcgcauccggggcggggacggcaagaugaaggaccugagcccccgcugguacuucuacuaccucggcaccgggccggaggccggccugcccuacggggccaacaaggacggcaucaucugggucgcgaccgagggcgcccugaacacccccaaggaccacaucgggacgcggaaccccgccaacaacgccgcgaucgugcuccagcugccgcagggcaccacccugcccaagggguucuacgccgagggcucccgcgggggcucccaggccagcucccggagcuccagccgcucccggaacagcucccgcaacagcacccccggcagcuccaagcggacgagccccgcccgcauggccgugaacgggggcgacgcggcccucgcccugcugcuccuggaccggcugaaccagcucgaguccaagaugagcgggaagggccagcagcagcaggggcagaccgucaccaagaaguccgccgccgaggcgagcaagaagccgcgccagaagcgcaccgccacgaaggccuacaacgugacccaggccuucggccggcgcggccccgagcagacccaggggaacuucggcgaccaggagcugauccggcaggggaccgacuacaagcacuggccccagaucgcccaguucgcgcccuccgccagcgccuucuucggcaugucccgcaucgggauggaggugacgccgagcggcaccuggcugaccuacaccggcgccaucaagcucgacgacaaggaccccaacuucaaggaccaggucauccugcugaacaagcacaucgacgccuacaagacguucccgcccaccgagcccaagaaggacaagaagaagaaggcggacgagacccaggcccucccccagcggcagaagaagcagcagaccgugacgcugcugcccgccgccgaccucgacgacuucuccaagcagcugcagcagagcauguccagcgcggacuccacccaggccugaggacuagucccuguucccagagcccacuuuuuuuucuuuuuuugaaauaaaauagccugucuuucagaucucaaaggcucuuuucagagccaccaaaaaaaaaaaaaaaaaaaaaaaaaaaaaaaaaaaaaaaaaaaaaaaaaaaaaaaaaaaaaaaaaaaaaaaaaaaaaaaaaaaaaaaaaaaaaaaaaaaaa

SEQ ID NO: 19068 - RNA, 1511 nt, Artificial Sequence
  SARS-CoV-2__MT919777.1__nucleocapsid protein (N) mRNA gc
aggagagucccgcagucggcguccagcggcucugcuuguucgugugugugucguugcaggccuuauucaagcuuaccaugagcgacaacggcccccagaaccagcgcaacgggccgcggaucaccuucggcgggcccuccgacagcaccggcuccaaccagaacggggagcgcagcggcgcccgguccaagcagcgccggccccagggccugcccaacaacacggccagcugguucaccgcgcucacccagcacgggaaggaggaccugaaguucccgcgcggccagggggugcccaucaacaccaacuccagccccgacgaccagaucggcuacuaccggcgcgccacgcggcgcauccgcgggggcgacggcaagaugaaggaccugagcccccggugguacuucuacuaccucgggaccggcccggaggccgggcugcccuacggcgccaacaaggacggcaucaucugggucgccaccgagggggcgcugaacacccccaaggaccacaucggcacgcggaaccccgccaacaacgccgccaucgugcuccagcugccgcaggggaccacccugcccaagggcuucuacgcggaggggagccgcggcggcucccaggccagcucccggagcuccagccgcucccggaacagcucccgcaacagcacccccgggagcuccaagcggacguacggcggggacgccgcccucgcccugcugcuccuggaccgccugaaccagcucgagagcaagauguccggcaaggggcagcagcagcagggccagaccgugaccaagaaguccgcggccgaggccuccaagaagccccggcagaagcgcaccgccacgaaggccuacaacgucacccaggcguucggccgccgggggccggagcagacccagggcaacuucggggaccaggagcugauccgccagggcaccgacuacaagcacuggccccagaucgcccaguucgcccccagcgccuccgccuucuucgggaugagccggaucggcauggaggugacgcccuccggcaccuggcugaccuacaccggggcgaucaagcucgacgacaaggacccgaacuucaaggaccaggugauccugcugaacaagcacaucgacgccuacaagacguucccgcccaccgagcccaagaaggacaagaagaagaaggccgacgagacccaggcccucccccagcgccagaagaagcagcagaccgucacgcugcugcccgccgcggaccucgacgacuucagcaagcagcugcagcaguccaugagcuccgccgacagcacccaggccugaggacuagucccuguucccagagcccacuuuuuuuucuuuuuuugaaauaaaauagccugucuuucagaucucaaaggcucuuuucagagccaccaaaaaaaaaaaaaaaaaaaaaaaaaaaaaaaaaaaaaaaaaaaaaaaaaaaaaaaaaaaaaaaaaaaaaaaaaaaaaaaaaaaaaaaaaaaaaaaaaaaaa

SEQ ID NO: 19069 - RNA, 1532 nt, Artificial Sequence
  SARS-CoV-2__MT919782.1__nucleocapsid protein (N) mRNA gc
aggagagucccgcagucggcguccagcggcucugcuuguucgugugugugucguugcaggccuuauucaagcuuaccaugagcgacaacggcccccagaaccagcgcaacgccccgcggaucaccuucgggggccccuccgacagcaccggguccaaccagaacggcgagcgcagcggggcccgguccaagcagcgccggccccagggccugcccaacaacacggcgagcugguucaccgcccucacccagcacggcaaggaggaccugaaguucccgcgcgggcagggcgugcccaucaacaccaacuccagccccgacgaccagaucggguacuaccggcgcgccacgcggcgcauccggggcggggacggcaagaugaaggaccugagcccccgcugguacuucuacuaccucggcaccgggccggaggccggccugcccuacggggccaacaaggacggcaucaucugggucgcgaccgagggcgcccugaacacccccaaggaccacaucgggacgcggaaccccgccaacaacgccgcgaucgugcuccagcugccgcagggcaccacccugcccaagggguucuacgccgagggcucccgcgggggcucccaggccagcucccggagcuccagccgcucccggaacagcucccgcaacagcacccccggcagcuccaagcggacgagccccgccaucauggccgggaacggcggggacgcggcccucgcccugcugcuccuggaccgccugaaccagcucgaguccaagaugagcggcaaggggcagcagcagcagggccagaccgugaccaagaaguccgccgccgaggcgagcaagaagccgcggcagaagcgcaccgccacgaaggccuacaacgucacccaggccuucggccgccgggggcccgagcagacccagggcaacuucggggaccaggagcugauccgccagggcaccgacuacaagcacuggccccagaucgcccaguucgcgcccuccgccagcgccuucuucgggaugucccggaucggcauggaggugacgccgagcggcaccuggcugaccuacaccggggccaucaagcucgacgacaaggaccccaacuucaaggaccaggugauccugcugaacaagcacaucgacgccuacaagacguucccgcccaccgagcccaagaaggacaagaagaagaaggcggacgagacccaggcccucccccagcgccagaagaagcagcagaccgucacgcugcugcccgccgccgaccucgacgacuucuccaagcagcugcagcagagcauguccagcgcggacuccacccaggccugaggacuagucccuguucccagagcccacuuuuuuuucuuuuuuugaaauaaaauagccugucuuucagaucucaaaggcucuuuucagagccaccaaaaaaaaaaaaaaaaaaaaaaaaaaaaaaaaaaaaaaaaaaaaaaaaaaaaaaaaaaaaaaaaaaaaaaaaaaaaaaaaaaaaaaaaaaaaaaaaaaaaa

SEQ ID NO: 19070 - RNA, 1532 nt, Artificial Sequence
  SARS-CoV-2__MT919994.1__nucleocapsid protein (N) mRNA gc
aggagagucccgcagucggcguccagcggcucugcuuguucgugugugugucguugcaggccuuauucaagcuuaccaugagcgacaacggcccccagaaccagcgcaacgccacccggaucaccuucgggggcccguccgacagcacgggguccaaccagaacggcgagcgcagcggggcccgguccaagcagcgccggccccagggccugcccaacaacaccgcgagcugguucaccgcccucacccagcacggcaaggaggaccugaaguucccccgcgggcagggcgugccgaucaacacgaacuccagccccgacgaccagaucggguacuaccggcgcgccacccggcgcauccggggcggggacggcaagaugaaggaccugagcccccgcugguacuucuacuaccucggcaccgggcccgaggccggccugccguacggggccaacaaggacggcaucaucugggucgcgaccgagggcgcccugaacacgcccaaggaccacaucgggacccggaaccccgccaacaacgccgcgaucgugcuccagcugccccagggcaccacccugccgaagggguucuacgccgagggcagccgcgggggcauccaggccuccagccgguccagcucccgcagccggaacuccagccgcaacuccacgcccggcagcagccgggggaccucccccgcccgcauggccggcaacgggggcgacgcggcccucgcccugcugcuccuggaccggcugaaccagcucgagagcaagauguccgggaagggccagcagcagcagggccagaccgugaccaagaaguccgccgccgaggcguccaagaagccccgccagaagcgcacggccaccaaggccuacaacgucacccaggccuucgggcggcgcggcccggagcagacccaggggaacuucggcgaccaggagcugauccggcaggggacggacuacaagcacuggccccagaucgcccaguucgcgcccagcgccuccgccuucuucggcaugagccgcaucggcauggaggugacccccuccgggaccuggcugaccuacacgggcgccaucaagcucgacgacaaggacccgaacuucaaggaccaggugauccugcugaacaagcacaucgacgccuacaagaccuucccgcccaccgagcccaagaaggacaagaagaagaaggcggacgagacccaggcccucccccagcggcagaagaagcagcagacggucacccugcugcccgccgccgaccucgacgacuucagcaagcagcugcagcaguccaugagcuccgcggacagcacccaggccugaggacuagucccuguucccagagcccacuuuuuuuucuuuuuuugaaauaaaauagccugucuuucagaucucaaaggcucuuuucagagccaccaaaaaaaaaaaaaaaaaaaaaaaaaaaaaaaaaaaaaaaaaaaaaaaaaaaaaaaaaaaaaaaaaaaaaaaaaaaaaaaaaaaaaaaaaaaaaaaaaaaaa

SEQ ID NO: 19071 - RNA, 1532 nt, Artificial Sequence
  SARS-CoV-2__MT919995.1__nucleocapsid protein (N) mRNA gc
aggagagucccgcagucggcguccagcggcucugcuuguucgugugugugucguugcaggccuuauucaagcuuaccaugagcgacaacggcccccagaaccagcgcaacgccccgcggaucaccuucgggggccccuccgacagcaccggguccaaccagaacggcgagcgcagcggggcccgguccaagcagcgccggccccagggccugcccaacaacacggcgagcugguucaccgcccucacccagcacggcaaggaggaccugaaguucccgcgcgggcagggcgugcccaucaacaccaacuccagccccgacgaccagaucggguacuaccggcgcgccacgcggcgcauccggggcggggacggcaagaugaaggaccugagcccccgcugguacuucuacuaccucggcaccgggccggaggccggccugcccuacggggccaacaaggacggcaucaucugggucgcgaccgagggcgcccugaacacccccaaggaccacaucgggacgcggaaccccgccaacaacgccgcgaucgugcuccagcugccgcagggcaccacccugcccaagggguucuacgccgagggcagccgcgggggcucccaggccagcuuccgguccagcucccgcagccggaacuccagccgcaacuccacccccggcagcagccgggggacgucccccgcccgcauggccggcaacgggggcgacgcggcccucgcccugcugcuccuggaccggcugaaccagcucgagagcaagauguccgggaagggccagcagcagcagggccagaccgugaccaagaaguccgccgccgaggcguccaagaagccgcgccagaagcgcaccgccacgaaggccuacaacgucacccaggccuucgggcggcgcggccccgagcagacccaggggaacuucggcgaccaggagcugauccggcaggggaccgacuacaagcacuggccccagaucgcccaguucgcgcccagcgccuccgccuucuucggcaugagccgcaucggcauggaggugacgccguccgggaccuggcugaccuacaccggcgccaucaagcucgacgacaaggaccccaacuucaaggaccaggugauccugcugaacaagcacaucgacgccuacaagacguucccgcccaccgagcccaagaaggacaagaagaagaaggcggacgagacccaggcccucccccagcggcagaagaagcagcagaccgucacgcugcugcccgccgccgaccucgacgacuucagcaagcagcugcagcaguccaugagcuccgcggacagcacccaggccugaggacuagucccuguucccagagcccacuuuuuuuucuuuuuuugaaauaaaauagccugucuuucagaucucaaaggcucuuuucagagccaccaaaaaaaaaaaaaaaaaaaaaaaaaaaaaaaaaaaaaaaaaaaaaaaaaaaaaaaaaaaaaaaaaaaaaaaaaaaaaaaaaaaaaaaaaaaaaaaaaaaaa

SEQ ID NO: 19072 - RNA, 1532 nt, Artificial Sequence
  SARS-CoV-2__MT920005.1__nucleocapsid protein (N) mRNA gc
aggagagucccgcagucggcguccagcggcucugcuuguucgugugugugucguugcaggccuuauucaagcuuaccaugagcgacaacggcccccagaaccagcgcaacgccccgcggaucaccuucgggggccccuccgacagcaccggguccaaccagaacggcgagcgcagcggggcccgguccaagcagcgccggccccagggccugcccaacaacacggcgagcugguucaccgcccucacccagcacggcaaggaggaccugaaguucccgcgcgggcagggcgugcccaucaacaccaacuccagccccgacgaccagaucggguacuaccggcgcgccacgcggcgcauccggggcggggacggcaagaugaaggaccugagcccccgcugguacuucuacuaccucggcaccgggccggaggccggccugcccuacggggccaacaaggacggcaucaucugggucgcgaccgagggcgcccugaacacccccaaggaccacaucgggacgcggaaccccgccaacaacgccgcgaucgugcuccagcugccgcagggcaccacccugcccaagggguucuacgccgagggcagccgcgggggcauccaggccuccagccgguccagcucccgcagccggaacuccagccgcaacuccacccccggcagcagccgggggacgucccccgcccgcauggccggcaacgggggcgacgcggcccucgcccugcugcuccuggaccggcugaaccagcucgagagcaagauguccgggaagugccagcagcagcagggccagaccgugaccaagaaguccgccgccgaggcguccaagaagccgcgccagaagcgcaccgccacgaaggccuacaacgucacccaggccuucggccggcgcgggcccgagcagacccagggcaacuucggggaccaggagcugauccggcagggcaccgacuacaagcacuggccccagaucgcccaguucgcgcccagcgccuccgccuucuucgggaugagccgcaucggcauggaggugacgccguccggcaccuggcugaccuacaccggggccaucaagcucgacgacaaggaccccaacuucaaggaccaggugauccugcugaacaagcacaucgacgccuacaagacguucccgcccaccgagcccaagaaggacaagaagaagaaggcggacgagacccaggcccucccccagcggcagaagaagcagcagaccgucacgcugcugcccgccgccgaccucgacgacuucagcaagcagcugcagcaguccaugagcuccgcggacagcacccaggccugaggacuagucccuguucccagagcccacuuuuuuuucuuuuuuugaaauaaaauagccugucuuucagaucucaaaggcucuuuucagagccaccaaaaaaaaaaaaaaaaaaaaaaaaaaaaaaaaaaaaaaaaaaaaaaaaaaaaaaaaaaaaaaaaaaaaaaaaaaaaaaaaaaaaaaaaaaaaaaaaaaaaa

SEQ ID NO: 19073 - RNA, 1532 nt, Artificial Sequence
  SARS-CoV-2__MT913038.1__nucleocapsid protein (N) mRNA gc
aggagagucccgcagucggcguccagcggcucugcuuguucgugugugugucguugcaggccuuauucaagcuuaccaugagcgacaacggcccccagaaccagcgcaacgccccgcggaucaccuucgggggccccuccgacagcaccggguccaaccagaacggcgagcgcagcggggcccgguccaagcagcgccggccccagggccugcccaacaacacggcgagcugguucaccgcccucacccagcacggcaaggaggaccugaaguucccgcgcgggcagggcgugcccaucaacaccaacuccagccccgacgaccagaucggguacuaccggcgcgccacgcggcgcauccggggcggggacggcaagaugaaggaccugagcccccgcugguacuucuacuaccucggcaccgggccggaggccggccugcccuacggggccaacaaggacggcaucaucugggucgcgaccgagggcgcccugaacacccccaaggaccacaucgggacgcggaaccccgccaacaacgccgcgaucgugcuccagcugccgcagggcaccacccugcccaagggguucuacgccgagggcagccgcgggggcucccaggccuacagccgguccagcucccgcagccggaacuccagccgcaacuccacccccggcagcagccgggggacgucccccgcccgcauggccggcaacgggggcgacgcggcccucgcccugcugcuccuggaccggcugaaccagcucgagagcaagauguccgggaagggccagcagcagcagggccagaccgugaccaagaaguccgccgccgaggcguccaagaagccgcgccagaagcgcaccgccacgaaggccuacaacgucacccaggccuucgggcggcgcggccccgagcagacccaggggaacuucggcgaccaggagcugauccggcaggggaccgacuacaagcacuggccccagaucgcccaguucgcgcccagcgccuccgccuucuucggcaugagccgcaucggcauggaggugacgccguccgggaccuggcugaccuacaccggcgccaucaagcucgacgacaaggaccccaacuucaaggaccaggugauccugcugaacaagcacaucgacgccuacaagacguucccgcccaccgagcccaagaaggacaagaagaagaaggcggacgagacccaggcccucccccagcggcagaagaagcagcagaccgucacgcugcugcccgccgccgaccucgacgacuucagcaagcagcugcagcaguccaugagcuccgcggacagcacccaggccugaggacuagucccuguucccagagcccacuuuuuuuucuuuuuuugaaauaaaauagccugucuuucagaucucaaaggcucuuuucagagccaccaaaaaaaaaaaaaaaaaaaaaaaaaaaaaaaaaaaaaaaaaaaaaaaaaaaaaaaaaaaaaaaaaaaaaaaaaaaaaaaaaaaaaaaaaaaaaaaaaaaaa

SEQ ID NO: 19074 - RNA, 1532 nt, Artificial Sequence
  SARS-CoV-2__MT913055.1__nucleocapsid protein (N) mRNA gc
aggagagucccgcagucggcguccagcggcucugcuuguucgugugugugucguugcaggccuuauucaagcuuaccaugagcgacaacggcccccagaaccagcgcaacgccccgcggaucaccuucgggggccccuccgacagcaccggguccaaccagaacggcgagcgcagcggggcccgguccaagcagcgccggccccagggccugcccaacaacacggcgagcugguucaccgcccucacccagcacggcaaggaggaccugaaguucccgcgcgggcagggcgugcccaucaacaccaacuccagccccgacgaccagaucggguacuaccggcgcgccacgcggcgcauccggggcggggacggcaagaugaaggaccugagcccccgcugguacuucuacuaccucggcaccgggccggaggccggccugcccuacggggccaacaaggacggcaucaucugggucgcgaccgagggcgcccugaacacccccaaggaccacaucgggacgcggaaccccgccaacaacgccgcgaucgugcuccagcugccgcagggcaccacccugcccaagggguucuacgccgagggcagccgcgggggcucccaggccagcucccggagcuccagccgcucccggaacagcucccgcaacagcacccccggcagcucccgggggacgagccccgcccgcauggccggcaacgggggcgacgcggcccucgcccugcugcuccuggaccggcugaaccagcucgagaucaagauguccgggaagggccagcagcagcagggccagaccgugaccaagaaguccgccgccgaggcguccaagaagccgcgccagaagcgcaccgccacgaaggccuacaacgucacccaggccuucgggcggcgcggccccgagcagacccaggggaacuucggcgaccaggagcugauccggcaggggaccgacuacaagcacuggccccagaucgcccaguucgcgcccagcgccuccgccuucuucggcaugagccgcaucggcauggaggugacgccguccgggaccuggcugaccuacaccggcgccaucaagcucgacgacaaggaccccaacuucaaggaccaggugauccugcugaacaagcacaucgacgccuacaagacguucccgcccaccgagcccaagaaggacaagaagaagaaggcggacgagacccaggcccucccccagcggcagaagaagcagcagaccgucacgcugcugcccgccgccgaccucgacgacuucagcaagcagcugcagcaguccaugagcuccgcggacagcacccaggccugaggacuagucccuguucccagagcccacuuuuuuuucuuuuuuugaaauaaaauagccugucuuucagaucucaaaggcucuuuucagagccaccaaaaaaaaaaaaaaaaaaaaaaaaaaaaaaaaaaaaaaaaaaaaaaaaaaaaaaaaaaaaaaaaaaaaaaaaaaaaaaaaaaaaaaaaaaaaaaaaaaaaa

SEQ ID NO: 19075 - RNA, 1532 nt, Artificial Sequence
  SARS-CoV-2__MT913093.1__nucleocapsid protein (N) mRNA gc
aggagagucccgcagucggcguccagcggcucugcuuguucgugugugugucguugcaggccuuauucaagcuuaccaugagcgacaacggcccccagaaccagcgcaacgccccgcggaucaccuucgggggccccuccgacagcaccggguccaaccagaacggcgagcgcagcggggcccgguccaagcagcgccggccccagggccugcccaacaacacggcgagcugguucaccgcccucacccagcacggcaaggaggaccugaaguucccgcgcgggcagggcgugcccaucaacaccaacuccagccccgacgaccagaucggguacuaccggcgcgccacgcggcgcauccggggcggggacggcaagaugaaggaccugagcccccgcugguacuucuacuaccucggcaccgggccggaggccggccugcccuacggggccaacaaggacggcaucaucugggucgcgaccgagggcgcccugaacacccccaaggaccacaucgggacgcggaaccccgccaacaacgccgcgaucgugcuccagcugccgcagggcaccacccugcccaagggguucuacgccgagggcucccgcgggggcucccaggccagcucccggagcuccagccgcucccggaacagcucccgcaacagcacccccggcagcucccgggggacgagccccggccgcauggccgggaacggcggggacgccgcgcucgcccugcugcuccuggaccggcugaaccagcucgaguccaagaugagcggcaagggccagcagcagcaggggcagaccgugaccaagaaguccgccgccgaggccagcaagaagccgcgccagaagcgcaccgcgacgaaggccuacaacgucacccaggccuucggccggcgcgggcccgagcagacccagggcaacuucggggaccaggagcugauccggcagggcaccgacuacaagcacuggccccagaucgcccaguucgcccccuccgcgagcgccuucuucggcaugucccgcaucgggauggaggugacgccgagcggcaccuggcugaccuacaccggggccaucaagcucgacgacaaggaccccaacuucaaggaccaggugauccugcugaacaagcacaucgacgccuacaagacguucccgcccaccgagcccaagaaggacaagaagaagaaggccgacgagacccaggcgcucccccagcggcagaagaagcagcagaccgucacgcugcugcccgccgccgaccucgacgacuucuccaagcagcugcagcagagcauguccagcgccgacuccacccaggcgugaggacuagucccuguucccagagcccacuuuuuuuucuuuuuuugaaauaaaauagccugucuuucagaucucaaaggcucuuuucagagccaccaaaaaaaaaaaaaaaaaaaaaaaaaaaaaaaaaaaaaaaaaaaaaaaaaaaaaaaaaaaaaaaaaaaaaaaaaaaaaaaaaaaaaaaaaaaaaaaaaaaaa

SEQ ID NO: 19076 - RNA, 1532 nt, Artificial Sequence
  SARS-CoV-2__MT913104.1__nucleocapsid protein (N) mRNA gc
aggagagucccgcagucggcguccagcggcucugcuuguucgugugugugucguugcaggccuuauucaagcuuaccaugagcgacaacggcccccagaaccagcgcaacgccccgcggaucaccuucgggggccccuccgacagcaccggguccaaccagaacggcgagcgcagcggggcccgguccaagcagcgccggccccagggccugcccaacaacacggcgagcugguucaccgcccucacccagcacggcaaggaggaccugaaguucccgcgcgggcagggcgugcccaucaacaccaacuccagccccgacgaccagaucggguacuaccggcgcgccacgcggcgcauccggggcggggacggcaagaugaaggaccugagcccccgcugguacuucuacuaccucggcaccgggccggaggccggccugcccuacggggccaacaaggacggcaucaucugggucgcgaccgagggcgcccugaacacccccaaggaccacaucgggacgcggaaccccgccaacaacgccgcgaucgugcuccagcugccgcagggcaccacccugcccaagggguucuacgccgagggcucccgcgggggcucccaggccagcucccggagcuccagccgcucccggaacagcucccgcaacagcacccccggcagcucccgggggaucagccccgcccgcauggccggcaacgggggcgacgcggcccucgcccugcugcuccuggaccggcugaaccagcucgaguccaagaugagcgggaagggccagcagcagcagggccagacggugaccaagaaguccgccgccgaggcgagcaagaagccgcgccagaagcgcaccgccaccaaggccuacaacgucacgcaggccuucgggcggcgcggccccgagcagacccaggggaacuucggcgaccaggagcugauccggcaggggaccgacuacaagcacuggccccagaucgcccaguucgcgcccuccgccagcgccuucuucggcaugucccgcaucggcauggaggugaccccgagcgggacguggcugaccuacaccggcgccaucaagcucgacgacaaggaccccaacuucaaggaccaggugauccugcugaacaagcacaucgacgccuacaagaccuucccgcccacggagcccaagaaggacaagaagaagaaggcggacgagacccaggcccucccccagcggcagaagaagcagcagaccgucacccugcugcccgccgccgaccucgacgacuucuccaagcagcugcagcagagcauguccagcgcggacuccacgcaggccugaggacuagucccuguucccagagcccacuuuuuuuucuuuuuuugaaauaaaauagccugucuuucagaucucaaaggcucuuuucagagccaccaaaaaaaaaaaaaaaaaaaaaaaaaaaaaaaaaaaaaaaaaaaaaaaaaaaaaaaaaaaaaaaaaaaaaaaaaaaaaaaaaaaaaaaaaaaaaaaaaaaaa

SEQ ID NO: 19077 - RNA, 1532 nt, Artificial Sequence
  SARS-CoV-2__MT913111.1__nucleocapsid protein (N) mRNA gc
aggagagucccgcagucggcguccagcggcucugcuuguucgugugugugucguugcaggccuuauucaagcuuaccaugagcgacaacggcccccagaaccagcgcaacgccccgcggaucaccuucgggggccccuccgacagcaccggguccaaccagaacggcgagcgcagcggggcccgguccaagcagcgccggccccagggccugcccaacaacacggcgagcugguucaccgcccucacccagcacggcaaggaggaccugaaguucccgcgcgggcagggcgugcccaucaacaccaacuccagccccgacgaccagaucggguacuaccggcgcgccacgcggcgcauccggggcggggacggcaagaugaaggaccugagcccccgcugguacuucuacuaccucggcaccgggccggaggccggccugcccuacggggccaacaaggacggcaucaucugggucgcgaccgagggcgcccugaacacccccaaggaccacaucgggacgcggaaccccgccaacaacgccgcgaucgugcuccagcugccgcagggcaccacccugcccaagggguucuacgccgagggcagccgcgggggcucccaggccagcucccggagcucccuccgcagccggaacuccagccgcaacuccacccccggcagcagccgggggacgucccccgcccgcauggccggcaacgggggcgacgcggcccuggcccugcuccugcuggaccggcucaaccagcuggagagcaagauguccgggaagggccagcagcagcagggccagaccgugaccaagaaguccgccgccgaggcguccaagaagccgcgccagaagcgcaccgccacgaaggccuacaacgucacccaggccuucgggcggcgcggccccgagcagacccaggggaacuucggcgaccaggagcugauccggcaggggaccgacuacaagcacuggccccagaucgcccaguucgcgcccagcgccuccgccuucuucggcaugagccgcaucggcauggaggugacgccguccgggaccuggcucaccuacaccggcgccaucaagcuggacgacaaggaccccaacuucaaggaccaggugauccugcucaacaagcacaucgacgccuacaagacguucccgcccaccgagcccaagaaggacaagaagaagaaggcggacgagacccaggcccugccccagcggcagaagaagcagcagaccgucacgcugcuccccgccgccgaccuggacgacuucagcaagcagcugcagcaguccaugagcuccgcggacagcacccaggccugaggacuagucccuguucccagagcccacuuuuuuuucuuuuuuugaaauaaaauagccugucuuucagaucucaaaggcucuuuucagagccaccaaaaaaaaaaaaaaaaaaaaaaaaaaaaaaaaaaaaaaaaaaaaaaaaaaaaaaaaaaaaaaaaaaaaaaaaaaaaaaaaaaaaaaaaaaaaaaaaaaaaa

SEQ ID NO: 19078 - RNA, 1532 nt, Artificial Sequence
  SARS-CoV-2__MT913112.1__nucleocapsid protein (N) mRNA gc
aggagagucccgcagucggcguccagcggcucugcuuguucgugugugugucguugcaggccuuauucaagcuuaccaugagcgacaacggcccccagaaccagcgcaacgccccgcggaucaccuucgggggccccuccgacagcaccggguccaaccagaacggcgagcgcagcggggcccgguccaagcagcgccggccccagggccugcccaacaacacggcgagcugguucaccgcccucacccagcacggcaaggaggaccugaaguucccgcgcgggcagggcgugcccaucaacaccaacuccagccccgacgaccagaucggguacuaccggcgcgccacgcggcgcauccggggcggggacggcaagaugaaggaccugagcccccgcugguacuucuacuaccucggcaccgggccggaggccggccugcccuacggggccaacaaggacggcaucaucugggucgcgaccgagggcgcccugaacacccccaaggaccacaucgggacgcggaaccccgccaacaacgccgcgaucgugcuccagcugccgcagggcaccacccugcccaagggguucuacgccgagggcucccgcgggggcucccaggccagcucccggagcuccagccgcucccggaacagcucccgcaacagcacccccggcagcucccgggggacgagccccgcccgcauggccggcaacgggggcgacgcggcccucgcccugcugcuccuggaccggcugaaccagcucgaguccaagaugagcgggaagggccagcagcagcagggccagaccgugaccaagaaguccgccgccgaggcgagcaagaagccgcgccagaagcgcaccgccacgaaggccuacaacgucacccaggccuucgggcggcgcggccccgagcagacccaggggaacuucggcgaccaggagcugauccggcaggggaccgacuacaagcacuggccccagaucgcccaguucgcgcccuccgccagcgccuucuucggcaugucccgcaucggcauggaggugaucccgagcgggacguggcugaccuacaccggcgccaucaagcucgacgacaaggaccccaacuucaaggaccaggugauccugcugaacaagcacaucgacgccuacaagaccuucccgcccacggagcccaagaaggacaagaagaagaaggcggacgagacccaggcccucccccagcggcagaagaagcagcagaccgucacccugcugcccgccgccgaccucgacgacuucuccaagcagcugcagcagagcauguccagcgcggacuccacgcaggccugaggacuagucccuguucccagagcccacuuuuuuuucuuuuuuugaaauaaaauagccugucuuucagaucucaaaggcucuuuucagagccaccaaaaaaaaaaaaaaaaaaaaaaaaaaaaaaaaaaaaaaaaaaaaaaaaaaaaaaaaaaaaaaaaaaaaaaaaaaaaaaaaaaaaaaaaaaaaaaaaaaaaa

SEQ ID NO: 19079 - RNA, 1532 nt, Artificial Sequence
  SARS-CoV-2__MT913116.1__nucleocapsid protein (N) mRNA gc
aggagagucccgcagucggcguccagcggcucugcuuguucgugugugugucguugcaggccuuauucaagcuuaccaugagcgacaacggcccccagaaccagcgcaacgccccgcggaucaccuucgggggccccuccgacagcaccggguccaaccagaacggcgagcgcagcggggcccgguccaagcagcgccggccccagggccugcccaacaacacggcgagcugguucaccgcccucacccagcacggcaaggaggaccugaaguucccgcgcgggcagggcgugcccaucaacaccaacuccagccccgacgaccagaucggguacuaccggcgcgccacgcggcgcauccggggcggggacggcaagaugaaggaccugagcccccgcugguacuucuacuaccucggcaccgggccggaggccggccugcccuacggggccaacaaggacggcaucaucugggucgcgaccgagggcgcccugaacacccccaaggaccacaucgggacgcggaaccccgccaacaacgccgcgaucgugcuccagcugccgcagggcaccacccugcccaagggguucuacgccgagggcucccgcgggggcucccaggccagcucccggagcuccagccgcucccggaacagcucccgcaacagcacccccggcagcucccgggggacgagccccgcccgcauggccggcaacgggggcgacgcggcccucgcccugcugcuccuggaccggcugaaccagcucgaguccaagaugagcgggaagggccagcagcagcagggccagaccgugaccaagaagccggccgccgaggcguccaagaagccccgccagaagcgcaccgccacgaaggccuacaacgucacccaggccuucgggcggcgcggccccgagcagacccaggggaacuucggcgaccaggagcugauccggcaggggaccgacuacaagcacuggccccagaucgcccaguucgcgccgagcgccuccgccuucuucggcaugagccgcaucggcauggaggugacgcccuccgggaccuggcugaccuacaccggcgccaucaagcucgacgacaaggaccccaacuucaaggaccaggugauccugcugaacaagcacaucgacgccuacaagacguucccgcccaccgagcccaagaaggacaagaagaagaaggcggacgagacccaggcccucccccagcggcagaagaagcagcagaccgucacgcugcugcccgccgccgaccucgacgacuucagcaagcagcugcagcaguccaugagcuccgcggacagcacccaggccugaggacuagucccuguucccagagcccacuuuuuuuucuuuuuuugaaauaaaauagccugucuuucagaucucaaaggcucuuuucagagccaccaaaaaaaaaaaaaaaaaaaaaaaaaaaaaaaaaaaaaaaaaaaaaaaaaaaaaaaaaaaaaaaaaaaaaaaaaaaaaaaaaaaaaaaaaaaaaaaaaaaaa

SEQ ID NO: 19080 - RNA, 1532 nt, Artificial Sequence
  SARS-CoV-2__MT913134.1__nucleocapsid protein (N) mRNA gc
aggagagucccgcagucggcguccagcggcucugcuuguucgugugugugucguugcaggccuuauucaagcuuaccaugagcgacaacggcccccagaaccagcgcaacgccccgcggaucaccuucgggggccccuccgacagcaccggguccaaccagaacggcgagcgcagcggggcccgguccaagcagcgccggccccagggccugcccaacaacacggcgagcugguucaccgcccucacccagcacggcaaggaggaccugaaguucccgcgcgggcagggcgugcccaucaacaccaacuccagccccgacgaccagaucggguacuaccggcgcgccacgcggcgcauccggggcggggacggcaagaugaaggaccugagcccccgcugguacuucuacuaccucggcaccgggccggaggccggccugcccuacggggccaacaaggacggcaucaucugggucgcgaccgagggcgcccugaacacccccaaggaccacaucgggacgcggaaccccgccaacaacgccgcgaucgugcuccagcugccgcagggcaccacccugcccaagggguucuacgccgagggcagccgcgggggcucccaggccagcucccggagcuccagccgcucccggaacagcucccgcaacagcaccagcggcuccagccgggggacgucccccgcccgcauggccggcaacgggggcgacgcggcccucgcccugcugcuccuggaccggcugaaccagcucgagagcaagauguccgggaagggccagcagcagcagggccagaccgugaccaagaaguccgccgccgaggcguccaagaagccccgccagaagcgcaccgccacgaaggccuacaacgucacccaggccuucgggcggcgcggcccggagcagacccaggggaacuucggcgaccaggagcugauccggcaggggaccgacuacaagcacuggccccagaucgcccaguucgcgcccagcgccuccgccuucuucggcaugagccgcaucggcauggaggugacgcccuccgggaccuggcugaccuacaccggcgccaucaagcucgacgacaaggacccgaacuucaaggaccaggugauccugcugaacaagcacaucgacgccuacaagacguucccgcccaccgagcccaagaaggacaagaagaagaaggcggacgagacccaggcccucccccagcggcagaagaagcagcagaccgucacgcugcugcccgccgccgaccucgacgacuucagcaagcagcugcagcaguccaugagcuccgcggacagcacccaggccugaggacuagucccuguucccagagcccacuuuuuuuucuuuuuuugaaauaaaauagccugucuuucagaucucaaaggcucuuuucagagccaccaaaaaaaaaaaaaaaaaaaaaaaaaaaaaaaaaaaaaaaaaaaaaaaaaaaaaaaaaaaaaaaaaaaaaaaaaaaaaaaaaaaaaaaaaaaaaaaaaaaaa

SEQ ID NO: 19081 - RNA, 1532 nt, Artificial Sequence
  SARS-CoV-2__MT913151.1__nucleocapsid protein (N) mRNA gc
aggagagucccgcagucggcguccagcggcucugcuuguucgugugugugucguugcaggccuuauucaagcuuaccaugagcgacaacggcccccagaaccagcgcaacgccccgcggaucaccuucgggggccccuccgacagcaccggguccaaccagaacggcgagcgcagcggggcccgguccaagcagcgccggccccagggccugcccaacaacacggcgagcugguucaccgcccucacccagcacggcaaggaggaccugaaguucccgcgcgggcagggcgugcccaucaacaccaacuccagccccgacgaccagaucggguacuaccggcgcgccacgcggcgcauccggggcggggacggcaagaugaaggaccugagcccccgcugguacuucuacuaccucggcaccgggccggaggccggccugcccuacggggccaacaaggacggcaucaucugggucgcgaccgagggcgcccugaacacccccaaggaccacaucgggacgcggaaccccgccaacaacgccgcgaucgugcuccagcugccgcagggcaccacccugcccaagggguucuacgccgagggcagccgcgggggcucccaggccagcucccggagcuccagccgcucccggaacaucagccgcaacuccacccccggcagcagccgggggacgucccccgcccgcauggccggcaacgggggcgacgcggcccucgcccugcugcuccuggaccggcugaaccagcucgagagcaagauguccgggaagggccagcagcagcagggccagaccgugaccaagaaguccgccgccgaggcguccaagaagccgcgccagaagcgcaccgccacgaaggccuacaacgucacccaggccuucgggcggcgcggccccgagcagacccaggggaacuucggcgaccaggagcugauccggcaggggaccgacuacaagcacuggccccagaucgcccaguucgcgcccagcgccuccgccuucuucggcaugagccgcaucggcauggaggugacgccguccgggaccuggcugaccuacaccggcgccaucaagcucgacgacaaggaccccaacuucaaggaccaggugauccugcugaacaagcacaucgacgccuacaagacguucccgcccaccgagcccaagaaggacaagaagaagaaggcggacgagacccaggcccucccccagcggcagaagaagcagcagaccgucacgcugcugcccgccgccgaccucgacgacuucagcaagcagcugcagcaguccaugagcuccgcggacagcacccaggccugaggacuagucccuguucccagagcccacuuuuuuuucuuuuuuugaaauaaaauagccugucuuucagaucucaaaggcucuuuucagagccaccaaaaaaaaaaaaaaaaaaaaaaaaaaaaaaaaaaaaaaaaaaaaaaaaaaaaaaaaaaaaaaaaaaaaaaaaaaaaaaaaaaaaaaaaaaaaaaaaaaaaa

SEQ ID NO: 19082 - RNA, 1532 nt, Artificial Sequence
  SARS-CoV-2__MT907515.1__nucleocapsid protein (N) mRNA gc
aggagagucccgcagucggcguccagcggcucugcuuguucgugugugugucguugcaggccuuauucaagcuuaccaugagcgacaacggcccccagaaccagcgcaacgccccgcggaucaccuucgggggccccuccgacagcaccggguccaaccagaacggcgagcgcagcggggcccgguccaagcagcgccggccccagggccugcccaacaacacggcgagcugguucaccgcccucacccagcacggcaaggaggaccugaaguucccgcgcgggcagggcgugcccaucaacaccaacuccagccccgacgaccagaucggguacuaccggcgcgccacgcggcgcauccggggcggggacggcaagaugaaggaccugagcccccgcugguacuucuacuaccucggcaccgggccggaggccggccugcccuacggggccaacaaggacggcaucaucugggucgcgaccgagggcgcccugaacacccccaaggaccacaucgggacgcggaaccccgccaacaacgccgcgaucgugcuccagcugccgcagggcaccacccugcccaagggguucuacgccgagggcagccgcgggggcucccaggccagcucccggagcuccagccgcucccggaacagcucccgcaaccucacccccggcagcagccgggggacgucccccgcccgcauggccggcaacgggggcgacgcggcccuggcccugcuccugcuggaccggcucaaccagcuggagagcaagauguccgggaagggccagcagcagcagggccagaccgugaccaagaaguccgccgccgaggcguccaagaagccgcgccagaagcgcaccgccacgaaggccuacaacgucacccaggccuucgggcggcgcggccccgagcagacccaggggaacuucggcgaccaggagcugauccggcaggggaccgacuacaagcacuggccccagaucgcccaguucgcgcccagcgccuccgccuucuucggcaugagccgcaucggcauggaggugacgccguccgggaccuggcucaccuacaccggcgccaucaagcuggacgacaaggaccccaacuucaaggaccaggugauccugcucaacaagcacaucgacgccuacaagacguucccgcccaccgagcccaagaaggacaagaagaagaaggcggacgagacccaggcccugccccagcggcagaagaagcagcagaccgucacgcugcuccccgccgccgaccuggacgacuucagcaagcagcugcagcaguccaugagcuccgcggacagcacccaggccugaggacuagucccuguucccagagcccacuuuuuuuucuuuuuuugaaauaaaauagccugucuuucagaucucaaaggcucuuuucagagccaccaaaaaaaaaaaaaaaaaaaaaaaaaaaaaaaaaaaaaaaaaaaaaaaaaaaaaaaaaaaaaaaaaaaaaaaaaaaaaaaaaaaaaaaaaaaaaaaaaaaaa

SEQ ID NO: 19083 - RNA, 1532 nt, Artificial Sequence
  SARS-CoV-2__MT907519.1__nucleocapsid protein (N) mRNA gc
aggagagucccgcagucggcguccagcggcucugcuuguucgugugugugucguugcaggccuuauucaagcuuaccaugagcgacaacggcccccagaaccagcgcaacgccccgcggaucaccuucgggggccccuccgacagcaccggguccaaccagaacggcgagcgcagcggggcccgguccaagcagcgccggccccagggccugcccaacaacacggcgagcugguucaccgcccucacccagcacggcaaggaggaccugaaguucccgcgcgggcagggcgugcccaucaacaccaacuccagccccgacgaccagaucggguacuaccggcgcgccacgcggcgcauccggggcggggacggcaagaugaaggaccugagcccccgcugguacuucuacuaccucggcaccgggccggaggccggccugcccuacggggccaacaaggacggcaucaucugggucgcgaccgagggcgcccugaacacccccaaggaccacaucgggacgcggaaccccgccaacaacgccgcgaucgugcuccagcugccgcagggcaccacccugcccaagggguucuacgccgagggcucccgcgggggcucccaggccagcucccggagcuccagccgcucccggaacagcucccgcaacagcacccccggcagcucccgggggacgagccccgcccgcauggccggcaacgggggcgacgcggcccucgcccugcugcuccuggaccggcugaaccagcucgaguccaagaugagcgggaagggccagcagcagcagggccagaccgugaccaagaaguccgccgccgaggcgagcaagaagccgcgccagaagcgcaccgccacgaaggccuacaacgucacccaggccuucgggcggcgcggccccgagcagacccaggggaacuucggcgaccaggagcugauccggcaggggaccgacuacaagcacuggccccagaucgcccaguucgcgcccuccgccagcuccuucuucggcaugagccgcaucggcauggaggugacgccguccgggaccuggcugaccuacaccggcgccaucaagcucgacgacaaggaccccaacuucaaggaccaggugauccugcugaacaagcacaucgacgccuacaagacguucccgcccaccgagcccaagaaggacaagaagaagaaggccgacgagacccaggcgcucccccagcggcagaagaagcagcagaccgucacgcugcugcccgccgccgaccucgacgacuucagcaagcagcugcagcaguccaugagcuccgccgacagcacccaggcgugaggacuagucccuguucccagagcccacuuuuuuuucuuuuuuugaaauaaaauagccugucuuucagaucucaaaggcucuuuucagagccaccaaaaaaaaaaaaaaaaaaaaaaaaaaaaaaaaaaaaaaaaaaaaaaaaaaaaaaaaaaaaaaaaaaaaaaaaaaaaaaaaaaaaaaaaaaaaaaaaaaaaa

SEQ ID NO: 19084 - RNA, 1532 nt, Artificial Sequence
  SARS-CoV-2__MT911799.1__nucleocapsid protein (N) mRNA gc
aggagagucccgcagucggcguccagcggcucugcuuguucgugugugugucguugcaggccuuauucaagcuuaccaugagcgacaacggcccccagaaccagcgcaacgccccgcggaucaccuucgggggccccuccgacagcaccggguccaaccagaacggcgagcgcagcggggcccgguccaagcagcgccggccccagggccugcccaacaacacggcgagcugguucaccgcccucacccagcacggcaaggaggaccugaaguucccgcgcgggcagggcgugcccaucaacaccaacuccagccccgacgaccagaucggguacuaccggcgcgccacgcggcgcauccggggcggggacggcaagaugaaggaccugagcccccgcugguacuucuacuaccucggcaccgggccggaggccggccugcccuacggggccaacaaggacggcaucaucugggucgcgaccgagggcgcccugaacacccccaaggaccacaucgggacgcggaaccccgccaacaacgccgcgaucgugcuccagcugccgcagggcaccacccugcccaagggguucuacgccgagggcucccgcgggggcucccaggccagcucccggagcuccagccgcucccggaacagcucccgcaacagcacccccggcagcucccgggggacgagccccgcccgcauggccggcaacgggggcgacgcggcccucgcccugcugcuccuggaccggcugaaccagcucgaguccaagaugagcgggaagugccagcagcagcagggccagaccgugaccaagaaguccgccgccgaggcgagcaagaagccgcgccagaagcgcaccgccacgaaggccuacaacgucacccaggccuucggccggcgcgggcccgagcagacccagggcaacuucggggaccaggagcugauccggcagggcaccgacuacaagcacuggccccagaucgcccaguucgcgcccuccgccagcgccuucuucgggaugucccgcaucggcauggaggugacgccgagcggcaccuggcugaccuacaccggggccaucaagcucgacgacaaggaccccaacuucaaggaccaggugauccugcugaacaagcacaucgacgccuacaagacguucccgcccaccgagcccaagaaggacaagaagaagaaggcggacgagacccaggcccucccccagcggcagaagaagcagcagaccgucacgcugcugcccgccgccgaccucgacgacuucuccaagcagcugcagcagagcauguccagcgcggacuccacccaggccugaggacuagucccuguucccagagcccacuuuuuuuucuuuuuuugaaauaaaauagccugucuuucagaucucaaaggcucuuuucagagccaccaaaaaaaaaaaaaaaaaaaaaaaaaaaaaaaaaaaaaaaaaaaaaaaaaaaaaaaaaaaaaaaaaaaaaaaaaaaaaaaaaaaaaaaaaaaaaaaaaaaaa

SEQ ID NO: 19085 - RNA, 1532 nt, Artificial Sequence
  SARS-CoV-2__MT911819.1__nucleocapsid protein (N) mRNA gc
aggagagucccgcagucggcguccagcggcucugcuuguucgugugugugucguugcaggccuuauucaagcuuaccaugagcgacaacggcccccagaaccagcgcaacgccccgcggaucaccuucgggggccccuccgacagcaccggguccaaccaguacggcgagcgcagcggggcccgguccaagcagcgccggccccagggccugcccaacaacacggcgagcugguucaccgcccucacccagcacggcaaggaggaccugaaguucccgcgcgggcagggcgugcccaucaacaccaacuccagccccgacgaccagaucggguacuaccggcgcgccacgcggcgcauccggggcggggacggcaagaugaaggaccugagcccccgcugguacuucuacuaccucggcaccgggccggaggccggccugcccuacggggccaacaaggacggcaucaucugggucgcgaccgagggcgcccugaacacccccaaggaccacaucgggacgcggaaccccgccaacaacgccgcgaucgugcuccagcugccgcagggcaccacccugcccaagggguucuacgccgagggcagccgcgggggcucccaggccuacagccgguccagcucccgcagccggaacuccagccgcaacuccacccccggcagcagccgggggacgucccccgcccgcauggccggcaacgggggcgacgcggcccucgcccugcugcuccuggaccggcugaaccagcucgagagcaagauguccgggaagggccagcagcagcagggccagaccgugaccaagaaguccgccgccgaggcguccaagaagccgcgccagaagcgcaccgccacgaaggccuacaacgucacccaggccuucgggcggcgcggccccgagcagacccaggggaacuucggcgaccaggagcugauccggcaggggaccgacuacaagcacuggccccagaucgcccaguucgcgcccagcgccuccgccuucuucggcaugagccgcaucggcauggaggugacgccguccgggaccuggcugaccuacaccggcgccaucaagcucgacgacaaggaccccaacuucaaggaccaggugauccugcugaacaagcacaucgacgccuacaagacguucccgcccaccgagcccaagaaggacaagaagaagaaggcggacgagacccaggcccucccccagcggcagaagaagcagcagaccgucacgcugcugcccgccgccgaccucgacgacuucagcaagcagcugcagcaguccaugagcuccgcggacagcacccaggccugaggacuagucccuguucccagagcccacuuuuuuuucuuuuuuugaaauaaaauagccugucuuucagaucucaaaggcucuuuucagagccaccaaaaaaaaaaaaaaaaaaaaaaaaaaaaaaaaaaaaaaaaaaaaaaaaaaaaaaaaaaaaaaaaaaaaaaaaaaaaaaaaaaaaaaaaaaaaaaaaaaaaa

SEQ ID NO: 19086 - RNA, 1532 nt, Artificial Sequence
  SARS-CoV-2__MT911820.1__nucleocapsid protein (N) mRNA gc
aggagagucccgcagucggcguccagcggcucugcuuguucgugugugugucguugcaggccuuauucaagcuuaccaugagcgacaacggcccccagaaccagcgcaacgccccgcggaucaccuucgggggccccuccgacagcaccggguccaaccagaacggcgagcgcagcggggcccgguccaagcagcgccggccccagggccugcccaacaacacggcgagcugguucaccgcccucacccagcacggcaaggaggaccugaaguucccgcgcgggcagggcgugcccaucaacaccaacuccagccccgacgaccagaucggguacuaccggcgcgccacgcggcgcauccggggcggggacggcaagaugaaggaccugagcccccgcugguacuucuacuaccucggcaccgggccggaggccggccugcccuacggggccaacaaggacggcaucaucugggucgcgaccgagggcgcccugaacacccccaaggaccacaucgggacgcggaaccccgccaacaacgccgcgaucgugcuccagcugccgcagggcaccacccugcccaagggguucuacgccgagggcucccgcgggggcucccaggccagcucccggagcuccagccgcucccggaacagcucccgcaacagcacccccggcagcucccgggggacgagccccgcccgcauggccggcaacgggggcgacgcggcccucgcccugcugcuccuggaccggcugaaccagcucgaguccaagaugagcgggaagggccagcagcagcagggccagaccgugaccaagaaguccgccgccgaggcgagcaagaagccgcgccagaagcgcaccgccacgaaggccuacaacgucacccaggccuucgggcggcgcggccccgagcagacccaggggaacuucggcgaccaggagcugauccggcaggggaccgacuacaagcacuggccccagaucgcccaguucucccccagcgcguccgccuucuucggcaugagccgcaucggcauggaggugacgccguccgggaccuggcugaccuacaccggcgccaucaagcucgacgacaaggaccccaacuucaaggaccaggugauccugcugaacaagcacaucgacgccuacaagacguucccgcccaccgagcccaagaaggacaagaagaagaaggccgacgagacccaggcgcucccccagcggcagaagaagcagcagaccgucacgcugcugcccgccgccgaccucgacgacuucagcaagcagcugcagcaguccaugagcuccgccgacagcacccaggcgugaggacuagucccuguucccagagcccacuuuuuuuucuuuuuuugaaauaaaauagccugucuuucagaucucaaaggcucuuuucagagccaccaaaaaaaaaaaaaaaaaaaaaaaaaaaaaaaaaaaaaaaaaaaaaaaaaaaaaaaaaaaaaaaaaaaaaaaaaaaaaaaaaaaaaaaaaaaaaaaaaaaaa

SEQ ID NO: 19087 - RNA, 1532 nt, Artificial Sequence
  SARS-CoV-2__MT911827.1__nucleocapsid protein (N) mRNA gc
aggagagucccgcagucggcguccagcggcucugcuuguucgugugugugucguugcaggccuuauucaagcuuaccaugagcgacaacggcccccagaaccagcgcaacgccccgcggaucaccuucgggggccccuccgacagcaccggguccaaccagaacggcgagcgcagcggggcccgguccaagcagcgccggccccagggccugcccaacaacacggcgagcugguucaccgcccucacccagcacggcaaggaggaccugaaguucccgcgcgggcagggcgugcccaucaacaccaacuccagccccgacgaccagaucggguacuaccggcgcgccacgcggcgcauccggggcggggacggcaagaugaaggaccugagcccccgcugguacuucuacuaccucggcaccgggccggaggccggccugcccuacggggccaacaaggacggcaucaucugggucgcgaccgagggcgcccugaacacccccaaggaccacaucgggacgcggaaccccgccaacaacgccgcgaucgugcuccagcugccgcagggcaccacccugcccaagggguucuacgccgagggcagccgcgggggcucccaggccuacagccgguccagcucccgcagccggaacuccagccgcaacuccacccccggcagcagccgggggacgucccccgcccgcauggccggcaacgggggcgacgcggcccucgcccugcugcuccuggaccggcugaaccagcucgagagcaagauguccgggaagggccagcagcagcagggccagaccgugaccaagaaguccgccgccgaggcguccaagaagccgcgccagaagcgcaccgccacgaaggccuacaacgucacccaggccuucgggcggcgcggccccgagcagacccaggggaacuucggcgaccaggagcugauccggcaggggaccgacuacaagcacuggccccagaucgcccaguucgcgcccagcgccuccgccuucuucggcaugagccgcaucggcauggaggugacgccguccgggaccuggcugaccuacaccggcgccaucaagcucgacgacaaggaccccaacuucaaggaccaggugauccugcugaacaagcacaucgacagcuacaagacguucccgcccaccgagcccaagaaggacaagaagaagaaggccgacgagacccaggcgcucccccagcggcagaagaagcagcagaccgucacgcugcugcccgccgccgaccucgacgacuucuccaagcagcugcagcagagcauguccagcgccgacuccacccaggcgugaggacuagucccuguucccagagcccacuuuuuuuucuuuuuuugaaauaaaauagccugucuuucagaucucaaaggcucuuuucagagccaccaaaaaaaaaaaaaaaaaaaaaaaaaaaaaaaaaaaaaaaaaaaaaaaaaaaaaaaaaaaaaaaaaaaaaaaaaaaaaaaaaaaaaaaaaaaaaaaaaaaaa

SEQ ID NO: 19088 - RNA, 1532 nt, Artificial Sequence
  SARS-CoV-2__MT893671.1__nucleocapsid protein (N) mRNA gc
aggagagucccgcagucggcguccagcggcucugcuuguucgugugugugucguugcaggccuuauucaagcuuaccaugagcgacaacggcccccagaaccagcgcaacgccccgcggaucaccuucgggggccccuccgacagcaccggguccaaccagaacggcgagcgcagcggggcccgguccaagcagcgccggccccagggccugcccaacaacacggcgagcugguucaccgcccucacccagcacggcaaggaggaccugaaguucccgcgcgggcagggcgugcccaucaacaccaacuccagccccgacgaccagaucggguacuaccggcgcgccacgcggcgcauccggggcggggacggcaagaugaaggaccugagcccccgcugguacuucuacuaccucggcaccgggccggaggccggccugcccuacggggccaacaaggacggcaucaucugggucgcgaccgagggcgcccugaacacccccaaggaccacaucgggacgcggaaccccgccaacaacgccgcgaucgugcuccagcugccgcagggcaccacccugcccaagggguucuacgccgagggcucccgcgggggcucccaggccagcucccggagcuccagccgcucccggaacagcucccgcaacagcacccccggcagcucccgggggacgagccccgcccgcauggccggcaacgggggcgacgcggcccucgcccugcugcuccuggaccggcugaaccagcucgaguccaagaugagcgggaagggccagcagcagcagggccagaccgugaacaagaaguccgccgccgaggcgagcaagaagccgcgccagaagcgcaccgccaccaaggccuacaacgucacgcaggccuucgggcggcgcggccccgagcagacccaggggaacuucggcgaccaggagcugauccggcaggggaccgacuacaagcacuggccccagaucgcccaguucgcgcccuccgccagcgccuucuucggcaugucccgcaucggcauggaggugaccccgagcgggacguggcugaccuacaccggcgccaucaagcucgacgacaaggaccccaacuucaaggaccaggugauccugcugaacaagcacaucgacgccuacaagaccuucccgcccacggagcccaagaaggacaagaagaagaaggcggacgagacccaggcccucccccagcggcagaagaagcagcagaccgucacccugcugcccgccgccgaccucgacgacuucuccaagcagcugcagcagagcauguccagcgcggacuccacgcaggccugaggacuagucccuguucccagagcccacuuuuuuuucuuuuuuugaaauaaaauagccugucuuucagaucucaaaggcucuuuucagagccaccaaaaaaaaaaaaaaaaaaaaaaaaaaaaaaaaaaaaaaaaaaaaaaaaaaaaaaaaaaaaaaaaaaaaaaaaaaaaaaaaaaaaaaaaaaaaaaaaaaaaa

SEQ ID NO: 19089 - RNA, 1532 nt, Artificial Sequence
  SARS-CoV-2__MT893675.1__nucleocapsid protein (N) mRNA gc
aggagagucccgcagucggcguccagcggcucugcuuguucgugugugugucguugcaggccuuauucaagcuuaccaugagcgacaacggcccccagaaccagcgcaacgccccgcggaucaccuucgggggccccuccgacagcaccggguccaaccagaacggcgagcgcagcggggcccgguccaagcagcgccggccccagggccugcccaacaacacggcgagcugguucaccgcccucacccagcacggcaaggaggaccugaaguucccgcgcgggcagggcgugcccaucaacaccaacuccagccccgacgaccagaucggguacuaccggcgcgccacgcggcgcauccggggcggggacggcaagaugaaggaccugagcccccgcugguacuucuacuaccucggcaccgggccggaggccggccugcccuacggggccaacaaggacggcaucaucugggucgcgaccgagggcgcccugaacacccccaaggaccacaucgggacgcggaaccccgccaacaacgccgcgaucgugcuccagcugccgcagggcaccacccugcccaagggguucuacgccgagggcucccgcgggggcucccaggccagcucccggagcuccagccgcucccggaacagcucccgcaacagcacccccggcagcuccaagcggacgagccccgcccgcauggccgggaacggcggggacgcggcccucgcccugcugcuccuggaccggcugaaccagcucgaguccaagaugagcggcaaggggcagcagcagcagggccagaccgugaccaagaaguccgccgccgaggcgagcaagaagccgcgccagaagcgcaccgccacgaaggccuacaacgucacccaggccuucggccggcgcgggcccgagcagacccagggcaacuucggggaccaggagcugacccggcagggcacggacuacaagcacuggccccagaucgcccaguucgcgcccuccgccagcgccuucuucgggaugucccgcaucggcauggaggugaccccgagcggcaccuggcugaccuacacgggggccaucaagcucgacgacaaggaccccaacuucaaggaccaggugauccugcugaacaagcacaucgacgccuacaagaccuucccgcccaccgagcccaagaaggacaagaagaagaaggcggacgagacccaggcccucccccagcggcagaagaagcagcagacggucacccugcugcccgccgccgaccucgacgacuucuccaagcagcugcagcagagcauguccagcgcggacuccacccaggccugaggacuagucccuguucccagagcccacuuuuuuuucuuuuuuugaaauaaaauagccugucuuucagaucucaaaggcucuuuucagagccaccaaaaaaaaaaaaaaaaaaaaaaaaaaaaaaaaaaaaaaaaaaaaaaaaaaaaaaaaaaaaaaaaaaaaaaaaaaaaaaaaaaaaaaaaaaaaaaaaaaaaa

SEQ ID NO: 19090 - RNA, 1532 nt, Artificial Sequence
  SARS-CoV-2__MT893681.1__nucleocapsid protein (N) mRNA gc
aggagagucccgcagucggcguccagcggcucugcuuguucgugugugugucguugcaggccuuauucaagcuuaccaugagcgacaacggcccccagaaccagcgcaacgccccgcggaucaccuucgggggccccuccgacagcaccggguccaaccagaacggcgagcgcagcggggcccgguccaagcagcgccggccccagggccugcccaacaacacggcgagcugguucaccgcccucacccagcacggcaaggaggaccugaaguucccgcgcgggcagggcgugcccaucaacaccaacuccagccccgacgaccagaucggguacuaccggcgcgccacgcggcgcauccggggcggggacggcaagaugaaggaccugagcccccgcugguacuucuacuaccucggcaccgggccggaggccggccugcccuacggggccaacaaggacggcaucaucugggucgcgaccgagggcgcccugaacacccccaaggaccacaucgggacgcggaaccccgccaacaacgccgcgaucgugcuccagcugccgcagggcaccauccugcccaagggguucuacgccgagggcucccgcgggggcucccaggccagcucccggagcuccagccgcucccggaacagcucccgcaacagcacccccggcagcucccgggggaucagccccgcccgcauggccggcaacgggggcgacgcggcccucgcccugcugcuccuggaccggcugaaccagcucgaguccaagaugagcgggaagggccagcagcagcagggccagaccgugacgaagaaguccgccgccgaggcgagcaagaagccgcgccagaagcgcaccgccaccaaggccuacaacgucacccaggccuucgggcggcgcggccccgagcagacgcaggggaacuucggcgaccaggagcugauccggcaggggaccgacuacaagcacuggccccagaucgcccaguucgcgcccuccgccagcgccuucuucggcaugucccgcaucggcauggaggugaccccgagcgggaccuggcugacguacaccggcgccaucaagcucgacgacaaggaccccaacuucaaggaccaggugauccugcugaacaagcacaucgacgccuacaagaccuucccgcccaccgagcccaagaaggacaagaagaagaaggcggacgagacgcaggcccucccccagcggcagaagaagcagcagaccgucacccugcugcccgccgccgaccucgacgacuucuccaagcagcugcagcagagcauguccagcgcggacuccacccaggccugaggacuagucccuguucccagagcccacuuuuuuuucuuuuuuugaaauaaaauagccugucuuucagaucucaaaggcucuuuucagagccaccaaaaaaaaaaaaaaaaaaaaaaaaaaaaaaaaaaaaaaaaaaaaaaaaaaaaaaaaaaaaaaaaaaaaaaaaaaaaaaaaaaaaaaaaaaaaaaaaaaaaa

SEQ ID NO: 19091 - RNA, 1532 nt, Artificial Sequence
  SARS-CoV-2__MT893685.1__nucleocapsid protein (N) mRNA gc
aggagagucccgcagucggcguccagcggcucugcuuguucgugugugugucguugcaggccuuauucaagcuuaccaugagcgacaacggcccccagaaccagcgcaacgccccgcggaucaccuucgggggccccuccgacagcaccggguccaaccagaacggcgagcgcagcggggcccgguccaagcagcgccggccccgcggccugcccaacaacacggcgagcugguucaccgcccucacccagcacggcaaggaggaccugaaguucccgcgggggcagggcgugcccaucaacaccaacuccagccccgacgaccagaucggguacuaccgccgggccacgcgccggauccgcggcggggacggcaagaugaaggaccugagcccccggugguacuucuacuaccucggcaccgggccggaggccggccugcccuacggggccaacaaggacggcaucaucugggucgcgaccgagggcgcccugaacacccccaaggaccacaucgggacgcgcaaccccgccaacaacgccgcgaucgugcuccagcugccgcagggcaccacccugcccaagggguucuacgccgagggcagccgcgggggcucccaggccuacagccgguccagcucccggagccgcaacuccagccggaacuccacccccggcagcagccgcgggacgucccccgcccggauggccggcaacgggggcgacgcggcccucgcccugcugcuccuggaccgccugaaccagcucgagagcaagauguccgggaagggccagcagcagcagggccagaccgugaccaagaaguccgccgccgaggcguccaagaagccgcgccagaagcggaccgccacgaaggccuacaacgucacccaggccuucgggcgccggggccccgagcagacccaggggaacuucggcgaccaggagcugauccgccaggggaccgacuacaagcacuggccccagaucgcccaguucgcgcccagcgccuccgccuucuucggcaugagccggaucggcauggaggugacgccguccgggaccuggcugaccuacaccggcgccaucaagcucgacgacaaggaccccaacuucaaggaccaggugauccugcugaacaagcacaucgacgccuacaagacguucccgcccaccgagcccaagaaggacaagaagaagaaggcggacgagacccaggcccucccccagcgccagaagaagcagcagaccgucacgcugcugcccgccgccgaccucgacgacuucagcaagcagcugcagcaguccaugagcuccgcggacagcacccaggccugaggacuagucccuguucccagagcccacuuuuuuuucuuuuuuugaaauaaaauagccugucuuucagaucucaaaggcucuuuucagagccaccaaaaaaaaaaaaaaaaaaaaaaaaaaaaaaaaaaaaaaaaaaaaaaaaaaaaaaaaaaaaaaaaaaaaaaaaaaaaaaaaaaaaaaaaaaaaaaaaaaaaa

SEQ ID NO: 19092 - RNA, 1532 nt, Artificial Sequence
  SARS-CoV-2__MT890230.1__nucleocapsid protein (N) mRNA gc
aggagagucccgcagucggcguccagcggcucugcuuguucgugugugugucguugcaggccuuauucaagcuuaccaugagcgacaacggcccccagaaccagcgcaacgccccgcggaucaccuucgggggccccuccgacagcaccggguccaaccagaacggcgagcgcagcggggcccgguccaagcagcgccggccccagggccugcccaacaacacggcgagcugguucaccgcccucacccagcacggcaaggaggaccugaaguucccgcgcgggcagggcgugcccaucaacaccaacuccagccccgacgaccagaucggguacuaccggcgcgccacgcggcgcauccggggcggggacggcaagaugaaggaccugagcccccgcugguacuucuacuaccucggcaccgggccggaggccggccugcccuacggggccaacaaggacggcaucaucugggucgcgaccgagggcgcccugaacacccccaaggaccacaucgggacgcggaaccccgccaacaacgccgcgaucgugcuccagcugccgcagggcaccacccugcccaagggguucuacgccgagggcagccgcgggggcucccaggccagcucccggagcuccagccgcucccggaacagcucccgcaacagcacccccggcagcaaccgggggacgucccccgcccgcauggccggcaacgggggcgacgcggcccucgcccugcugcuccuggaccggcugaaccagcucgagagcaagauguccgggaagggccagcagcagcagggccagaccgugaccaagaaguccgccgccgaggcguccaagaagccgcgccagaagcgcaccgccacgaaggccuacaacgucacccaggccuucgggcggcgcggccccgagcagacccaggggaacuucggcgaccaggagcugauccggcaggggaccgacuacaagcacuggccccagaucgcccaguucgcgcccagcgccuccgccuucuucggcaugagccgcaucggcauggaggugacgccguccgggaccuggcugaccuacaccggcgccaucaagcucgacgacaaggaccccaacuucaaggaccaggugauccugcugaacaagcacaucgacgccuacaagacguucccgcccaccgagcccaagaaggacaagaagaagaaggcggacgagacccaggcccucccccagcggcagaagaagcagcagaccgucacgcugcugcccgccgccgaccucgacgacuucagcaagcagcugcagcaguccaugagcuccgcggacagcacccaggccugaggacuagucccuguucccagagcccacuuuuuuuucuuuuuuugaaauaaaauagccugucuuucagaucucaaaggcucuuuucagagccaccaaaaaaaaaaaaaaaaaaaaaaaaaaaaaaaaaaaaaaaaaaaaaaaaaaaaaaaaaaaaaaaaaaaaaaaaaaaaaaaaaaaaaaaaaaaaaaaaaaaaa

SEQ ID NO: 19093 - RNA, 1532 nt, Artificial Sequence
  SARS-CoV-2__MT890236.1__nucleocapsid protein (N) mRNA gc
aggagagucccgcagucggcguccagcggcucugcuuguucgugugugugucguugcaggccuuauucaagcuuaccaugagcgacaacggcccccagaaccagcgcaacgccccgcggaucaccuucgggggccccuccgacagcaccggguccaaccagaacggcgagcgcagcggggcccgguccaagcagcgccggccccagggccugcccaacaacacggcgagcugguucaccgcccucacccagcacggcaaggaggaccugaaguucccgcgcgggcagggcgugcccaucaacaccaacuccagccccgacgaccagaucggguacuaccggcgcgccacgcggcgcauccggggcggggacggcaagaugaaggaccugagcccccgcugguacuucuacuaccucggcaccgggccggaggccggccugcccuacggggccaacaaggacggcaucaucugggucgcgaccgagggcgcccugaacacccccaaggaccacaucgggacgcggaaccccgccaacaacgccgcgaucgugcuccagcugccgcagggcaccacccugcccaagggguucuacgccgagggcagccgcgggggcucccaggccagcucccggagcuccagccgcucccggaacagcucccgcaacagcacccccggcagcucccgggggaucagccccgcccgcauggccggcaacgggggcgacgcggcccucgcccugcugcuccuggaccggcugaaccagcucgagacgaagauguccgggaagggccagcagcagcagggccagaccgugaccaagaaguccgccgccgaggcguccaagaagccgcgccagaagcgcaccgccacgaaggccuacaacgucacccaggccuucgggcggcgcggccccgagcagacccaggggaacuucggcgaccaggagcugauccggcaggggaccgacuacaagcacuggccccagaucgcccaguucgcgcccagcgccuccgccuucuucggcaugagccgcaucggcauggaggugacgccguccgggaccuggcugaccuacaccggcgccaucaagcucgacgacaaggaccccaacuucaaggaccaggugauccugcugaacaagcacaucgacgccuacaagacguucccgcccaccgagcccaagaaggacaagaagaagaaggcggacgagacccaggcccucccccagcggcagaagaagcagcagaccgucacgcugcugcccgccgccgaccucgacgacuucagcaagcagcugcagcaguccaugagcuccgcggacagcacccaggccugaggacuagucccuguucccagagcccacuuuuuuuucuuuuuuugaaauaaaauagccugucuuucagaucucaaaggcucuuuucagagccaccaaaaaaaaaaaaaaaaaaaaaaaaaaaaaaaaaaaaaaaaaaaaaaaaaaaaaaaaaaaaaaaaaaaaaaaaaaaaaaaaaaaaaaaaaaaaaaaaaaaaa

SEQ ID NO: 19094 - RNA, 1532 nt, Artificial Sequence
  SARS-CoV-2__MT890238.1__nucleocapsid protein (N) mRNA gc
aggagagucccgcagucggcguccagcggcucugcuuguucgugugugugucguugcaggccuuauucaagcuuaccaugagcgacaacggcccccagaaccagcgcaacgccccgcggaucaccuucgggggccccuccgacagcaccggguccaaccagaacggcgagcgcagcggggcccgguccaagcagcgccggccccagggccugcccaacaacacggcgagcugguucaccgcccucacccagcacggcaaggaggaccugaaguucccgcgcgggcagggcgugcccaucaacaccaacuccagccccgacgaccagaucggguacuaccggcgcgccacgcggcgcauccggggcggggacggcaagaugaaggaccugagcccccgcugguacuucuacuaccucggcaccgggccggaggccggccugcccuacggggccaacaaggacggcaucaucugggucgcgaccgagggcgcccugaacacccccaaggaccacaucgggacgcggaaccccgccaacaacgccgcgaucgugcuccagcugccgcagggcaccacccugcccaagggguucuacgccgagggcucccgcgggggcucccaggccagcucccggagcuccagccgcucccggaacagcucccgcaacagcacccccggcagcaaccgggggacgucccccgcccgcauggccggcaacgggggcgacgcggcccucgcccugcugcuccuggaccggcugaaccagcucgagcgcaagaugagcgggaagggccagcagcagcagggccagaccgugaccaagaaguccgccgccgaggcgagcaagaagccgcgccagaagcggaccgccacgaaggccuacaacgucacccaggccuucgggcgccggggccccgagcagacccaggggaacuucggcgaccaggagcugauccgccaggggaccgacuacaagcacuggccccagaucgcccaguucgcgcccuccgccagcgccuucuucggcaugucccggaucggcauggaggugacgccgagcgggaccuggcugaccuacaccggcgccaucaagcucgacgacaaggaccccaacuucaaggaccaggugauccugcugaacaagcacaucgacgccuacaagacguucccgcccaccgagcccaagaaggacaagaagaagaaggcggacgagacccaggcccucccccagcgccagaagaagcagcagaccgucacgcugcugcccgccgccgaccucgacgacuucuccaagcagcugcagcagagcauguccagcgcggacuccacccaggccugaggacuagucccuguucccagagcccacuuuuuuuucuuuuuuugaaauaaaauagccugucuuucagaucucaaaggcucuuuucagagccaccaaaaaaaaaaaaaaaaaaaaaaaaaaaaaaaaaaaaaaaaaaaaaaaaaaaaaaaaaaaaaaaaaaaaaaaaaaaaaaaaaaaaaaaaaaaaaaaaaaaaa

SEQ ID NO: 19095 - RNA, 1532 nt, Artificial Sequence
  SARS-CoV-2__MT890293.1__nucleocapsid protein (N) mRNA gc
aggagagucccgcagucggcguccagcggcucugcuuguucgugugugugucguugcaggccuuauucaagcuuaccaugagcgacaacggcccccagaaccagcgcaacgccccgcggaucaccuucgggggccccuccgacagcaccggguccaaccagaacggcgagcgcagcggggcccgguccaagcagcgccggccccagggccugcccaacaacacggcgagcugguucaccgcccucacccagcacggcaaggaggaccugaaguucccgcgcgggcagggcgugcccaucaacaccaacuccagccccgacgaccagaucggguacuaccggcgcgccacgcggcgcauccggggcggggacggcaagaugaaggaccugagcccccgcugguacuucuacuaccucggcaccgggccggaggccggccugcccuacggggccaacaaggacggcaucaucugggucgcgaccgagggcgcccugaacacccccaaggacuacaucgggacgcggaaccccgccaacaacgccgcgaucgugcuccagcugccgcagggcaccacccugcccaagggguucuacgccgagggcucccgcgggggcucccaggccagcucccggagcuccagccgcucccggaacagcucccgcaacagcacccccggcagcucccgggggacgagccccgcccgcauggccggcaacgggggcgacgcggcccucgcccugcugcuccuggaccggcugaaccagcucgaguccaagaugagcgggaagggccagcagcagcagggccagaccgugaccaagaaguccgccgccgaggcgagcaagaagccgcgccagaagcgcaccgccacgaaggccuacaacgucacccaggccuucgggcggcgcggccccgagcagacccaggggaacuucggcgaccaggagcugauccggcaggggaccgacuacaagcacuggccccagaucgcccaguucgcgcccuccgccagcgccuucuucggcaugucccgcaucggcauggaggugacgccgagcgggaccuggcugaccuacaccggcgccaucaagcucgacgacaaggaccccaacuucaaggaccaggugauccugcugaacaagcacaucgacgccuacaagacguucccgcccaccgagcccaagaaggacaagaagaagaaggcggacgagacccaggcccucccccagcggcagaagaagcagcagaccgucacgcugcugcccgccgccgaccucgacgacuucuccaagcagcugcagcagagcauguccagcgcggacuccacccaggccugaggacuagucccuguucccagagcccacuuuuuuuucuuuuuuugaaauaaaauagccugucuuucagaucucaaaggcucuuuucagagccaccaaaaaaaaaaaaaaaaaaaaaaaaaaaaaaaaaaaaaaaaaaaaaaaaaaaaaaaaaaaaaaaaaaaaaaaaaaaaaaaaaaaaaaaaaaaaaaaaaaaaa

SEQ ID NO: 19096 - RNA, 1532 nt, Artificial Sequence
  SARS-CoV-2__MT890316.1__nucleocapsid protein (N) mRNA gc
aggagagucccgcagucggcguccagcggcucugcuuguucgugugugugucguugcaggccuuauucaagcuuaccaugagcgacaacggcccccagaaccagcgcaacgccccgcggaucaccuucgggggccccuccgacagcaccggguccaaccagaacggcgagcgcagcggggcccgguccaagcagcgccggccccagggccugcccaacaacacggcgagcugguucaccgcccucacccagcacggcaaggaggaccugaaguucccgcgcgggcagggcgugcccaucaacaccaacuccagccccgacgaccagaucggguacuaccggcgcgccacgcggcgcauccggggcggggacggcaagaugaaggaccugagcccccgcugguacuucuacuaccucggcaccgggccggaggccggccugcccuacggggccaacaaggacggcaucaucugggucgcgaccgagggcgcccugaacacccccaaggaccacaucgggacgcggaaccccgccaacaacgccgcgaucgugcuccagcugccgcagggcaccacccugcccaagggguucuacgccgagggcucccgcgggggcucccaggccagcucccggagcuccagccgcucccggaacagcucccgcaacagcacccccggcagcucccgggggacgagccccgcccgcauggccggcaacgggggcgacgcggcccucgcccugcugcuccuggaccggcugaaccagcucgaguccaagaugagcgggaagggccagcagcagcagggccagaccgugaccaagaaguccgccgccgaggcgagcaagaagccgcgccagaagcgcaccgccacgaaggccuacaacgucacccaggccuucgggcggcgcggccccgagcagacccaggggaacuucggcgaccaggagcugauccggcaggggaccgacuacaagcacuggccccagaucgcccaguucgcgcccuccgccagcgccuucuucggcaugucccgcaucggcauggaggugacgccgagcgggaccuggcugaccuacaccggcgccaucaagcucgacgacaaggaccccaacuucaaggaccaggugauccugcugaacaagcacaucgacgccuacaagacguucccgcccaccgagcccaagaaggacaagaagaagaaggcggacgagacccaggcccucccccagcggcagaacaagcagcagaccgucacgcugcugcccgccgccgaccucgacgacuucuccaagcagcugcagcagagcauguccagcgcggacuccacccaggccugaggacuagucccuguucccagagcccacuuuuuuuucuuuuuuugaaauaaaauagccugucuuucagaucucaaaggcucuuuucagagccaccaaaaaaaaaaaaaaaaaaaaaaaaaaaaaaaaaaaaaaaaaaaaaaaaaaaaaaaaaaaaaaaaaaaaaaaaaaaaaaaaaaaaaaaaaaaaaaaaaaaaa

SEQ ID NO: 19097 - RNA, 1532 nt, Artificial Sequence
  SARS-CoV-2__MT890320.1__nucleocapsid protein (N) mRNA gc
aggagagucccgcagucggcguccagcggcucugcuuguucgugugugugucguugcaggccuuauucaagcuuaccaugagcgacaacggcccccagaaccagcgcaacgccccgcggaucaccuucgggggccccuccgacagcaccggguccaaccagaacggcgagcgcagcggggcccgguccaagcagcgccggccccagggccugcccaacaacacggcgagcugguucaccgcccucacccagcacggcaaggaggaccugaaguucccgcgcgggcagggcgugcccaucaacaccaacuccagccccgacgaccagaucggguacuaccggcgcgccacgcggcgcauccggggcggggacggcaagaugaaggaccugagcccccgcugguacuucuacuaccucggcaccgggccggaggccggccugcccuacggggccaacaaggacggcaucaucugggucgcgaccgagggcgcccugaacacccccaaggaccacaucgggacgcggaaccccgccaacaacgccgcgaucgugcuccagcugccgcagggcaccacccugcccaagggguucuacgccgagggcagccgcgggggcucccaggccagcucccggagcuccagccgcauccggaacuccagccgcaacuccacccccggcagcagccgggggacgucccccgcccgcauggccggcaacgggggcgacgcggcccucgcccugcugcuccuggaccggcugaaccagcucgagagcaagauguccgggaagggccagcagcagcagggccagaccgugaccaagaaguccgccgccgaggcguccaagaagccgcgccagaagcgcaccgccacgaaggccuacaacgucacccaggccuucgggcggcgcggccccgagcagacccaggggaacuucggcgaccaggagcugauccggcaggggaccgacuacaagcacuggccccagaucgcccaguucgcgcccagcgccuccgccuucuucggcaugagccgcaucggcauggaggugacgccguccgggaccuggcugaccuacaccggcgccaucaagcucgacgacaaggaccccaacuucaaggaccaggugauccugcugaacaagcacaucgacgccuacaagacguucccgcccaccgagcccaagaaggacaagaagaagaaggcggacgagacccaggcccucccccagcggcagaagaagcagcagaccgucacgcugcugcccgccgccgaccucgacgacuucagcaagcagcugcagcaguccaugagcuccgcggacagcacccaggccugaggacuagucccuguucccagagcccacuuuuuuuucuuuuuuugaaauaaaauagccugucuuucagaucucaaaggcucuuuucagagccaccaaaaaaaaaaaaaaaaaaaaaaaaaaaaaaaaaaaaaaaaaaaaaaaaaaaaaaaaaaaaaaaaaaaaaaaaaaaaaaaaaaaaaaaaaaaaaaaaaaaaa

SEQ ID NO: 19098 - RNA, 1532 nt, Artificial Sequence
  SARS-CoV-2__MT890321.1__nucleocapsid protein (N) mRNA gc
aggagagucccgcagucggcguccagcggcucugcuuguucgugugugugucguugcaggccuuauucaagcuuaccaugagcgacaacggcccccagaaccagcgcaacgccccgcggaucaccuucgggggccccuccgacagcaccggguccaaccagaacggcgagcgcagcggggcccgguccaagcagcgccggccccagggccugcccaacaacacggcgagcugguucaccgcccucacccagcacggcaaggaggaccugaaguucccgcgcgggcagggcgugcccaucaacaccaacuccagccccgacgaccagaucggguacuaccggcgcgccacgcggcgcauccggggcggggacggcaagaugaaggaccugagcccccgcugguacuucuacuaccucggcaccgggccggaggccggccugcccuacggggccaacaaggacggcaucaucugggucgcgaccgagggcgcccugaacacccccaaggaccacaucgggacgcggaaccccgccaacaacgccgcgaucgugcuccagcugccgcagggcaccacccugcccaagggguucuacgccgagggcucccgcgggggcucccaggccagcucccggagcuccagccgcucccggaacagcucccgcaacagcacccccggcagcuccgggggcacgagccccgcccggauggccgggaacggcggggacgcggcccucgcccugcugcuccuggaccgccugaaccagcucgaguccaagaugagcggcaagggccagcagcagcaggggcagaccgugaccaagaaguccgccgccgaggcgagcaagaagccgcggcagaagcgcaccgccacgaaggccuacaacgucacccaggccuucggccgccgggggcccgagcagacccagggcaacuucggggaccaggagcugauccgccagggcaccgacuacaagcacuggccccagaucgcccaguucgcgcccuccgccagcgccuucuucggcaugucccggaucgggauggaggugacgccgagcggcaccuggcugaccuacaccggggccaucaagcucgacgacaaggaccccaacuucaaggaccaggugauccugcugaacaagcacaucgacgccuacaagacguucccgcccaccgagcccaagaaggacaagaagaagaaggcggacgagacccaggcccucccccagcgccagaagaagcagcagaccgucacgcugcugcccgccgccgaccucgacgacuucuccaagcagcugcagcagagcauguccagcgcggacuccacccaggccugaggacuagucccuguucccagagcccacuuuuuuuucuuuuuuugaaauaaaauagccugucuuucagaucucaaaggcucuuuucagagccaccaaaaaaaaaaaaaaaaaaaaaaaaaaaaaaaaaaaaaaaaaaaaaaaaaaaaaaaaaaaaaaaaaaaaaaaaaaaaaaaaaaaaaaaaaaaaaaaaaaaaa

SEQ ID NO: 19099 - RNA, 1532 nt, Artificial Sequence
  SARS-CoV-2__MT892973.1__nucleocapsid protein (N) mRNA gc
aggagagucccgcagucggcguccagcggcucugcuuguucgugugugugucguugcaggccuuauucaagcuuaccaugagcgacaacggcccccagaaccagcgcaacgccccgcggaucaccuucgggggccccuccgacagcaccggguccaaccagaacggcgagcgcagcggggcccgguccaagcagcgccggccccagggccugcccaacaacacggcgagcugguucaccgcccucacccagcacggcaaggaggaccugaaguucccgcgcgggcagggcgugcccaucaacaccaacuccagccccgacgaccagaucggguacuaccggcgcgccacgcggcgcauccggggcggggacggcaagaugaaggaccugagcccccgcugguacuucuacuaccucggcaccgggccggaggccggccugcccuacggggccaacaaggacggcaucaucugggucgcgaccgagggcgcccugaacacccccaaggaccacaucgggacgcggaaccccgccaacaacgccgcgaucgugcuccagcugccgcagggcaccacccugcccaagggguucuacgccgagggcagccgcgggggcucccaggccagcucccggagcuccagccgcucccggaacagcucccgcaacagcacccccggcagcucccgggggacgagccccgcccgcauggccggcaacgggggcgacgcggcccucgcccugcugcuccuggaccggcugaaccagcucgaguccaagauguucgggaagggccagcagcagcagggccagaccgugaccaagaaguccgccgccgaggcguccaagaagccgcgccagaagcgcaccgccacgaaggccuacaacgucacccaggccuucgggcggcgcggccccgagcagacccaggggaacuucggcgaccaggagcugauccggcaggggaccgacuacaagcacuggccccagaucgcccaguucgcgcccagcgccuccgccuucuucggcaugagccgcaucggcauggaggugacgccguccgggaccuggcugaccuacaccggcgccaucaagcucgacgacaaggaccccaacuucaaggaccaggugauccugcugaacaagcacaucgacgccuacaagacguucccgcccaccgagcccaagaaggacaagaagaagaaggcggacgagacccaggcccucccccagcggcagaagaagcagcagaccgucacgcugcugcccgccgccgaccucgacgacuucagcaagcagcugcagcaguccaugagcuccgcggacagcacccaggccugaggacuagucccuguucccagagcccacuuuuuuuucuuuuuuugaaauaaaauagccugucuuucagaucucaaaggcucuuuucagagccaccaaaaaaaaaaaaaaaaaaaaaaaaaaaaaaaaaaaaaaaaaaaaaaaaaaaaaaaaaaaaaaaaaaaaaaaaaaaaaaaaaaaaaaaaaaaaaaaaaaaaa

SEQ ID NO: 19100 - RNA, 1532 nt, Artificial Sequence
  SARS-CoV-2__MT892974.1__nucleocapsid protein (N) mRNA gc
aggagagucccgcagucggcguccagcggcucugcuuguucgugugugugucguugcaggccuuauucaagcuuaccaugagcgacaacggcccccagaaccagcgcaacgccccgcggaucaccuucgggggccccuccgacagcaccggguccaaccagaacggcgagcgcagcggggcccgguccaagcagcgccggccccagggccugcccaacaacacggcgagcugguucaccgcccucacccagcacggcaaggaggaccugaaguucccgcgcgggcagggcgugcccaucaacaccaacuccagccccgacgaccagaucggguacuaccggcgcgccacgcggcgcauccggggcggggacggcaagaugaaggaccugagcccccgcugguacuucuacuaccucggcaccgggccggaggccggccugcccuacggggccaacaaggacggcaucaucugggucgcgaccgagggcgcccugaacacccccaaggaccacaucgggacgcggaaccccgccaacaacgccgcgaucgugcuccagcugccgcagggcaccacccugcccaagggguucuacgccgagggcagccgcgggggcucccaggccagcucccggagcuccagccgcucccggaacagccuccgcaacuccacccccggcagcagccgggggacgucccccgcccgcauggccggcaacgggggcgacgcggcccuggcccugcuccugcuggaccggcucaaccagcuggagagcaagauguccgggaagggccagcagcagcagggccagaccgugaccaagaaguccgccgccgaggcguccaagaagccgcgccagaagcgcaccgccacgaaggccuacaacgucacccaggccuucgggcggcgcggccccgagcagacccaggggaacuucggcgaccaggagcugauccggcaggggaccgacuacaagcacuggccccagaucgcccaguucgcgcccagcgccuccgccuucuucggcaugagccgcaucggcauggaggugacgccguccgggaccuggcucaccuacaccggcgccaucaagcuggacgacaaggaccccaacuucaaggaccaggugauccugcucaacaagcacaucgacgccuacaagacguucccgcccaccgagcccaagaaggacaagaagaagaaggcggacgagacccaggcccugccccagcggcagaagaagcagcagaccgucacgcugcuccccgccgccgaccuggacgacuucagcaagcagcugcagcaguccaugagcuccgcggacagcacccaggccugaggacuagucccuguucccagagcccacuuuuuuuucuuuuuuugaaauaaaauagccugucuuucagaucucaaaggcucuuuucagagccaccaaaaaaaaaaaaaaaaaaaaaaaaaaaaaaaaaaaaaaaaaaaaaaaaaaaaaaaaaaaaaaaaaaaaaaaaaaaaaaaaaaaaaaaaaaaaaaaaaaaaa

SEQ ID NO: 19101 - RNA, 1532 nt, Artificial Sequence
  SARS-CoV-2__MT892993.1__nucleocapsid protein (N) mRNA gc
aggagagucccgcagucggcguccagcggcucugcuuguucgugugugugucguugcaggccuuauucaagcuuaccaugagcgacaacggcccccagaaccagcgcaacgccccgcggaucaccuucgggggccccuccgacagcaccggguccaaccagaacggcgagcgcagcggggcccgguccaagcagcgccggccccagggccugcccaacaacacggcgagcugguucaccgcccucacccagcacggcaaggaggaccugaaguucccgcgcgggcagggcgugcccaucaacaccaacuccagccccgacgaccagaucggguacuaccggcgcgccacgcggcgcauccggggcggggacggcaagaugaaggaccugagcccccgcugguacuucuacuaccucggcaccgggccggaggccggccugcccuacggggccaacaaggacggcaucaucugggucgcgaccgagggcgcccugaacacccccaaggaccacaucgggacgcggaaccccgccaacaacgccgcgaucgugcuccagcugccgcagggcaccacccugcccaagggguucuacgccgagggcagccgcgggggcauccaggccuccagccgguccagcucccgcagccggaacuccagccgcaacuccacccccggcagcagccgggggacgucccccgcccgcauggccggcaacgggggcgacgcggcccucgcccugcugcuccuggaccggcugaaccagcucgagagcaagauguccgggaagggccagcagcagcagggccagaccgugaccaagaaguccgccgccgaggcguccaagaagccgcgccagaagcgcaccgccacgaaggccuacaacgucacccaggccuucgggcggcgcggccccgagcagacccaggggaacuucggcgaccaggagcugauccggcaggggaccgacuacaagcacuggccccagaucgcccaguucgcgcccagcgccuccgccuucuucggcaugagccgcaucggcauggaggugacgccguccgggaccuggcugaccuacaccggcgccaucaagcucgacgacaaggaccccaacuucaaggaccaggugauccugcugaacaagcacaucgacgccuacaagacguucccgcccaccgagcccaagaaggacaagaagaagaaggcggacgagacccaggcccucccccagcggcagaagaagcagcagaccgucacgcugcugcccgccgccgaccucgacgacuucagcaagcagcugcagcaguccaugagcuccgcggacagcacccaggccugaggacuagucccuguucccagagcccacuuuuuuuucuuuuuuugaaauaaaauagccugucuuucagaucucaaaggcucuuuucagagccaccaaaaaaaaaaaaaaaaaaaaaaaaaaaaaaaaaaaaaaaaaaaaaaaaaaaaaaaaaaaaaaaaaaaaaaaaaaaaaaaaaaaaaaaaaaaaaaaaaaaaa

SEQ ID NO: 19102 - RNA, 1532 nt, Artificial Sequence
  SARS-CoV-2__MT893011.1__nucleocapsid protein (N) mRNA gc
aggagagucccgcagucggcguccagcggcucugcuuguucgugugugugucguugcaggccuuauucaagcuuaccaugagcgacaacggcccccagaaccagcgcaacgccccgcggaucaccuucgggggccccuccgacagcaccggguccaaccagaacggcgagcgcagcggggcccgguccaagcagcgccggccccagggccugcccaacaacacggcgagcugguucaccgcccucacccagcacggcaaggaggaccugaaguucccgcgcgggcagggcgugcccaucaacaccaacuccagccccgacgaccagaucggguacuaccggcgcgccacgcggcgcauccggggcggggacggcaagaugaaggaccugagcccccgcugguacuucuacuaccucggcaccgggccggaggccggccugcccuacggggccaacaaggacggcaucaucugggucgcgaccgagggcgcccugaacacccccaaggaccacaucgggacgcggaaccccgccaacaacgccgcgaucgugcuccagcugccgcagggcaccacccugcccaagggguucuacgccgagggcagccgcgggggcucccaggccagcucccggagcuccagccgcucccggaacaccagccgcaacuccacgcccggcagcagccgggggaccucccccgcccgcauggccggcaacgggggcgacgcggcccucgcccugcugcuccuggaccggcugaaccagcucgagagcaagauguccgggaagggccagcagcagcagggccagaccgugaccaagaaguccgccgccgaggcguccaagaagccgcgccagaagcgcacggccaccaaggccuacaacgucacccaggccuucgggcggcgcggccccgagcagacccaggggaacuucggcgaccaggagcugauccggcaggggacggacuacaagcacuggccccagaucgcccaguucgcgcccagcgccuccgccuucuucggcaugagccgcaucggcauggaggugaccccguccgggaccuggcugaccuacacgggcgccaucaagcucgacgacaaggaccccaacuucaaggaccaggugauccugcugaacaagcacaucgacgccuacaagaccuucccgcccaccgagcccaagaaggacaagaagaagaaggcggacgagacccaggcccucccccagcggcagaagaagcagcagacggucacccugcugcccgccgccgaccucgacgacuucagcaagcagcugcagcaguccaugagcuccgcggacagcacccaggccugaggacuagucccuguucccagagcccacuuuuuuuucuuuuuuugaaauaaaauagccugucuuucagaucucaaaggcucuuuucagagccaccaaaaaaaaaaaaaaaaaaaaaaaaaaaaaaaaaaaaaaaaaaaaaaaaaaaaaaaaaaaaaaaaaaaaaaaaaaaaaaaaaaaaaaaaaaaaaaaaaaaaa

SEQ ID NO: 19103 - RNA, 1532 nt, Artificial Sequence
  SARS-CoV-2__MT893013.1__nucleocapsid protein (N) mRNA gc
aggagagucccgcagucggcguccagcggcucugcuuguucgugugugugucguugcaggccuuauucaagcuuaccaugagcgacaacggcccccagaaccagcgcaacgccccgcggaucaccuucgggggccccuccgacagcaccggguccaaccagaacggcgagcgcagcggggcccgguccaagcagcgccggccccagggccugcccaacaacacggcgagcugguucaccgcccucacccagcacggcaaggaggaccugaaguucccgcgcgggcagggcgugcccaucaacaccaacuccagccccgacgaccagaucggguacuaccggcgcacgacccggcgcauccggggcggggacggcaagaugaaggaccugagcccccgcugguacuucuacuaccucggcaccgggccggaggccggccugcccuacggggccaacaaggacggcaucaucugggucgccaccgagggcgcgcugaacacgcccaaggaccacaucgggacccggaaccccgccaacaacgccgccaucgugcuccagcugccgcagggcaccacccugcccaagggguucuacgcggagggcucccgcgggggcucccaggccagcucccggagcuccagccgcucccggaacagcucccgcaacagcacgcccggcagcucccgggggaccagccccgcccgcauggccggcaacgggggcgacgccgcgcucgcccugcugcuccuggaccggcugaaccagcucgaguccaagaugagcgggaagggccagcagcagcagggccagaccgugaccaagaaguccgccgccgaggccagcaagaagccgcgccagaagcgcacggcgaccaaggccuacaacgucacccaggccuucgggcggcgcggccccgagcagacccaggggaacuucggcgaccaggagcugauccggcaggggacggacuacaagcacuggccccagaucgcccaguucgcccccuccgcgagcgccuucuucggcaugucccgcaucggcauggaggugaccccgagcgggaccuggcugaccuacacgggcgccaucaagcucgacgacaaggaccccaacuucaaggaccaggugauccugcugaacaagcacaucgacgccuacaagaccuucccgcccaccgagcccaagaaggacaagaagaagaaggccgacgagacccaggcgcucccccagcggcagaagaagcagcagacggucacccugcugcccgccgccgaccucgacgacuucuccaagcagcugcagcagagcauguccagcgccgacuccacccaggcgugaggacuagucccuguucccagagcccacuuuuuuuucuuuuuuugaaauaaaauagccugucuuucagaucucaaaggcucuuuucagagccaccaaaaaaaaaaaaaaaaaaaaaaaaaaaaaaaaaaaaaaaaaaaaaaaaaaaaaaaaaaaaaaaaaaaaaaaaaaaaaaaaaaaaaaaaaaaaaaaaaaaaa

SEQ ID NO: 19104 - RNA, 1532 nt, Artificial Sequence
  SARS-CoV-2__MT883501.1__nucleocapsid protein (N) mRNA gc
aggagagucccgcagucggcguccagcggcucugcuuguucgugugugugucguugcaggccuuauucaagcuuaccaugagcgacaacggcccccagaaccagcgcaacgccccgcggaucaccuucgggggccccuccgacagcaccggguccaaccagaacggcgagcgcagcggggcccgguccaagcagcgccggccccagggccugcccaacaacacggcgagcugguucaccgcccucacccagcacggcaaggaggaccugaaguucccgcgcgggcagggcgugcccaucaacaccaacuccagccccgacgaccagaucggguacuaccggcgcgccacgcggcgcauccggggcggggacggcaagaugaaggaccugagcccccgcugguacuucuacuaccucggcaccgggccggaggccggccugcccuacggggccaacaaggacggcaucaucugggucgcgaccgagggcgcccugaacacccccaaggaccacaucgggacgcggaaccccgccaacaacgccgcgaucgugcuccagcugccgcagggcaccacccugcccaagggguucuacgccgagggcucccgcgggggcucccaggccagcucccggagcuccagccgcucccggaacagcucccgcaacagcacccccggcagcucccgggggacgagccccgcccgcauggccggcuacgggggcgacgcggcccucgcccugcugcuccuggaccggcugaaccagcucgaguccaagaugagcgggaagggccagcagcagcagggccagaccgugaccaagaaguccgccgccgaggcgagcaagaagccgcgccagaagcgcaccgccacgaaggccuacaacgucacccaggccuucgggcggcgcggccccgagcagacccaggggaacuucggcgaccaggagcugauccggcaggggaccgacuacaagcacuggccccagaucgcccaguucgcgcccuccgccagcgccuucuucggcaugucccgcaucggcauggaggugacgccgagcgggaccuggcugaccuacaccggcgccaucaagcucgacgacaaggaccccaacuucaaggaccaggugauccugcugaacaagcacaucgacgccuacaagacguucccgcccaccgagcccaagaaggacaagaagaagaaggcggacgagacccaggcccucccccagcggcagaagaagcagcagaccgucacgcugcugcccgccgccgaccucgacgacuucuccaagcagcugcagcagagcauguccagcgcggacuccacccaggccugaggacuagucccuguucccagagcccacuuuuuuuucuuuuuuugaaauaaaauagccugucuuucagaucucaaaggcucuuuucagagccaccaaaaaaaaaaaaaaaaaaaaaaaaaaaaaaaaaaaaaaaaaaaaaaaaaaaaaaaaaaaaaaaaaaaaaaaaaaaaaaaaaaaaaaaaaaaaaaaaaaaaa

SEQ ID NO: 19105 - RNA, 1532 nt, Artificial Sequence
  SARS-CoV-2__MT883502.1__nucleocapsid protein (N) mRNA gc
aggagagucccgcagucggcguccagcggcucugcuuguucgugugugugucguugcaggccuuauucaagcuuaccaugagcgacaacggcccccagaaccagcgcaacgccccgcggaucaccuucgggggccccuccgacagcaccggguccaaccagaacggcgagcgcagcggggcccgguccaagcagcgccggccccagggccugcccaacaacacggcgagcugguucaccgcccucacccagcacggcaaggaggaccugaaguucccgcgcgggcagggcgugcccaucaacaccaacuccagccccgacgaccagaucggguacuaccggcgcgccacgcggcgcauccggggcggggacggcaagaugaaggaccugagcccccgcugguacuucuacuaccucggcaccgggccggaggccggccugcccuacggggccaacaaggacggcaucaucugggucgcgaccgagggcgcccugaacacccccaaggaccacaucgggacgcggaaccccgccaacaacgccgcgaucgugcuccagcugccgcagggcaccacccugcccaagggguucuacgccgagggcucccgcgggggcucccaggccagcucccggagcuccagccgcucccggaacagcucccgcaacagcacccccggcagcuccaagcggacgagccccgcccgcauggccgggaacggcggggacgcggcccucgcccugcugcuccuggaccggcugaaccagcucgaguccaagaugagcggcaaggggcagcagcagcagggccagaccgugaccaagaaguccgccgccgaggcgagcaagaagccgcgccagaagcgcaccgccacgaaggccuacaacgucacccaggccuucggccggcgcgggcccgagcagacccagggcaacuucggggaccaggagcugauccggcagggcaccgacuacaagcacuggccccagaucgcccaguucgcgcccuccgccagcgccuucuucgggaugucccgcaucggcauggaggugacgccgagcggcaccuggcugaccuacaccggggccaucaagcucgacgacaaggaccccaacuucaaggaccaggugauccugcugaacaagcacaucgacgccuacaagacguucccgcccaccgagcccaagaaggacaagaagaagaaggcggacgagacccaggcccucccccagcggcagaagaagcagcagaccgucacgcugcugcccgccgccgaccucgacgacuucuccaagcagcugcagcagagcauguccaucgcggacagcacccaggccugaggacuagucccuguucccagagcccacuuuuuuuucuuuuuuugaaauaaaauagccugucuuucagaucucaaaggcucuuuucagagccaccaaaaaaaaaaaaaaaaaaaaaaaaaaaaaaaaaaaaaaaaaaaaaaaaaaaaaaaaaaaaaaaaaaaaaaaaaaaaaaaaaaaaaaaaaaaaaaaaaaaaa

SEQ ID NO: 19106 - RNA, 1532 nt, Artificial Sequence
  SARS-CoV-2__MT883503.1__nucleocapsid protein (N) mRNA gc
aggagagucccgcagucggcguccagcggcucugcuuguucgugugugugucguugcaggccuuauucaagcuuaccaugagcgacaacggcccccagaaccagcgcaacgccccgcggaucaccuucgggggccccuccgacagcaccggguccaaccagaacggcgagcgcagcggggcccgguccaagcagcgccggccccagggccugcccaacaacacggcgagcugguucaccgcccucacccagcacggcaaggaggaccugaaguucccgcgcgggcagggcgugcccaucaacaccaacuccagccccgacgaccagaucggguacuaccggcgcgccacgcggcgcauccggggcggggacggcaagaugaaggaccugagcccccgcugguacuucuacuaccucggcaccgggccggaggccggccugcccuacggggccaacaaggacggcaucaucugggucgugaccgagggcgcgcugaacacccccaaggaccacaucgggacgcggaaccccgccaacaacgccgccaucgugcuccagcugccgcagggcaccacccugcccaagggguucuacgcggagggcucccgcgggggcucccaggccagcucccggagcuccagccgcucccggaacagcucccgcaacagcacccccggcagcuccaagcggacgagccccgcccgcauggccgggaacggcggggacgccgcgcucgcccugcugcuccuggaccggcugaaccagcucgaguccaagaugagcggcaaggggcagcagcagcagggccagaccgucaccaagaaguccgccgccgaggccagcaagaagccgcgccagaagcgcaccgcgacgaaggccuacaacgugacccaggccuucggccggcgcgggcccgagcagacccagggcaacuucggggaccaggagcugauccggcagggcaccgacuacaagcacuggccccagaucgcccaguucgcccccuccgcgagcgccuucuucgggaugucccgcaucggcauggaggugacgccgagcggcaccuggcugaccuacaccggggccaucaagcucgacgacaaggaccccaacuucaaggaccaggucauccugcugaacaagcacaucgacgccuacaagacguucccgcccaccgagcccaagaaggacaagaagaagaaggccgacgagacccaggcgcucccccagcggcagaagaagcagcagaccgugacgcugcugcccgccgccgaccucgacgacuucuccaagcagcugcagcagagcauguccagcgccgacuccacccaggcgugaggacuagucccuguucccagagcccacuuuuuuuucuuuuuuugaaauaaaauagccugucuuucagaucucaaaggcucuuuucagagccaccaaaaaaaaaaaaaaaaaaaaaaaaaaaaaaaaaaaaaaaaaaaaaaaaaaaaaaaaaaaaaaaaaaaaaaaaaaaaaaaaaaaaaaaaaaaaaaaaaaaaa

SEQ ID NO: 19107 - RNA, 1532 nt, Artificial Sequence
  SARS-CoV-2__MT886312.1__nucleocapsid protein (N) mRNA gc
aggagagucccgcagucggcguccagcggcucugcuuguucgugugugugucguugcaggccuuauucaagcuuaccaugagcgacaacggcccccagaaccagcgcaacgccccgcggaucaccuucgggggccccuccgacagcaccggguccaaccagaacggcgagcgcagcggggcccgguccaagcagcgccggccccagggccugcccaacaacacggcgagcugguucaccgcccucacccagcacggcaaggaggaccugaaguucccgcgcgggcagggcgugcccaucaacaccaacuccagccccgacgaccagaucggguacuaccggcgcgccacgcggcgcauccggggcggggacggcaagaugaaggaccugagcccccgcugguacuucuacuaccucggcaccgggccggaggccggccugcccuacggggccaacaaggacggcaucaucugggucgcgaccgagggcgcccugaacacccccaaggaccacaucgggacgcggaaccccgccaacaacgccgcgaucgugcuccagcugccgcagggcaccacccugcccaagggguucuacgccgagggcucccgcgggggcucccaggccagcucccggagcuccagccgcucccggaacagcucccgcaacagcacccccggcagcucccgggggacgagccccgcccgcauggccggcaacgggggcgacgcggcccucgcccugcugcuccuggaccggcugaaccagcucgaguccaagaugagcgggaagggccagcagcagcagggccagaccgugaccaagaaguccgccgccgaggcgagcaagaagccgcgccagaagcgcaccgccacgaaggccuacaacgucacccaggccuucgggcggcgcggccccgagcagacccaggggaacuucggcgaccaggagcugauccggcaggggaccgacuacaagcacuggccccagaucgcccaguucgcgcccuccgccagcgccuucuucggcaugucccgcaucggcauggaggugacgccgcuggggaccuggcucaccuacaccggcgccaucaagcuggacgacaaggaccccaacuucaaggaccaggugauccugcucaacaagcacaucgacgccuacaagacguucccgcccaccgagcccaagaaggacaagaagaagaaggcggacgagacccaggcccugccccagcggcagaagaagcagcagaccgucacgcugcuccccgccgccgaccuggacgacuucagcaagcagcugcagcaguccaugagcuccgcggacagcacccaggccugaggacuagucccuguucccagagcccacuuuuuuuucuuuuuuugaaauaaaauagccugucuuucagaucucaaaggcucuuuucagagccaccaaaaaaaaaaaaaaaaaaaaaaaaaaaaaaaaaaaaaaaaaaaaaaaaaaaaaaaaaaaaaaaaaaaaaaaaaaaaaaaaaaaaaaaaaaaaaaaaaaaaa

SEQ ID NO: 19108 - RNA, 1532 nt, Artificial Sequence
  SARS-CoV-2__MT886346.1__nucleocapsid protein (N) mRNA gc
aggagagucccgcagucggcguccagcggcucugcuuguucgugugugugucguugcaggccuuauucaagcuuaccaugagcgacaacggcccccagaaccagcgcaacgccccgcggaucaccuucgggggccccuccgacagcaccggguccaaccagaacggcgagcgcagcggggcccgguccaagcagcgccggccccagggccugcccaacaacacggcgagcugguucaccgcccucacccagcacggcaaggaggaccugaaguucccgcgcgggcagggcgugcccaucaacaccaacuccagccccgacgaccagaucggguacuaccggcgcgccacgcggcgcauccggggcggggacggcaagaugaaggaccugagcccccgcugguacuucuacuaccucggcaccgggccggaggccggccugcccuacggggccaacaaggacggcaucaucugggucgcgaccgagggcgccuucaacacccccaaggaccacaucgggacgcggaaccccgccaacaacgccgcgaucgugcugcagcucccgcagggcaccacccugcccaagggguucuacgccgagggcucccgcgggggcucccaggccagcucccggagcuccagccgcucccggaacagcucccgcaacagcacccccggcagcuccaagcggacgagccccgcccgcauggccgggaacggcggggacgcggcccuggcccuccugcugcucgaccggcugaaccagcuggaguccaagaugagcggcaaggggcagcagcagcagggccagaccgugaccaagaaguccgccgccgaggcgagcaagaagccgcgccagaagcgcaccgccacgaaggccuacaacgucacccaggccuucggccggcgcgggcccgagcagacccagggcaacuucggggaccaggagcucauccggcagggcaccgacuacaagcacuggccccagaucgcccaguucgcgcccuccgccagcgccuucuucgggaugucccgcaucggcauggaggugacgccgagcggcaccuggcugaccuacaccggggccaucaagcuggacgacaaggaccccaacuucaaggaccaggugauccuccugaacaagcacaucgacgccuacaagacguucccgcccaccgagcccaagaaggacaagaagaagaaggcggacgagacccaggcccugccccagcggcagaagaagcagcagaccgucacgcuccugcccgccgccgaccuggacgacuucuccaagcagcuccagcagagcauguccagcgcggacuccacccaggccugaggacuagucccuguucccagagcccacuuuuuuuucuuuuuuugaaauaaaauagccugucuuucagaucucaaaggcucuuuucagagccaccaaaaaaaaaaaaaaaaaaaaaaaaaaaaaaaaaaaaaaaaaaaaaaaaaaaaaaaaaaaaaaaaaaaaaaaaaaaaaaaaaaaaaaaaaaaaaaaaaaaaa

SEQ ID NO: 19109 - RNA, 1532 nt, Artificial Sequence
  SARS-CoV-2__MT886413.1__nucleocapsid protein (N) mRNA gc
aggagagucccgcagucggcguccagcggcucugcuuguucgugugugugucguugcaggccuuauucaagcuuaccaugagcgacaacggcccccagaaccagcgcaacgccccgcggaucaccuucgggggccccuccgacagcaccggguccaaccagaacggcgagcgcagcggggcccgguccaagcagcgccggccccagggccugcccaacaacacggcgagcugguucaccgcccucacccagcacggcaaggaggaccugaaguucacccgcgggcagggcgugccgaucaacacgaacuccagccccgacgaccagaucggguacuaccggcgcgccacccggcgcauccggggcggggacggcaagaugaaggaccugagcccccgcugguacuucuacuaccucggcaccgggcccgaggccggccugccguacggggccaacaaggacggcaucaucugggucgcgaccgagggcgcccugaacacgcccaaggaccacaucgggacccggaaccccgccaacaacgccgcgaucgugcuccagcugccccagggcaccacccugccgaagggguucuacgccgagggcucccgcgggggcucccaggccagcucccggagcuccagccgcucccggaacagcucccgcaacagcacgcccggcagcucccgggggaccagccccgcccgcauggccggcaacgggggcgacgcggcccucgcccugcugcuccuggaccggcugaaccagcucgaguccaagaugagcgggaagggccagcagcagcagggccagaccgugaccaagaaguccgccgccgaggcgagcaagaagccccgccagaagcgcacggccaccaaggccuacaacgucacccaggccuucgggcggcgcggcccggagcagacccaggggaacuucggcgaccaggagcugauccggcaggggacggacuacaagcacuggccccagaucgcccaguucgcgcccuccgccagcgccuucuucggcaugucccgcaucggcauggaggugacccccagcgggaccuggcugaccuacacgggcgccaucaagcucgacgacaaggacccgaacuucaaggaccaggugauccugcugaacaagcacaucgacgccuacaagaccuucccgcccaccgagcccaagaaggacaagaagaagaaggcggacgagacccaggcccucccccagcggcagaagaagcagcagacggucacccugcugcccgccgccgaccucgacgacuucuccaagcagcugcagcagagcauguccagcgcggacuccacccaggccugaggacuagucccuguucccagagcccacuuuuuuuucuuuuuuugaaauaaaauagccugucuuucagaucucaaaggcucuuuucagagccaccaaaaaaaaaaaaaaaaaaaaaaaaaaaaaaaaaaaaaaaaaaaaaaaaaaaaaaaaaaaaaaaaaaaaaaaaaaaaaaaaaaaaaaaaaaaaaaaaaaaaa

SEQ ID NO: 19110 - RNA, 1532 nt, Artificial Sequence
  SARS-CoV-2__MT880886.1__nucleocapsid protein (N) mRNA gc
aggagagucccgcagucggcguccagcggcucugcuuguucgugugugugucguugcaggccuuauucaagcuuaccaugagcgacaacggcccccagaaccagcgcaacgccccgcggaucaccuucgggggccccuccgacagcaccggguccaaccagaacggcgagcgcagcggggcccgguccaagcagcgccggccccagggccugcccaacaacacggcgagcugguucaccgcccucacccagcacggcaaggaggaccugaaguucccgcgcgggcagggcgugcccaucaacaccaacuccagccccgacgaccagaucggguacuaccggcgcgccacgcggcgcauccggggcggggacggcaagaugaaggaccugagcccccgcugguacuucuacuaccucggcaccgggccggaggccggccugcccuacggggccaacaaggacggcaucaucugggucgcgaccgagggcgcccugaacacccccaaggaccacaucgggacgcggaaccccgccaacaacgccgcgaucgugcuccagcugccgcagggcaccacccugcccaagggguucuacgccgagggcagccgcgggggcucccagagcuccagccgguccagcucccgcagccggaacuccagccgcaacagcacccccggcuccagcaagcggacgucccccgcccgcauggccgggaacggcggggacgccgcgcucgcccugcugcuccuggaccggcugaaccagcucgagagcaagauguccggcaaggggcagcagcagcagggccagaccgugaccaagaaguccgccgccgaggccuccaagaagccgcgccagaagcgcaccgcgacgaaggccuacaacgucacccaggccuucggccggcgcgggcccgagcagacccagggcaacuucggggaccaggagcugauccggcagggcaccgacuacaagcacuggccccagaucgcccaguucgcccccagcgcguccgccuucuucgggaugagccgcaucggcauggaggugacgccguccggcaccuggcugaccuacaccggggccaucaagcucgacgacaaggaccccaacuucaaggaccaggugauccugcugaacaagcacaucgacgccuacaagacguucccgcccaccgagcccaagaaggacaagaagaagaaggccgacgagacccaggcgcucccccagcggcagaagaagcagcagaccgucacgcugcugcccgccgccgaccucgacgacuucagcaagcagcugcagcaguccaugagcuccgccgacagcacccaggcgugaggacuagucccuguucccagagcccacuuuuuuuucuuuuuuugaaauaaaauagccugucuuucagaucucaaaggcucuuuucagagccaccaaaaaaaaaaaaaaaaaaaaaaaaaaaaaaaaaaaaaaaaaaaaaaaaaaaaaaaaaaaaaaaaaaaaaaaaaaaaaaaaaaaaaaaaaaaaaaaaaaaaa

SEQ ID NO: 19111 - RNA, 1532 nt, Artificial Sequence
  SARS-CoV-2__MT882317.1__nucleocapsid protein (N) mRNA gc
aggagagucccgcagucggcguccagcggcucugcuuguucgugugugugucguugcaggccuuauucaagcuuaccaugagcgacaacggcccccagaaccagcgcaacgccccgcggaucaccuucgggggccccuccgacagcaccggguccaaccagaaccgcgagcggagcggcgcccgcuccaagcagcggcgcccccaggggcugcccaacaacacggcgagcugguucaccgcccucacccagcacggcaaggaggaccugaaguucccgcggggccagggggugcccaucaacaccaacuccagccccgacgaccagaucggcuacuaccgccgggccacgcgccggauccgcgggggcgacgggaagaugaaggaccugagcccccggugguacuucuacuaccucggcaccggcccggaggccgggcugcccuacggcgccaacaaggacgggaucaucugggucgcgaccgagggcgcccugaacacccccaaggaccacaucggcacgcgcaaccccgccaacaacgccgcgaucgugcuccagcugccgcaggggaccacccugcccaagggcuucuacgccgaggggucccggggcgggucccaggccagcucccgcagcuccagccggucccgcaacagcucccggaacagcacccccggcagcuccaagcgcacgagccccgcccggauggccggcaacgggggcgacgcggcccucgcccugcugcuccuggaccgccugaaccagcucgaguccaagaugagcgggaagggccagcagcagcaggggcagaccgugaccaagaaguccgccgccgaggcgagcaagaagccgcgccagaagcggaccgccacgaaggccuacaacgucacccaggccuucggccgccggggccccgagcagacccaggggaacuucggcgaccaggagcugauccgccaggggaccgacuacaagcacuggccccagaucgcccaguucgcgcccuccgccagcgccuucuucggcaugucccggaucgggauggaggugacgccgagcggcaccuggcugaccuacaccggcgccaucaagcucgacgacaaggaccccaacuucaaggaccaggugauccugcugaacaagcacaucgacgccuacaagacguucccgcccaccgagcccaagaaggacaagaagaagaaggcggacgagacccaggcccucccccagcgccagaagaagcagcagaccgucacgcugcugcccgccgccgaccucgacgacuucuccaagcagcugcagcagagcauguccagcgcggacuccacccaggccugaggacuagucccuguucccagagcccacuuuuuuuucuuuuuuugaaauaaaauagccugucuuucagaucucaaaggcucuuuucagagccaccaaaaaaaaaaaaaaaaaaaaaaaaaaaaaaaaaaaaaaaaaaaaaaaaaaaaaaaaaaaaaaaaaaaaaaaaaaaaaaaaaaaaaaaaaaaaaaaaaaaaa

SEQ ID NO: 19112 - RNA, 1532 nt, Artificial Sequence
  SARS-CoV-2__MT873051.1__nucleocapsid protein (N) mRNA gc
aggagagucccgcagucggcguccagcggcucugcuuguucgugugugugucguugcaggccuuauucaagcuuaccaugagcgacaacggcccccagaaccagcgcaacgccccgcggaucaccuucgggggccccuccgacagcaccggguccaaccagaacggcgagcgcagcggggcccgguccaagcagcgccggccccagggccugcccaacaacacggcgagcugguucaccgcccucacccagcacggcaaggaggaccugaaguucccgcgcgggcagggcgugcccaucaacaccaacuccagccccgacgaccagaucggguacuaccggcgcgccacgcggcgcauccggggcggggacggcaagaugaaggaccugagcccccgcugguacuucuacuaccucggcaccgggccggaggccggccugcccuacggggccaacaaggacggcaucaucugggucgcgaccgagggcgcccugaacacccccaaggaccacaucgggacgcggaaccccgccaacaacgccgcgaucgugcuccagcugccgcagggcaccacccugcccaagggguucuacgccgagggcucccgcgggggcucccaggccagcucccggagcuccagccgcucccggaacagcucccgcaacagcacccccggcagcucccgggggacgagccccgccaucauggccggcaacgggggcgacgcggcccucgcccugcugcuccuggaccgccugaaccagcucgaguccaagaugagcgggaagggccagcagcagcagggccagaccgugaccaagaaguccgccgccgaggcgagcaagaagccgcggcagaagcgcaccgccacgaaggccuacaacgucacccaggccuucgggcgccggggccccgagcagacccaggggaacuucggcgaccaggagcugauccgccaggggaccgacuacaagcacuggccccagaucgcccaguucgcgcccuccgccagcgccuucuucggcaugucccggaucggcauggaggugacgccgagcgggaccuggcugaccuacaccggcgccaucaagcucgacgacaaggaccccaacuucaaggaccaggugauccugcugaacaagcacaucgacgccuacaagacguucccgcccaccgagcccaagaaggacaagaagaagaaggcggacgagacccaggcccucccccagcgccagaagaagcagcagaccgucacgcugcugcccgccgccgaccucgacgacuucuccaagcagcugcagcagagcauguccagcgcggacuccacccaggccugaggacuagucccuguucccagagcccacuuuuuuuucuuuuuuugaaauaaaauagccugucuuucagaucucaaaggcucuuuucagagccaccaaaaaaaaaaaaaaaaaaaaaaaaaaaaaaaaaaaaaaaaaaaaaaaaaaaaaaaaaaaaaaaaaaaaaaaaaaaaaaaaaaaaaaaaaaaaaaaaaaaaa

SEQ ID NO: 19113 - RNA, 1532 nt, Artificial Sequence
  SARS-CoV-2__MT873056.1__nucleocapsid protein (N) mRNA gc
aggagagucccgcagucggcguccagcggcucugcuuguucgugugugugucguugcaggccuuauucaagcuuaccaugagcgacaacggcccccagaaccagcgcaacgccccgcggaucaccuucgggggccccuccgacagcaccggguccaaccagaacggcgagcgcagcggggcccgguccaagcagcgccggccccagggccugcccaacaacacggcgagcugguucaccgcccucacccagcacggcaaggaggaccugaaguucccgcgcgggcagggcgugcccaucaacaccaacuccagccccgacgaccagaucggguacuaccggcgcgccacgcggcgcauccggggcggggacggcaagaugaaggaccugagcccccgcugguacuucuacuaccucggcaccgggccggaggccggccugcccuacggggccaacaaggacggcaucaucugggucgcgaccgagggcgcccugaacacccccaaggaccacaucgggacgcggaaccccgccaacaacgccgcgaucgugcuccagcugccgcagggcaccacccugcccaagggguucuacgccgagggcucccgcgggggcucccaggccagcucccggagcuccagccgcucccggaacagcucccgcaacagcacccccggcagcucccgggggacgagccccgcccgcauggccggcaacgggggcgacgcggcccucgcccugcugcuccuggaccggcugaaccagcucgaguccaagaugagcgggaagggccagcagcagcagggccagaccgugaccaagaaguccgccgccgaggcgagcaagaagccgcgccagaagcgcaccgccacgaaggccuacaacgucacccaggccuucgggcggcgcggccccgagcagacccaggggaacuucggcgaccaggagcugauccggcaggggaccgacuacaaguacuggccccagaucgcccaguucgcgcccuccgccagcgccuucuucggcaugucccgcaucggcauggaggugacgccgagcgggaccuggcugaccuacaccggcgccaucaagcucgacgacaaggaccccaacuucaaggaccaggugauccugcugaacaagcacaucgacgccuacaagacguucccgcccaccgagcccaagaaggacaagaagaagaaggcggacgagacccaggcccucccccagcggcagaagaagcagcagaccgucacgcugcugcccgccgccgaccucgacgacuucuccaagcagcugcagcagagcauguccagcgcggacuccacccaggccugaggacuagucccuguucccagagcccacuuuuuuuucuuuuuuugaaauaaaauagccugucuuucagaucucaaaggcucuuuucagagccaccaaaaaaaaaaaaaaaaaaaaaaaaaaaaaaaaaaaaaaaaaaaaaaaaaaaaaaaaaaaaaaaaaaaaaaaaaaaaaaaaaaaaaaaaaaaaaaaaaaaaa

SEQ ID NO: 19114 - RNA, 1532 nt, Artificial Sequence
  SARS-CoV-2__MT873062.1__nucleocapsid protein (N) mRNA gc
aggagagucccgcagucggcguccagcggcucugcuuguucgugugugugucguugcaggccuuauucaagcuuaccaugagcgacaacggcccccagaaccagcgcaacgccccgcggaucaccuucgggggccccuccgacagcaccggguccaaccagaacggcgagcgcagcggggcccgguccaagcagcgccggccccagggccugcccaacaacacggcgagcugguucaccgcccucacccagcacggcaaggaggaccugaaguucccgcgcgggcagggcgugcccaucaacaccaacuccagccccgacgaccagaucggguacuaccggcgcgccacgcggcgcauccggggcggggacggcaagaugaaggaccugagcccccgcugguacuucuacuaccucggcaccgggccggaggccggccugcccuacggggccaacaaggacggcaucaucugggucgcgaccgagggcgcccugaacacccccaaggaccacaucgggacgcggaaccccgccaacaacgccgcgaucgugcuccagcugccgcagggcaccacccugcccaagggguucuacgccgagggcucccgcgggggcucccaggccagcucccggagcuccagccgcucccggaacagcucccgcaacagcacccccggcagcucccgggggacgagccccgcccgcauggccggcaacgggggcgacgcggcccucgcccugcugcuccuggaccggcugaaccagcucgaguccaagaugagcgggaagggccagcagcagcagggccagaccgugaccaagaaguccgccgccgaggcgagcaagaagccgcgccagaagcgcaccgccacgaaggccuacaacgucacccaggccuucgggcggcgcggccccgagcagacccaggggaacuucggcgaccaggagcugauccggcaggggaccgacuacaagcacuggccccagaucgcccaguucgcgcccuccgccagcgccuucuucggcaugucccgcaucggcauggaggugacgccgagcgggaccuggcugaccuacaccggcgccaucaagcucgacgacaaggaccccaacuucaaggaccaggugauccugcugaacaagcacaucgacgccuacaagacguucccgcccaccgagcccaagaaggacaagaagaagaaggcggacgagacccaggcccucccccagcggcagaagaagcagcagaccgucacgcugcugcccgccgccgaccucuacgacuucuccaagcagcugcagcagagcauguccagcgcggacuccacccaggccugaggacuagucccuguucccagagcccacuuuuuuuucuuuuuuugaaauaaaauagccugucuuucagaucucaaaggcucuuuucagagccaccaaaaaaaaaaaaaaaaaaaaaaaaaaaaaaaaaaaaaaaaaaaaaaaaaaaaaaaaaaaaaaaaaaaaaaaaaaaaaaaaaaaaaaaaaaaaaaaaaaaaa

SEQ ID NO: 19115 - RNA, 1532 nt, Artificial Sequence
  SARS-CoV-2__MT873087.1__nucleocapsid protein (N) mRNA gc
aggagagucccgcagucggcguccagcggcucugcuuguucgugugugugucguugcaggccuuauucaagcuuaccaugagcgacaacggcccccagaaccaccgcaacgccccgcggaucaccuucgggggccccuccgacagcaccggguccaaccagaacggcgagcgcagcggggcccgguccaagcagcgccggccccagggccugcccaacaacacggcgagcugguucaccgcccucacccagcacggcaaggaggaccugaaguucccgcgcgggcagggcgugcccaucaacaccaacuccagccccgacgaccagaucggguacuaccggcgcgccacgcggcgcauccggggcggggacggcaagaugaaggaccugagcccccgcugguacuucuacuaccucggcaccgggccggaggccggccugcccuacggggccaacaaggacggcaucaucugggucgcgaccgagggcgcccugaacacccccaaggaccacaucgggacgcggaaccccgccaacaacgccgcgaucgugcuccagcugccgcagggcaccacccugcccaagggguucuacgccgagggcucccgcgggggcucccaggccagcucccggagcuccagccgcucccggaacagcucccgcaacagcacccccggcagcucccgggggacgagccccgcccgcauggccggcaacgggggcgacgcggcccucgcccugcugcuccuggaccggcugaaccagcucgaguccaagaugagcgggaagggccagcagcagcagggccagaccgugaccaagaaguccgccgccgaggcgagcaagaagccgcgccagaagcgcaccgccacgaaggccuacaacgucacccaggccuucgggcggcgcggccccgagcagacccaggggaacuucggcgaccaggagcugauccggcaggggaccgacuacaagcacuggccccagaucgcccaguucgcgcccuccgccagcgccuucuucggcaugucccgcaucggcauggaggugacgccgagcgggaccuggcugaccuacaccggcgccaucaagcucgacgacaaggaccccaacuucaaggaccaggugauccugcugaacaagcacaucgacgccuacaagacguucccgcccaccgagcccaagaaggacaagaagaagaaggcggacgagacccaggcccucccccagcggcagaagaagcagcagaccgucacgcugcugcccgccgccgaccucgacgacuucuccaagcagcugcagcagagcauguccagcgcggacuccacccaggccugaggacuagucccuguucccagagcccacuuuuuuuucuuuuuuugaaauaaaauagccugucuuucagaucucaaaggcucuuuucagagccaccaaaaaaaaaaaaaaaaaaaaaaaaaaaaaaaaaaaaaaaaaaaaaaaaaaaaaaaaaaaaaaaaaaaaaaaaaaaaaaaaaaaaaaaaaaaaaaaaaaaaa

SEQ ID NO: 19116 - RNA, 1532 nt, Artificial Sequence
  SARS-CoV-2__MT873108.1__nucleocapsid protein (N) mRNA gc
aggagagucccgcagucggcguccagcggcucugcuuguucgugugugugucguugcaggccuuauucaagcuuaccaugagcgacaacggcccccagaaccagcgcaacgccccgcggaucaccuucgggggccccuccgacagcaccggguccaaccagaacggcgagcgcagcggggcccgguccaagcagcgccggccccagggccugcccaacaacacggcgagcugguucaccgcccucacccagcacggcaaggaggaccugaaguucccgcgcgggcagggcgugcccaucaacaccaacuccagccccgacgaccagaucggguacuaccggcgcgccacgcggcgcauccggggcggggacggcaagaugaaggaccugagcccccgcugguacuucuacuaccucggcaccgggccggaggccggccugcccuacggggccaacaaggacggcaucaucugggucgcgaccgagggcgcccugaacacccccaaggaccacaucgggacgcggaaccccgccaacaacgccgcgaucgugcuccagcugccgcagggcaccacccugcccaagggguucuacgccgagggcagccgcgggggcucccaggccagcucccggagcuccagccgcucccggaacagcucccgcaacagcacccccggcagcucccgggggacguuccccgcccgcauggccggcaacgggggcgacgcggcccucgcccugcugcuccuggaccggcugaaccagcucgagagcaagauguccgggaagggccagcagcagcagggccagaccgugaccaagaaguccgccgccgaggcguccaagaagccgcgccagaagcgcaccgccacgaaggccuacaacgucacccaggccuucgggcggcgcggccccgagcagacccaggggaacuucggcgaccaggagcugauccggcaggggaccgacuacaagcacuggccccagaucgcccaguucgcgcccagcgccuccgccuucuucggcaugagccgcaucggcauggaggugacgccguccgggaccuggcugaccuacaccggcgccaucaagcucgacgacaaggaccccaacuucaaggaccaggugauccugcugaacaagcacaucgacgccuacaagacguucccgcccaccgagcccaagaaggacaagaagaagaaggcggacgagacccaggcccucccccagcggcagaagaagcagcagaccgucacgcugcugcccgccgccgaccucgacgacuucagcaagcagcugcagcaguccaugagcuccgcggacagcacccaggccugaggacuagucccuguucccagagcccacuuuuuuuucuuuuuuugaaauaaaauagccugucuuucagaucucaaaggcucuuuucagagccaccaaaaaaaaaaaaaaaaaaaaaaaaaaaaaaaaaaaaaaaaaaaaaaaaaaaaaaaaaaaaaaaaaaaaaaaaaaaaaaaaaaaaaaaaaaaaaaaaaaaaa

SEQ ID NO: 19117 - RNA, 1532 nt, Artificial Sequence
  SARS-CoV-2__MT873173.1__nucleocapsid protein (N) mRNA gc
aggagagucccgcagucggcguccagcggcucugcuuguucgugugugugucguugcaggccuuauucaagcuuaccaugagcgacaacggcccccagaaccagcgcaacgccccgcggaucaccuucgggggccccuccgacagcaccggguccaaccagaacggcgagcgcagcggggcccgguccaagcagcgccggccccagggccugcccaacaacacggcgagcugguucaccgcccucacccagcacggcaaggaggaccugaaguucccgcgcgggcagggcgugcccaucaacaccaacuccagccccgacgaccagaucggguacuaccggcgcgccacgcggcgcauccggggcggggacggcaagaugaaggaccugagcccccgcugguacuucuacuaccucggcaccgggccggaggccggccugcccuacggggccaacaaggacggcaucaucugggucgcgaccgagggcgcccugaacacccccaaggaccacaucgggacgcggaaccccgccaacaacgccgcgaucgugcuccagcugccgcagggcaccacccugcccaagggguucuacgccgagggcucccgcgggggcucccaggccagcucccggagcuccagccgcucccggaacagcucccgcaacagcacccccggcagcuccaaggggacgagccccggccggauggccgggaacggcggggacgccgcgcucgcccugcugcuccuggaccgccugaaccagcucgaguccaagaugagcggcaagggccagcagcagcaggggcagaccgugaccaagaaguccgccgccgaggccagcaagaagccgcggcagaagcgcaccgcgacgaaggccuacaacgucacccaggccuucggccgccgggggcccgagcagacccagggcaacuucggggaccaggagcugauccgccagggcaccgacuacaagcacuggccccagaucgcccaguucgcccccuccgcgagcgccuucuucggcaugucccggaucgggauggaggugacgccgagcggcaccuggcugaccuacaccggggccaucaagcucgacgacaaggaccccaacuucaaggaccaggugauccugcugaacaagcacaucgacgccuacaagacguucccgcccaccgagcccaagaaggacaagaagaagaaggccgacgagacccaggcgcucccccagcgccagaagaagcagcagaccgucacgcugcugcccgccgccgaccucgacgacuucuccaagcagcugcagcagagcauguccagcgccgacuccacccaggcgugaggacuagucccuguucccagagcccacuuuuuuuucuuuuuuugaaauaaaauagccugucuuucagaucucaaaggcucuuuucagagccaccaaaaaaaaaaaaaaaaaaaaaaaaaaaaaaaaaaaaaaaaaaaaaaaaaaaaaaaaaaaaaaaaaaaaaaaaaaaaaaaaaaaaaaaaaaaaaaaaaaaaa

SEQ ID NO: 19118 - RNA, 1532 nt, Artificial Sequence
  SARS-CoV-2__MT873184.1__nucleocapsid protein (N) mRNA gc
aggagagucccgcagucggcguccagcggcucugcuuguucgugugugugucguugcaggccuuauucaagcuuaccaugagcgacaacggcccccagaaccagcgcaacgccccgcggaucaccuucgggggccccuccgacagcaccggguccaaccagaacggcgagcgcagcggggcccgguccaagcagcgccggccccagggccugcccaacaacacggcgagcugguucaccgcccucacccagcacggcaaggaggaccugaaguucccgcgcgggcagggcgugcccaucaacaccaacuccagccccgacgaccagaucggguacuaccggcgcgccacgcggcgcauccggggcggggacggcaagaugaaggaccugagcccccgcugguacuucuacuaccucggcaccgggccggaggccggccugcccuacggggccaacaaggacggcaucaucugggucgcgaccgagggcgcccugaacacccccaaggaccacaucgggacgcggaaccccgccaacaacgccgcgaucgugcuccagcugccgcagggcaccacccugcccaagggguucuacgccgagggcucccgcgggugcucccaggccagcucccggagcuccagccgcucccggaacagcucccgcaacagcacccccggcagcucccggggcacgagccccgcccgcauggccgggaacggcggggacgcggcccucgcccugcugcuccuggaccggcugaaccagcucgaguccaagaugagcggcaaggggcagcagcagcagggccagaccgugaccaagaaguccgccgccgaggcgagcaagaagccgcgccagaagcgcaccgccacgaaggccuacaacgucacccaggccuucggccggcgcgggcccgagcagacccagggcaacuucggggaccaggagcugauccggcagggcaccgacuacaagcacuggccccagaucgcccaguucgcgcccuccgccagcgccuucuucgggaugucccgcaucggcauggaggugacgccgagcggcaccuggcugaccuacaccggggccaucaagcucgacgacaaggaccccaacuucaaggaccaggugauccugcugaacaagcacaucgacgccuacaagacguucccgcccaccgagcccaagaaggacaagaagaagaaggcggacgagacccaggcccucccccagcggcagaagaagcagcagaccgucacgcugcugcccgccgccgaccucgacgacuucuccaagcagcugcagcagagcauguccagcgcggacuccacccaggccugaggacuagucccuguucccagagcccacuuuuuuuucuuuuuuugaaauaaaauagccugucuuucagaucucaaaggcucuuuucagagccaccaaaaaaaaaaaaaaaaaaaaaaaaaaaaaaaaaaaaaaaaaaaaaaaaaaaaaaaaaaaaaaaaaaaaaaaaaaaaaaaaaaaaaaaaaaaaaaaaaaaaa

SEQ ID NO: 19119 - RNA, 1532 nt, Artificial Sequence
  SARS-CoV-2__MT873208.1__nucleocapsid protein (N) mRNA gc
aggagagucccgcagucggcguccagcggcucugcuuguucgugugugugucguugcaggccuuauucaagcuuaccaugagcgacaacggcccccagaaccagcgcaacgccccgcggaucaccuucgggggccccuccgacagcaccggguccaaccagaacggcgagcgcgggggcgcccggagcaagcagcgccggccccagggccugcccaacaacacggcguccugguucaccgcccucacccagcacgggaaggaggaccugaaguucccgcgcggccagggggugcccaucaacaccaacagcucccccgacgaccagaucggcuacuaccggcgcgccacgcggcgcauccgcgggggcgacggcaagaugaaggaccugagcccccggugguacuucuacuaccucgggaccggcccggaggccgggcugcccuacggcgccaacaaggacggcaucaucugggucgcgaccgagggggcccugaacacccccaaggaccacaucggcacgcggaaccccgccaacaacgccgcgaucgugcuccagcugccgcaggggaccacccugcccaagggcuucuacgccgaggggucccgcggcggcagccaggccuccagccgguccagcucccgcagccggaacuccagccgcaacuccacccccgggagcagccggggcacgucccccgcccgcauggccgggaacggcggggacgcggcccucgcccugcugcuccuggaccggcugaaccagcucgagagcaagauguccggcaagggccagcagcagcaggggcagaccgugaccaagaaguccgccgccgaggcgagcaagaagccgcgccagaagcgcaccgccacgaaggccuacaacgucacccaggccuucggccggcgcgggcccgagcagacccagggcaacuucggggaccaggagcugauccggcagggcaccgacuacaagcacuggccccagaucgcccaguucgcgcccagcgccuccgccuucuucggcaugagccgcaucgggauggaggugacgccguccggcaccuggcugaccuacaccggggccaucaagcucgacgacaaggaccccaacuucaaggaccaggugauccugcugaacaagcacaucgacgccuacaagacguucccgcccaccgagcccaagaaggacaagaagaagaaggcggacgagacccaggcccucccccagcggcagaagaagcagcagaccgucacgcugcugcccgccgccgaccucgacgacuucagcaagcagcugcagcaguccaugagcuccgcggacagcacccaggccugaggacuagucccuguucccagagcccacuuuuuuuucuuuuuuugaaauaaaauagccugucuuucagaucucaaaggcucuuuucagagccaccaaaaaaaaaaaaaaaaaaaaaaaaaaaaaaaaaaaaaaaaaaaaaaaaaaaaaaaaaaaaaaaaaaaaaaaaaaaaaaaaaaaaaaaaaaaaaaaaaaaaa

SEQ ID NO: 19120 - RNA, 1532 nt, Artificial Sequence
  SARS-CoV-2__MT873268.1__nucleocapsid protein (N) mRNA gc
aggagagucccgcagucggcguccagcggcucugcuuguucgugugugugucguugcaggccuuauucaagcuuaccaugagcgacaacggcccccagaaccagcgcaacgccccgcggaucaccuucgggggccccuccgacagcaccggguccaaccagaacggcgagcgcagcggggcccgguccaagcagcgccggccccagggccugcccaacaacacggcgagcugguucaccgcccucacccagcacggcaaggaggaccugaaguucccgcgcgggcagggcgugcccaucaacaccaacuccagccccgacgaccagaucggguacuaccggcgcgccacgcggcgcauccggggcggggacggcaagaugaaggaccugagcccccgcugguacuucuacuaccucggcaccgggccggaggccggccugcccuacggggccaacaaggacggcaucaucugggucgcgaccgagggcgcccugaacacccccaaggaccacaucgggacgcggaaccccgccaacaacgccgcgaucgugcuccagcugccgcagggcaccacccugcccaagggguucuacgccgagggcucccgcgggggcucccaggccagcucccggagcuccagccgcucccggaacagcucccgcaacagcacccccggcagcucccgggggacgagccccgcccgcauggccggcaacgggggcgacgcggcccucgcccugcugcuccuggaccggcugaaccagcucgaguccaagaugagcgggaagggccagcagcagcagggccagaccgugaccaagaaguccgccgccgaggcgagcaagaagccgcgccagaagcgcaccgccacgaaggccuacaacgucacccaggccuucgggcggcgcggccccgagcagacccaggggaacuucggcgaccaggagcugauccggcaggggaccgacuacaagcacuggccccagaucgcccaguucgcgcccuccgccagcgccuucuucggcaugucccgcaucggcauggaggugacgcugagcgggaccuggcucaccuacaccggcgccaucaagcuggacgacaaggacccgaacuucaaggaccaggugauccugcucaacaagcacaucgacgccuacaagacguucccgcccaccgagcccaagaaggacaagaagaagaaggcggacgagacccaggcccugccccagcggcagaagaagcagcagaccgucacgcugcuccccgccgccgaccuggacgacuucuccaagcagcugcagcagagcauguccagcgcggacuccacccaggccugaggacuagucccuguucccagagcccacuuuuuuuucuuuuuuugaaauaaaauagccugucuuucagaucucaaaggcucuuuucagagccaccaaaaaaaaaaaaaaaaaaaaaaaaaaaaaaaaaaaaaaaaaaaaaaaaaaaaaaaaaaaaaaaaaaaaaaaaaaaaaaaaaaaaaaaaaaaaaaaaaaaaa

SEQ ID NO: 19121 - RNA, 1532 nt, Artificial Sequence
  SARS-CoV-2__MT873270.1__nucleocapsid protein (N) mRNA gc
aggagagucccgcagucggcguccagcggcucugcuuguucgugugugugucguugcaggccuuauucaagcuuaccaugagcgacaacggcccccagaaccagcgcaacgccccgcggaucaccuucgggggccccuccgacagcaccggguccaaccagaacggcgagcgcaucggggcccggagcaagcagcgccggccccagggccugcccaacaacacggcguccugguucaccgcccucacccagcacggcaaggaggaccugaaguucccgcgcgggcagggcgugcccaucaacaccaacagcucccccgacgaccagaucggguacuaccggcgcgccacgcggcgcauccggggcggggacggcaagaugaaggaccugagcccccgcugguacuucuacuaccucggcaccgggccggaggccggccugcccuacggggccaacaaggacggcaucaucugggucgcgaccgagggcgcccugaacacccccaaggaccacaucgggacgcggaaccccgccaacaacgccgcgaucgugcuccagcugccgcagggcaccacccugcccaagggguucuacgccgagggcucccgcgggggcagccaggccuccagccgguccagcucccgcagccggaacuccagccgcaacuccacccccggcagcagccgggggacgucccccgcccgcauggccggcaacgggggcgacgcggcccucgcccugcugcuccuggaccggcugaaccagcucgagagcaagauguccgggaagggccagcagcagcagggccagaccgugaccaagaaguccgccgccgaggcgagcaagaagccgcgccagaagcgcaccgccacgaaggccuacaacgucacccaggccuucgggcggcgcggccccgagcagacccaggggaacuucggcgaccaggagcugauccggcaggggaccgacuacaagcacuggccccagaucgcccaguucgcgcccagcgccuccgccuucuucggcaugagccgcaucggcauggaggugacgccguccgggaccuggcugaccuacaccggcgccaucaagcucgacgacaaggaccccaacuucaaggaccaggugauccugcugaacaagcacaucgacgccuacaagacguucccgcccaccgagcccaagaaggacaagaagaagaaggcggacgagacccaggcccucccccagcggcagaagaagcagcagaccgucacgcugcugcccgccgccgaccucgacgacuucagcaagcagcugcagcaguccaugagcuccgcggacagcacccaggccugaggacuagucccuguucccagagcccacuuuuuuuucuuuuuuugaaauaaaauagccugucuuucagaucucaaaggcucuuuucagagccaccaaaaaaaaaaaaaaaaaaaaaaaaaaaaaaaaaaaaaaaaaaaaaaaaaaaaaaaaaaaaaaaaaaaaaaaaaaaaaaaaaaaaaaaaaaaaaaaaaaaaa

SEQ ID NO: 19122 - RNA, 1532 nt, Artificial Sequence
  SARS-CoV-2__MT873290.1__nucleocapsid protein (N) mRNA gc
aggagagucccgcagucggcguccagcggcucugcuuguucgugugugugucguugcaggccuuauucaagcuuaccaugagcgacaacggcccccagaaccagcgcaacgccccgcggaucaccuucgggggccccuccgacagcaccggguccaaccagaacggcgagcgcagcggggcccgguccaagcagcgccggccccagggccugcccaacaacacggcgagcugguucaccgcccucacccagcacggcaaggaggaccugaaguucccgcgcgggcagggcgugcccaucaacaccaacuccagccccgacgaccagaucggguacuaccggcgcgccacgcggcgcauccggggcggggacggcaagaugaaggaccugagcccccgcugguacuucuacuaccucggcaccgggccggaggccggccugcccuacggggccaacaaggacggcaucaucugggucgcgaccgagggcgcccugaacacccccaaggaccacaucgggacgcggaaccccgccaacaacgccgcgaucgugcuccagcugagccagggcaccacccugccgaagggguucuacgccgagggcucccgcgggggcagccaggccuccagccgguccagcucccgcagccggaacuccagccgcaacagcacccccggcuccagccgggggacgucccccgcccgcauggccggcaacgggggcgacgcggcccucgcccugcugcuccuggaccggcugaaccagcucgagagcaagauguccgggaagggccagcagcagcagggccagaccgugaccaagaaguccgccgccgaggcguccaagaagccccgccagaagcgcaccgccacgaaggccuacaacgucacccaggccuucgggcggcgcggcccggagcagacccaggggaacuucggcgaccaggagcugauccggcaggggaccgacuacaagcacuggccccagaucgcccaguucgcgcccagcgccuccgccuucuucggcaugagccgcaucggcauggaggugacgcccuccgggaccuggcugaccuacaccggcgccaucaagcucgacgacaaggacccgaacuucaaggaccaggugauccugcugaacaagcacaucgacgccuacaagacguucccgcccaccgagcccaagaaggacaagaagaagaaggcggacgagacccaggcccucccccagcggcagaagaagcagcagaccgucacgcugcugcccgccgccgaccucgacgacuucagcaagcagcugcagcaguccaugagcuccgcggacagcacccaggccugaggacuagucccuguucccagagcccacuuuuuuuucuuuuuuugaaauaaaauagccugucuuucagaucucaaaggcucuuuucagagccaccaaaaaaaaaaaaaaaaaaaaaaaaaaaaaaaaaaaaaaaaaaaaaaaaaaaaaaaaaaaaaaaaaaaaaaaaaaaaaaaaaaaaaaaaaaaaaaaaaaaaa

SEQ ID NO: 19123 - RNA, 1532 nt, Artificial Sequence
  SARS-CoV-2__MT873300.1__nucleocapsid protein (N) mRNA gc
aggagagucccgcagucggcguccagcggcucugcuuguucgugugugugucguugcaggccuuauucaagcuuaccaugagcgacaacggcccccagaaccagcgcaacgccccgcggaucaccuucgggggccccuccgacagcaccggguccaaccagaacggcgagcgcagcgggucccggagcaagcagcgccggccccagggccugcccaacaacacggccuccugguucaccgcgcucacccagcacggcaaggaggaccugaaguucccgcgcgggcagggcgugcccaucaacaccaacagcucccccgacgaccagaucggguacuaccggcgcgccacgcggcgcauccggggcggggacggcaagaugaaggaccugagcccccgcugguacuucuacuaccucggcaccgggccggaggccggccugcccuacggggccaacaaggacggcaucaucugggucgccaccgagggcgcgcugaacacccccaaggaccacaucgggacgcggaaccccgccaacaacgccgccaucgugcuccagcugccgcagggcaccacccugcccaagggguucuacgcggagggcucccgcgggggcagccaggccuccagccgguccagcucccgcagccggaacuccagccgcaacagcacccccggcuccagccgggggacgucccccgcccgcauggccggcaacgggggcgacgccgcgcucgcccugcugcuccuggaccggcugaaccagcucgagagcaagauguccgggaagggccagcagcagcagggccagaccgugaccaagaaguccgccgccgaggccagcaagaagccgcgccagaagcgcaccgcgacgaaggccuacaacgucacccaggccuucgggcggcgcggccccgagcagacccaggggaacuucggcgaccaggagcugauccggcaggggaccgacuacaagcacuggccccagaucgcccaguucgcccccagcgcguccgccuucuucggcaugagccgcaucggcauggaggugacgccguccgggaccuggcugaccuacaccggcgccaucaagcucgacgacaaggaccccaacuucaaggaccaggugauccugcugaacaagcacaucgacgccuacaagacguucccgcccaccgagcccaagaaggacaagaagaagaaggccgacgagacccaggcgcucccccagcggcagaagaagcagcagaccgucacgcugcugcccgccgccgaccucgacgacuucagcaagcagcugcagcaguccaugagcuccgccgacagcacccaggcgugaggacuagucccuguucccagagcccacuuuuuuuucuuuuuuugaaauaaaauagccugucuuucagaucucaaaggcucuuuucagagccaccaaaaaaaaaaaaaaaaaaaaaaaaaaaaaaaaaaaaaaaaaaaaaaaaaaaaaaaaaaaaaaaaaaaaaaaaaaaaaaaaaaaaaaaaaaaaaaaaaaaaa

SEQ ID NO: 19124 - RNA, 1532 nt, Artificial Sequence
  SARS-CoV-2__MT873324.1__nucleocapsid protein (N) mRNA gc
aggagagucccgcagucggcguccagcggcucugcuuguucgugugugugucguugcaggccuuauucaagcuuaccaugagcgacaacggcccccagaaccagcgcaacgccccgcggaucaccuucgggggccccuccgacagcaccggguccaaccagaacggcgagcgcagcggggcccgguccaagcagcgccggccccagggccugcccaacaacacggcgagcugguucaccgcccucacccagcacggcaaggaggaccugaaguucccgcgcgggcagggcgugcccaucaacaccaacuccagccccgacgaccagaucggguacuaccggcgcgccacgcggcgcauccggggcggggacggcaagaugaaggaccugagcccccgcugguacuucuacuaccucggcaccgggccggaggccggccugcccuacggggccaacaaggacggcaucaucugggucgcgaccgagggcgcccugaacacccccaaggaccacaucgggacgcggaaccccgccaacaacgccgcgaucgugcuccagcugccgcagggcaccacccugcccaagggguucuacgccgagggcucccgcgggggcucccaggccagcucccggagcuccagccgcucccggaacagcucccgcaacagcacccccggcagcucccgggggacgagccccgcccgcauggccggcaacgggggcgacgcggcccucgcccugcugcuccuggaccggcugaaccagcucgaguccaagaugagcgggaagggccagcagcagcagggccagaccgugaccaagaaguccgccgccgaggcgagcaagaagccgcgccagaagcgcaccgccacgaaggccuacaacgucacccaggccuucgggcggcgcggccccgagcagacccaggggaacuucggcgaccaggagcugauccggcaggggaccgacuacaagcacuggccccagaucgcccaguucgcgcccuccgccagcgccuucuucggcaugucccgcaucggcauggaggugacgccgagcgggaccuggcugaccuacaccggcuccaucaagcucgacgacaaggaccccaacuucaaggaccaggugauccugcugaacaagcacaucgacgccuacaagacguucccgcccaccgagcccaagaaggacaagaagaagaaggccgacgagacccaggcgcucccccagcggcagaagaagcagcagaccgucacgcugcugcccgccgccgaccucgacgacuucagcaagcagcugcagcaguccaugagcuccgccgacagcacccaggcgugaggacuagucccuguucccagagcccacuuuuuuuucuuuuuuugaaauaaaauagccugucuuucagaucucaaaggcucuuuucagagccaccaaaaaaaaaaaaaaaaaaaaaaaaaaaaaaaaaaaaaaaaaaaaaaaaaaaaaaaaaaaaaaaaaaaaaaaaaaaaaaaaaaaaaaaaaaaaaaaaaaaaa

SEQ ID NO: 19125 - RNA, 1532 nt, Artificial Sequence
  SARS-CoV-2__MT873376.1__nucleocapsid protein (N) mRNA gc
aggagagucccgcagucggcguccagcggcucugcuuguucgugugugugucguugcaggccuuauucaagcuuaccaugagcgacaacggcccccagaaccagcgcaacgccccgcggaucaccuucgggggccccuccgacagcaccggguccaaccagaacggcgagcgcagcggggcccgguccaagcagcgccggccccagggccugcccaacaacacggcgagcugguucaccgcccucacccagcacggcaaggaggaccugaaguucccgcgcgggcagggcgugcccaucaacaccaacuccagccccgacgaccagaucggguacuaccggcgcgccacgcggcgcauccggggcggggacggcaagaugaaggaccugagcccccgcugguacuucuacuaccucggcaccgggccggaggccggccugcccuacggggccaacaaggacggcaucaucugggucgcgaccgagggcgcccugaacacccccaaggaccacaucgggacgcggaaccccgccaacaacgccgcgaucgugcuccagcugccgcagggcaccacccugcccaagggguucuacgccgagggcucccgcgggggcucccaggccagcucccggagcuccagccgcucccggaacagcucccgcaacagcacccccggcagcucccgggggacgagccccgcccgcauggccggcaacgggggcgacgcggcccucgcccugcugcuccuggaccggcugaaccagcucgaguccaagaugagcgggaagggccagcagcagcagggccagaccgugaccaagaaguccgccgccgaggcgagcaagaagccgcgccagaagcgcaccgccacgaaggccuacaacgucacccaggccuucgggcggcgcggccccgagcagacccaggggaacuucggcgaccaggagcugauccggcaggggaccgacuacaagcacuggccccagaucgcccaguucgcgcccuccgccagcgccuucuucggcaugucccgcaucggcauggaggugacgccgagcgggaccuggcugaccuacaccggcgccaucaagcucgacgacaaggaccccaacuucaaggaccaggugauccugcugaacaagcacaucgacgccuacaagacguucccgcccaccgagcccaagaaggacaagaagaagaaggcguacgagacccaggcccucccccagcggcagaagaagcagcagaccgucacgcugcugcccgccgccgaccucgacgacuucuccaagcagcugcagcagagcauguccagcgcggacuccacccaggccugaggacuagucccuguucccagagcccacuuuuuuuucuuuuuuugaaauaaaauagccugucuuucagaucucaaaggcucuuuucagagccaccaaaaaaaaaaaaaaaaaaaaaaaaaaaaaaaaaaaaaaaaaaaaaaaaaaaaaaaaaaaaaaaaaaaaaaaaaaaaaaaaaaaaaaaaaaaaaaaaaaaaa

SEQ ID NO: 19126 - RNA, 1532 nt, Artificial Sequence
  SARS-CoV-2__MT873378.1__nucleocapsid protein (N) mRNA gc
aggagagucccgcagucggcguccagcggcucugcuuguucgugugugugucguugcaggccuuauucaagcuuaccaugagcgacaacggcccccagaaccagcgcaacgccccgcggaucaccuucgggggccccuccgacagcaccggguccaaccagaacggcgagcgcagcggggcccgguccaagcagcgccggccccagggccugcccaacaacacggcgagcugguucaccgcccucacccagcacggcaaggaguaccugaaguucccgcgcgggcagggcgugcccaucaacaccaacuccagccccgacgaccagaucggguacuaccggcgcgccacgcggcgcauccggggcggggacggcaagaugaaggaccugagcccccgcugguacuucuacuaccucggcaccgggccggaggccggccugcccuacggggccaacaaggacggcaucaucugggucgcgaccgagggcgcccugaacacccccaaggaccacaucgggacgcggaaccccgccaacaacgccgcgaucgugcuccagcugccgcagggcaccacccugcccaagggguucuacgccgagggcucccgcgggggcucccaggccagcucccggagcuccagccgcucccggaacagcucccgcaacagcacccccggcagcucccgggggacgagccccgcccgcauggccggcaacgggggcgacgcggcccucgcccugcugcuccuggaccggcugaaccagcucgaguccaagaugagcgggaagggccagcagcagcagggccagaccgugaccaagaaguccgccgccgaggcgagcaagaagccgcgccagaagcgcaccgccacgaaggccuacaacgucacccaggccuucgggcggcgcggccccgagcagacccaggggaacuucggcgaccaggagcugauccggcaggggaccgacuacaagcacuggccccagaucgcccaguucgcgcccuccgccagcgccuucuucggcaugucccgcaucggcauggaggugacgccgagcgggaccuggcugaccuacaccggcgccaucaagcucgacgacaaggaccccaacuucaaggaccaggugauccugcugaacaagcacaucgacgccuacaagacguucccgcccaccgagcccaagaaggacaagaagaagaaggcggacgagacccaggcccucccccagcggcagaagaagcagcagaccgucacgcugcugcccgccgccgaccucgacgacuucuccaagcagcugcagcagagcauguccagcgcggacuccacccaggccugaggacuagucccuguucccagagcccacuuuuuuuucuuuuuuugaaauaaaauagccugucuuucagaucucaaaggcucuuuucagagccaccaaaaaaaaaaaaaaaaaaaaaaaaaaaaaaaaaaaaaaaaaaaaaaaaaaaaaaaaaaaaaaaaaaaaaaaaaaaaaaaaaaaaaaaaaaaaaaaaaaaaa

SEQ ID NO: 19127 - RNA, 1532 nt, Artificial Sequence
  SARS-CoV-2__MT873381.1__nucleocapsid protein (N) mRNA gc
aggagagucccgcagucggcguccagcggcucugcuuguucgugugugugucguugcaggccuuauucaagcuuaccaugagcgacaacggcccccagaaccagcgcaacgccccgcggaucaccuucgggggccccuccgacagcaccggguccaaccagaacggcgagcgcagcggggcccgguccaagcagcgccggccccagggccugcccaacaacacggcgagcugguucaccgcccucacccagcacggcaaggaggaccugaaguucccgcgcgggcagggcgugcccaucaacaccaacuccagccccgacgaccagaucggguacuaccggcgcgccacgcggcgcauccggggcggggacggcaagaugaaggaccugagcccccgcugguacuucuacuaccucggcaccgggccggaggccggccugcccuacggggccaacaaggacggcaucaucugggucgcgaccgagggcgcccugaacacccccaaggaccacaucgggacgcggaaccccgccaacaacgccgcgaucgugcuccagcugccgcagggcaccacccugcccaagggguucuacgccgagggcucccgcgggggcucccaggccagcucccggagcuccagccgcucccggaacagcucccgcaacagcacccccggcagcucccgggggacgagccccgcccgcauggccggcaacgggggcgacgcggcccucgcccugcugcuccuggaccggcugaaccagcucgaguccaagaugagcgggaagggccagcagcagcagggccagaccgugaccaagaaguccgccgccgaggcgagcaagaagccgcgccagaagcgcaccgccacgaaggccuacaacgucacccaggccuucgggcggcgcggccccgagcagacccaggggaacuucggcgaccaggagcugauccggcaggggaccgacuacaagcacuggccccagaucgcccaguucgcgcccuccgccagcgccuucuucggcaugucccgcaucggcauggaggugacgccgagcgggaccuggcugaccuacaccggcgccaucaagcucgacgacaaggaccccaacuucaaggaccaggugauccugcugaacaagcacaucgacgccuacaagacguucccgcccaccgagcccaagaaggacaagaagaagaaggcggacgagacccaggcccucccccagcggcagaagaagcagcagaccgucauccugcugcccgccgccgaccucgacgacuucuccaagcagcugcagcagagcauguccagcgcggacuccacgcaggccugaggacuagucccuguucccagagcccacuuuuuuuucuuuuuuugaaauaaaauagccugucuuucagaucucaaaggcucuuuucagagccaccaaaaaaaaaaaaaaaaaaaaaaaaaaaaaaaaaaaaaaaaaaaaaaaaaaaaaaaaaaaaaaaaaaaaaaaaaaaaaaaaaaaaaaaaaaaaaaaaaaaaa

SEQ ID NO: 19128 - RNA, 1532 nt, Artificial Sequence
  SARS-CoV-2__MT873396.1__nucleocapsid protein (N) mRNA gc
aggagagucccgcagucggcguccagcggcucugcuuguucgugugugugucguugcaggccuuauucaagcuuaccaugagcgacaacggcccccagaaccagcgcaacgccccgcggaucaccuucgggggccccuccgacagcaccggguccaaccagaacggcgagcgcagcggggcccgguccaagcagcgccggccccagggccugcccaacaacacggcgagcugguucaccgcccucacccagcacggcaaggaggaccugaaguucccgcgcgggcagggcgugcccaucaacaccaacuccagccccgacgaccagaucggguacuaccggcgcgccacgcggcgcauccggggcggggacggcaagaugaaggaccugagcccccgcugguacuucuacuaccucggcaccgggccggaggccggccugcccuacggggccaacaaggacggcaucaucugggucgcgaccgagggcgcccugaacacccccaaggaccacaucgggacgcggaaccccgccaacaacgccgcgaucgugcuccagcugccgcagggcaccacccugcccaagggguucuacgccgagggcucccgcgggggcucccaggccagcucccggagcuccagccgcucccggaacagcucccgcaacagcacccccggcagcucccgggggacgagccccgcccgcauggugggcaacgggggcgacgccgcgcucgcccugcugcuccuggaccggcugaaccagcucgaguccaagaugagcgggaagggccagcagcagcagggccagaccgucaccaagaaguccgccgccgaggccagcaagaagccgcgccagaagcgcaccgcgacgaaggccuacaacgugacccaggccuucgggcggcgcggccccgagcagacccaggggaacuucggcgaccaggagcugauccggcaggggaccgacuacaagcacuggccccagaucgcccaguucgcccccuccgcgagcgccuucuucggcaugucccgcaucggcauggaggugacgccgagcgggaccuggcugaccuacaccggcgccaucaagcucgacgacaaggaccccaacuucaaggaccaggucauccugcugaacaagcacaucgacgccuacaagacguucccgcccaccgagcccaagaaggacaagaagaagaaggccgacgagacccaggcgcucccccagcggcagaagaagcagcagaccgugacgcugcugcccgccgccgaccucgacgacuucuccaagcagcugcagcagagcauguccagcgccgacuccacccaggcgugaggacuagucccuguucccagagcccacuuuuuuuucuuuuuuugaaauaaaauagccugucuuucagaucucaaaggcucuuuucagagccaccaaaaaaaaaaaaaaaaaaaaaaaaaaaaaaaaaaaaaaaaaaaaaaaaaaaaaaaaaaaaaaaaaaaaaaaaaaaaaaaaaaaaaaaaaaaaaaaaaaaaa

SEQ ID NO: 19129 - RNA, 1532 nt, Artificial Sequence
  SARS-CoV-2__MT873497.1__nucleocapsid protein (N) mRNA gc
aggagagucccgcagucggcguccagcggcucugcuuguucgugugugugucguugcaggccuuauucaagcuuaccaugagcgacaacggcccccagaaccagcgcaacgccccgcggaucaccuucgggggccccuccgacagcaccggguccaaccagaacggcgagcgcagcggggcccgguccaagcagcgccggccccagggccugcccaacaacacggcgagcugguucaccgcccucacccagcacggcaaggaggaccugaaguucccgcgcgggcagggcgugcccaucaacaccaacuccagccccgacgaccagaucggguacuaccggcgcgccacgcggcgcauccggggcggggacggcaagaugaaggaccugagcccccgcugguacuucuacuaccucggcaccgggccggaggccggccugcccuacggggccaacaaggacggcaucaucugggucgcgaccgagggcgcccugaacacccccaaggaccacaucgggacgcggaaccccgccaacaacgccgcgaucgugcuccagcugccgcagggcaccacccugcccaagggguucuacgccgagggcagccgcgggggcucccaggccagcucccggagcuccagccgcucccggaacagcucccgcaacagcacccccggcagcucccgggggacgagccccucccgcauggccggcaacgggggcgacgccgcgcucgcccugcugcuccuggaccggcugaaccagcucgagagcaagauguccgggaagggccagcagcagcagggccagaccgugaccaagaaguccgccgccgaggccuccaagaagccgcgccagaagcgcaccgcgacgaaggccuacaacgucacccaggccuucgggcggcgcggccccgagcagacccaggggaacuucggcgaccaggagcugauccggcaggggaccgacuacaagcacuggccccagaucgcccaguucgcccccagcgcguccgccuucuucggcaugagccgcaucggcauggaggugacgccguccgggaccuggcugaccuacaccggcgccaucaagcucgacgacaaggaccccaacuucaaggaccaggugauccugcugaacaagcacaucgacgccuacaagacguucccgcccaccgagcccaagaaggacaagaagaagaaggccgacgagacccaggcgcucccccagcggcagaagaagcagcagaccgucacgcugcugcccgccgccgaccucgacgacuucagcaagcagcugcagcaguccaugagcuccgccgacagcacccaggcgugaggacuagucccuguucccagagcccacuuuuuuuucuuuuuuugaaauaaaauagccugucuuucagaucucaaaggcucuuuucagagccaccaaaaaaaaaaaaaaaaaaaaaaaaaaaaaaaaaaaaaaaaaaaaaaaaaaaaaaaaaaaaaaaaaaaaaaaaaaaaaaaaaaaaaaaaaaaaaaaaaaaaa

SEQ ID NO: 19130 - RNA, 1532 nt, Artificial Sequence
  SARS-CoV-2__MT876556.1__nucleocapsid protein (N) mRNA gc
aggagagucccgcagucggcguccagcggcucugcuuguucgugugugugucguugcaggccuuauucaagcuuaccaugagcgacaacggcccccagaaccagcgcgacgccccgcggaucaccuucgggggccccuccgacagcaccggguccaaccagaacggcgagcgcagcggggcccgguccaagcagcgccggccccagggccugcccaacaacacggcgagcugguucaccgcccucacccagcacggcaaggaggaccugaaguucccgcgcgggcagggcgugcccaucaacaccaacuccagccccgacgaccagaucggguacuaccggcgcgccacgcggcgcauccggggcggggacggcaagaugaaggaccugagcccccgcugguacuucuacuaccucggcaccgggccggaggccggccugcccuacggggccaacaaggacggcaucaucugggucgcgaccgagggcgcccugaacacccccaaggaccacaucgggacgcggaaccccgccaacaacgccgcgaucgugcuccagcugccgcagggcaccacccugcccaagggguucuacgccgagggcucccgcgggggcucccaggccagcucccggagcuccagccgcucccggaacagcucccgcaacagcacccccggcagcuccaagcggacgagccccgcccgcauggccgggaacggcggggacgcggcccucgcccugcugcuccuggaccggcugaaccagcucgaguccaagaugagcggcaaggggcagcagcagcagggccagaccgugaccaagaaguccgccgccgaggcgagcaagaagccgcgccagaagcgcaccgccacgaaggccuacaacgucacccaggccuucggccggcgcgggcccgagcagacccagggcaacuucggggaccaggagcugauccggcagggcaccgacuacaagcacuggccccagaucgcccaguucgcgcccuccgccagcgccuucuucgggaugucccgcaucggcauggaggugacgccgagcggcaccuggcugaccuacaccggggccaucaagcucgacgacaaggaccccaacuucaaggaccaggugauccugcugaacaagcacaucgacgccuacaagacguucccgcccaccgagcccaagaaggacaagaagaagaaggcggacgagacccaggcccucccccagcggcagaagaagcagcagaccgucacgcugcugcccgccgccgaccucgacgacuucuccaagcagcugcagcagagcauguccagcgcggacuccacccaggccugaggacuagucccuguucccagagcccacuuuuuuuucuuuuuuugaaauaaaauagccugucuuucagaucucaaaggcucuuuucagagccaccaaaaaaaaaaaaaaaaaaaaaaaaaaaaaaaaaaaaaaaaaaaaaaaaaaaaaaaaaaaaaaaaaaaaaaaaaaaaaaaaaaaaaaaaaaaaaaaaaaaaa

SEQ ID NO: 19131 - RNA, 1532 nt, Artificial Sequence
  SARS-CoV-2__MT877324.1__nucleocapsid protein (N) mRNA gc
aggagagucccgcagucggcguccagcggcucugcuuguucgugugugugucguugcaggccuuauucaagcuuaccaugagcgacaacggcccccagaaccagcgcaacgccccgcggaucaccuucgggggccccuccgacagcaccggguccaaccagaacggcgagcgcagcggggcccgguccaagcagcgccggccccagggccugcccaacaacacggcgagcugguucaccgcccucacccagcacggcaaggaggaccugaaguucccgcgcgggcagggcgugcccaucaacaccaacuccagccccgacgaccagaucggguacuaccggcgcgccacgcggcgcauccggggcggggacggcaagaugaaggaccugagcccccgcugguacuucuacuaccucggcaccgggccggaggccggccugcccuacggggccaacaaggacggcaucaucugggucgcgaccgagggcgcccugaacacccccaaggaccacaucgggacgcggaaccccgccaacaacgccgcgaucgugcuccagcugccgcagggcaccacccugcccaagggguucuacgccgagggcagccgcgggggcucccaggccagcucccggagcucccuccgcagccggaacuccagccgcaacuccacccccggcagcagccgggggacgucccccgcccgcauggccggcaacgggggcgacgcggcccuggcccugcuccugcuggaccggcucaaccagcuggagagcaagauguccgggaagggccagcagcagcagugccagaccgugaccaagaaguccgccgccgaggcguccaagaagccgcgccagaagcgcaccgccacgaaggccuacaacgucacccaggccuucggccggcgcgggcccgagcagacccagggcaacuucggggaccaggagcugauccggcagggcaccgacuacaagcacuggccccagaucgcccaguucgcgcccagcgccuccgccuucuucgggaugagccgcaucggcauggaggugacgccguccggcaccuggcucaccuacaccggggccaucaagcuggacgacaaggaccccaacuucaaggaccaggugauccugcucaacaagcacaucgacgccuacaagacguucccgcccaccgagcccaagaaggacaagaagaagaaggcggacgagacccaggcccugccccagcggcagaagaagcagcagaccgucacgcugcuccccgccgccgaccuggacgacuucagcaagcagcugcagcaguccaugagcuccgcggacagcacccaggccugaggacuagucccuguucccagagcccacuuuuuuuucuuuuuuugaaauaaaauagccugucuuucagaucucaaaggcucuuuucagagccaccaaaaaaaaaaaaaaaaaaaaaaaaaaaaaaaaaaaaaaaaaaaaaaaaaaaaaaaaaaaaaaaaaaaaaaaaaaaaaaaaaaaaaaaaaaaaaaaaaaaaa

SEQ ID NO: 19132 - RNA, 1532 nt, Artificial Sequence
  SARS-CoV-2__MT872501.1__nucleocapsid protein (N) mRNA gc
aggagagucccgcagucggcguccagcggcucugcuuguucgugugugugucguugcaggccuuauucaagcuuaccaugagcgacaacggcccccagaaccagcgcaacgccccgcggaucaccuucgggggccccuccgacagcaccggguccaaccagaacggcgagcgcagcggggcccgguccaagcagcgccggccccagggccugcccaacaacacggcgagcugguucaccgcccucacccagcacggcaaggaggaccugaaguucccgcgcgggcagggcgugcccaucaacaccaacuccagccccgacgaccagaucggguacuaccggcgcgccacgcggcgcauccggggcggggacggcaagaugaaggaccugagcccccgcugguacuucuacuaccucggcaccgggccggaggccggccugcccuacggggccaacaaggacggcaucaucugggucgcgaccgagggcgcccugaacacccccaaggaccacaucgggacgcggaaccccgccaacaacgccgcgaucgugcuccagcugccgcagggcaccacccugcccaagggguucuacgccgagggcagccgcgggggcucccaggccagcucccggagcuccagccgcucccggaacagcucccgcaacagcacccccggcagcaaccgggggaucucccccgcccgcauggccggcaacgggggcgacgcggcccucgcccugcugcuccuggaccggcugaaccagcucgagagcaagauguccgggaagggccagcagcagcagggccagacggugaccaagaaguccgccgccgaggcguccaagaagccgcgccagaagcgcaccgccaccaaggccuacaacgucacgcaggccuucgggcggcgcggccccgagcagacccaggggaacuucggcgaccaggagcugauccggcaggggaccgacuacaagcacuggccccagaucgcccaguucgcgcccagcgccuccgccuucuucggcaugagccgcaucggcauggaggugaccccguccgggacguggcugaccuacaccggcgccaucaagcucgacgacaaggaccccaacuucaaggaccaggugauccugcugaacaagcacaucgacgccuacaagaccuucccgcccacggagcccaagaaggacaagaagaagaaggcggacgagacccaggcccucccccagcggcagaagaagcagcagaccgucacccugcugcccgccgccgaccucgacgacuucagcaagcagcugcagcaguccaugagcuccgcggacagcacgcaggccugaggacuagucccuguucccagagcccacuuuuuuuucuuuuuuugaaauaaaauagccugucuuucagaucucaaaggcucuuuucagagccaccaaaaaaaaaaaaaaaaaaaaaaaaaaaaaaaaaaaaaaaaaaaaaaaaaaaaaaaaaaaaaaaaaaaaaaaaaaaaaaaaaaaaaaaaaaaaaaaaaaaaa

SEQ ID NO: 19133 - RNA, 1532 nt, Artificial Sequence
  SARS-CoV-2__MT856459.1__nucleocapsid protein (N) mRNA gc
aggagagucccgcagucggcguccagcggcucugcuuguucgugugugugucguugcaggccuuauucaagcuuaccaugagcgacaacggcccccagaaccagcgcaacgccucccggaucaccuucgggggcccgagcgacuccaccgggagcaaccagaacggcgagcgcuccggggcccggagcaagcagcgccggccccagggccugcccaacaacacggcguccugguucaccgcccucacccagcacggcaaggaggaccugaaguucccccgcgggcagggcgugccgaucaacaccaacagcucccccgacgaccagaucggguacuaccggcgcgccacgcggcgcauccggggcggggacggcaagaugaaggaccugagcccccgcugguacuucuacuaccucggcaccgggcccgaggccggccugccguacggggccaacaaggacggcaucaucugggucgcgaccgagggcgcccugaacacccccaaggaccacaucgggacgcggaaccccgccaacaacgccgcgaucgugcuccagcugccccagggcaccacccugccgaagggguucuacgccgagggcucccgcgggggcagccaggccuccagccgguccagcucccgcagccggaacuccagccgcaacagcacccccggcuccagcaagcggacgucccccgcccgcauggccgggaacggcggggacgcggcccucgcccugcugcuccuggaccggcugaaccagcucgagagcaagauguccggcaaggggcagcagcagcagggccagaccgugaccaagaaguccgccgccgaggcgagcaagaagccccgccagaagcgcaccgccacgaaggccuacaacgucacccaggccuucggccggcgcgggccggagcagacccagggcaacuucggggaccaggagcugauccggcagggcaccgacuacaagcacuggccccagaucgcccaguucgcgcccagcgccuccgccuucuucgggaugagccgcaucggcauggaggugacgcccuccggcaccuggcugaccuacaccggggccaucaagcucgacgacaaggacccgaacuucaaggaccaggugauccugcugaacaagcacaucgacgccuacaagacguucccgcccaccgagcccaagaaggacaagaagaagaaggcggacgagacccaggcccucccccagcggcagaagaagcagcagaccgucacgcugcugcccgccgccgaccucgacgacuucagcaagcagcugcagcaguccaugagcuccgcggacagcacccaggccugaggacuagucccuguucccagagcccacuuuuuuuucuuuuuuugaaauaaaauagccugucuuucagaucucaaaggcucuuuucagagccaccaaaaaaaaaaaaaaaaaaaaaaaaaaaaaaaaaaaaaaaaaaaaaaaaaaaaaaaaaaaaaaaaaaaaaaaaaaaaaaaaaaaaaaaaaaaaaaaaaaaaa

SEQ ID NO: 19134 - RNA, 1532 nt, Artificial Sequence
  SARS-CoV-2__MT846004.1__nucleocapsid protein (N) mRNA gc
aggagagucccgcagucggcguccagcggcucugcuuguucgugugugugucguugcaggccuuauucaagcuuaccaugagcgacaacggcccccagaaccagcgcaacgccccgcggaucaccuucgggggccccuccgacagcaccggguccaaccagaacggcgagcgcagcggggcccgguccaagcagcgccggccccagggccugcccaacaacacggcgagcugguucaccgcccucacccagcacggcaaggaggaccugaaguucccgcgcgggcagggcgugcccaucaacaccaacuccagccccgacgaccagaucggguacuaccggcgcgccacgcggcgcauccggggcggggacggcaagaugaaggaccugagcccccgcugguacuucuacuaccucggcaccgggccggaggccggccugcccuacggggccaacaaggacggcaucaucugggucgcgaccgagggcgcccugaacacccccaaggaccacaucgggacgcggaaccccgccaacaacgccgcgaucgugcuccagcugccgcagggcaccacccugcccaagggguucuacgccgagggcucccgcgggggcucccaggccagcucccggagcuccagccgcucccggaacagcucccgcaacagcacccccggcagcuccaagcggacgagccccgcccgcauggccgggaacggcggggacgcggcccucgcccugcugcuccuggaccggcugaaccagcucgaguccaagaugagcggcaaggggcagcagcagcagggccagaccgugaccaagaaguccgccgccgaggcgagcaagaagccgcgccagaagcgcaccgccacgaaggccuacaacgucacccaggccuucggccggcgcgggcccgagcagauccagggcaacuucggggaccaggagcugauccggcagggcaccgacuacaagcacuggccccagaucgcccaguucgcgcccuccgccagcgccuucuucgggaugucccgcaucggcauggaggugaccccgagcggcacguggcugaccuacaccggggccaucaagcucgacgacaaggaccccaacuucaaggaccaggugauccugcugaacaagcacaucgacgccuacaagaccuucccgcccacggagcccaagaaggacaagaagaagaaggcggacgagacccaggcccucccccagcggcagaagaagcagcagaccgucacccugcugcccgccgccgaccucgacgacuucuccaagcagcugcagcagagcauguccagcgcggacuccacgcaggccugaggacuagucccuguucccagagcccacuuuuuuuucuuuuuuugaaauaaaauagccugucuuucagaucucaaaggcucuuuucagagccaccaaaaaaaaaaaaaaaaaaaaaaaaaaaaaaaaaaaaaaaaaaaaaaaaaaaaaaaaaaaaaaaaaaaaaaaaaaaaaaaaaaaaaaaaaaaaaaaaaaaaa

SEQ ID NO: 19135 - RNA, 1532 nt, Artificial Sequence
  SARS-CoV-2__MT846007.1__nucleocapsid protein (N) mRNA gc
aggagagucccgcagucggcguccagcggcucugcuuguucgugugugugucguugcaggccuuauucaagcuuaccaugagcgacaacggcccccagaaccagcgcaacgccccgcggaucaccuucgggggccccuccgacagcaccggguccaaccagaacggcgagcgcagcggggcccgguccaagcagcgccggccccagggccugcccaacaacacggcgagcugguucaccgcccucacccagcacggcaaggaggaccugaaguucccgcgcgggcagggcgugcccaucaacaccaacuccagccccgacgaccagaucggguacuaccggcgcgccacgcggcgcauccggggcggggacggcaagaugaaggaccugagcccccgcugguacuucuacuaccucggcaccgggccggaggccggccugcccuacggggccaacaaggacggcaucaucugggucgcgaccgagggcgcccugaacacccccaaggaccacaucgggacgcggaaccccgccaacaacgccgcgaucgugcuccagcugccgcagggcaccacccugcccaagggguucuacgccgagggcucccgcgggggcucccaggccagcucccggagcuccagccgcucccggaacagcucccgcaacagcacccccggcagcuccaagcggacgagccccgcccgcauggccgggaacggcggggacgcggcccucgcccugcugcuccuggaccggcugaaccagcucgaguccaagaugagcggcaaggggcagcagcagcagggccagaccgugaccaagaaguccgccgccgaggcgagcaagaagccgcgccagaagcgcaccgccacgaaggccuacaacgucacccaggccuucggccggcgcgggcccgagcagacccagggcaacuucggggaccaggagcugauccggcagggcaccgacuacaagcacuggccccagaucgcccaguucgcgcccuccgccagcgccuucuucgggaugucccgcaucggcauggaggugacgccgagcggcaccuggcugaccuacaccggggccaucaagcucgacgacaaggaccccaacuucaaggaccaggugauccugcugaacaagcacaucgacgccuacaagacguucccgcccaccgagcccaagaaggacaagaagaagaaggcguacgagacccaggcccucccccagcggcagaagaagcagcagaccgucacgcugcugcccgccgccgaccucgacgacuucuccaagcagcugcagcagagcauguccagcgcggacuccacccaggccugaggacuagucccuguucccagagcccacuuuuuuuucuuuuuuugaaauaaaauagccugucuuucagaucucaaaggcucuuuucagagccaccaaaaaaaaaaaaaaaaaaaaaaaaaaaaaaaaaaaaaaaaaaaaaaaaaaaaaaaaaaaaaaaaaaaaaaaaaaaaaaaaaaaaaaaaaaaaaaaaaaaaa

SEQ ID NO: 19136 - RNA, 1532 nt, Artificial Sequence
  SARS-CoV-2__MT846010.1__nucleocapsid protein (N) mRNA gc
aggagagucccgcagucggcguccagcggcucugcuuguucgugugugugucguugcaggccuuauucaagcuuaccaugagcgacaacggcccccagaaccagcgcaacgccccgcggaucaccuucgggggccccuccgacagcaccggguccaaccagaacggcgagcgcagcggggcccgguccaagcagcgccggccccagggccugcccaacaacacggcgagcugguucaccgcccucacccagcacggcaaggaggaccugaaguucccgcgcgggcagggcgugcccaucaacaccaacuccagcccccacgaccagaucggguacuaccggcgcgccacgcggcgcauccggggcggggacggcaagaugaaggaccugagcccccgcugguacuucuacuaccucggcaccgggccggaggccggccugcccuacggggccaacaaggacggcaucaucugggucgcgaccgagggcgcccugaacacccccaaggaccacaucgggacgcggaaccccgccaacaacgccgcgaucgugcuccagcugccgcagggcaccacccugcccaagggguucuacgccgagggcucccgcgggggcucccaggccagcucccggagcuccagccgcucccggaacagcucccgcaacagcacccccggcagcuccaagcggacgagccccgcccgcauggccgggaacggcggggacgcggcccucgcccugcugcuccuggaccggcugaaccagcucgaguccaagaugagcggcaaggggcagcagcagcagggccagaccgugaccaagaaguccgccgccgaggcgagcaagaagccgcgccagaagcgcaccgccacgaaggccuacaacgucacccaggccuucggccggcgcgggcccgagcagacccagggcaacuucggggaccaggagcugauccggcagggcaccgacuacaagcacuggccccagaucgcccaguucgcgcccuccgccagcgccuucuucgggaugucccgcaucggcauggaggugacgccgagcggcaccuggcugaccuacaccggggccaucaagcucgacgacaaggaccccaacuucaaggaccaggugauccugcugaacaagcacaucgacgccuacaagacguucccgcccaccgagcccaagaaggacaagaagaagaaggcggacgagacccaggcccucccccagcggcagaagaagcagcagaccgucacgcugcugcccgccgccgaccucgacgacuucuccaagcagcugcagcagagcauguccagcgcggacuccacccaggccugaggacuagucccuguucccagagcccacuuuuuuuucuuuuuuugaaauaaaauagccugucuuucagaucucaaaggcucuuuucagagccaccaaaaaaaaaaaaaaaaaaaaaaaaaaaaaaaaaaaaaaaaaaaaaaaaaaaaaaaaaaaaaaaaaaaaaaaaaaaaaaaaaaaaaaaaaaaaaaaaaaaaa

SEQ ID NO: 19137 - RNA, 1532 nt, Artificial Sequence
  SARS-CoV-2__MT846480.1__nucleocapsid protein (N) mRNA gc
aggagagucccgcagucggcguccagcggcucugcuuguucgugugugugucguugcaggccuuauucaagcuuaccaugagcgacaacggcccccagaaccagcgcaacgccccgcggaucaccuucgggggccccuccgacagcaccggguccaaccagaacggcgagcgcagcggggcccgguccaagcagcgccggccccagggccugcccaacaacacggcgagcugguucaccgcccucacccagcacggcaaggaggaccugaaguucccgcgcgggcagggcgugcccaucaacaccaacuccagccccgacgaccagaucggguacuaccggcgcgccacgcggcgcauccggggcggggacggcaagaugaaggaccugagcccccgcugguacuucuacuaccucggcaccgggccggaggccggccugcccuacggggccaacaaggacggcaucaucugggucgcgaccgagggcgcccugaacacccccaaggaccacaucgggacgcggaaccccgccaacaacgccgcgaucgugcuccagcugccgcagggcaccacccugcccaagggguucuacgccgagggcucccgcgggggcucccaggccagcucccggagcuccagccgcucccggaacagcucccgcaacagcacccccggcagcuccgggggcacgagccccgcccggauggccgggaacggcggggacgcggcccucgcccugcugcuccuggaccgccugaaccagcucgaguccaagaugagcggcaagggccagcagcagcaggggcagaccgugaccaagaaguccgccgccgaggcgagcaagaagccgcggcagaagcgcaccgccacgaaggccuacaacgucacccaggccuucggccgccgggggcccgagcagacccagggcaacuucggggaccaggagcugauccgccagggcaccgacuacaagcacuggccccagaucgcccaguucgcgcccuccgccagcgccuucuucggcaugucccggaucgggauggaggugacgccgagcggcaccuggcugaccuacaccggggccaucaagcucgacgacaaggaccccaacuucaaggaccaggugauccugcugaacaagcacaucgacgccuacaagacguucucccccaccgagcccaagaaggacaagaagaagaaggcggacgagacccaggcccucccgcagcgccagaagaagcagcagaccgucacgcugcugcccgccgccgaccucgacgacuucagcaagcagcugcagcaguccaugagcuccgcggacagcacccaggccugaggacuagucccuguucccagagcccacuuuuuuuucuuuuuuugaaauaaaauagccugucuuucagaucucaaaggcucuuuucagagccaccaaaaaaaaaaaaaaaaaaaaaaaaaaaaaaaaaaaaaaaaaaaaaaaaaaaaaaaaaaaaaaaaaaaaaaaaaaaaaaaaaaaaaaaaaaaaaaaaaaaaa

SEQ ID NO: 19138 - RNA, 1532 nt, Artificial Sequence
  SARS-CoV-2__MT846494.1__nucleocapsid protein (N) mRNA gc
aggagagucccgcagucggcguccagcggcucugcuuguucgugugugugucguugcaggccuuauucaagcuuaccaugagcgacaacggcccccagaaccagcgcaacgccccgcggaucaccuucgggggccccuccgacagcaccggguccaaccagaacggcgagcgcagcggggcccgguccaagcagcgccggccccagggccugcccaacaacacggcgagcugguucaccgcccucacccagcacggcaaggaggaccugaaguucccgcgcgggcagggcgugcccaucaacaccaacuccagccccgacgaccagaucggguacuaccggcgcgccacgcggcgcauccggggcggggacggcaagaugaaggaccugagcccccgcugguacuucuacuaccucggcaccgggccggaggccggccugcccuacggggccaacaaggacggcaucaucugggucgcgaccgagggcgcccugaacacccccaaggaccacaucgggacgcggaaccccgccaacaacgccgcgaucgugcuccagcugccgcagggcaccacccugcccaagggguucuacgccgagggcagccgcgggggcucccaggccagcucccggagcuccagccgcucccggaacagcucccgcaacagcacccccggcagcuccagcgggacgucccccgcccggauggccggcaacgggggcgacgcggcccucgcccugcugcuccuggaccgccugaaccagcucgagagcaagauguccgggaagggccagcagcagcagggccagaccgugaccaagaaguccgccgccgaggcguccaagaagccgcggcagaagcgcaccgccacgaaggccuacaacgucacccaggccuucgggcgccggggccccgagcagacccaggggaacuucggcgaccaggagcugauccgccaggggaccgacuacaagcacuggccccagaucgcccaguucgcgcccagcgccuccgccuucuucggcaugagccggaucggcauggaggugacgccguccgggaccuggcugaccuacaccggcgccaucaagcucgacgacaaggaccccaacuucaaggaccaggugauccugcugaacaagcacaucgacgccuacaagacguucccgcccaccgagcccaagaaggacaagaagaagaaggcggacgagacccaggcccucccccagcgccagaagaagcagcagaccgucacgcugcugcccgccgccgaccucgacgacuucagcaagcagcugcagcaguccaugagcuccgcggacagcacccaggccugaggacuagucccuguucccagagcccacuuuuuuuucuuuuuuugaaauaaaauagccugucuuucagaucucaaaggcucuuuucagagccaccaaaaaaaaaaaaaaaaaaaaaaaaaaaaaaaaaaaaaaaaaaaaaaaaaaaaaaaaaaaaaaaaaaaaaaaaaaaaaaaaaaaaaaaaaaaaaaaaaaaaa

SEQ ID NO: 19139 - RNA, 1532 nt, Artificial Sequence
  SARS-CoV-2__MT846526.1__nucleocapsid protein (N) mRNA gc
aggagagucccgcagucggcguccagcggcucugcuuguucgugugugugucguugcaggccuuauucaagcuuaccaugagcgacaacggcccccagaaccagcgcaacgccccgcggaucaccuucgggggccccuccgacagcaccggguccaaccagaacggcgagcgcagcggggcccgguccaagcagcgccggccccagggccugcccaacaacacggcgagcugguucaccgcccucacccagcacggcaaggaggaccugaaguucccgcgcgggcagggcgugcccaucaacaccaacuccagccccgacgaccagaucggguacuaccggcgcgccacgcggcgcauccggggcggggacggcaagaugaaggaccugagcccccgcugguacuucuacuaccucggcaccgggccggaggccggccugcccuacggggccaacaaggacggcaucaucugggucgcgaccgagggcgcccugaacacccccaaggaccacaucgggacgcggaaccccgccaacaacgccgcgaucgugcuccagcugccgcagggcaccacccugcccaagggguucuacgccgagggcucccgcgggggcucccaggccagcucccggagcuccagccgcucccggaacagcucccgcaacagcacccccggcagcucccgggggacgagccccgcccgcauggccggcaacgggggcgacgcggcccucgcccugcugcuccuggaccggcugaaccagcucgaguccaagaugagcgggaagggccagcagcagcagggccagaccgugaccaagaaguccgccgccgaggcgagcaagaagccgcgccagaagcgcaccgccacgaaggccuacaacgucacccaggccuucgggcggcgcggccccgagcagacccaggggaacuucggcgaccaggagcugauccggcaggggaccgacuacaagcacuggccccagaucgcccaguucgcgcccuccgccagcgccuucuucggcaugucccgcaucggcauggaggugacgccgagcgggaccuggcugaccuacaccggcgccaucaagcucgacgacaaggaccccaacuucaaggaccaggugauccugcugaacaagcacaucgacgccuacaagacguucccgcccaccgagcccaagaaggacaagaagaagaaggcggacgagauccaggcccucccccagcggcagaagaagcagcagaccgucacccugcugcccgccgccgaccucgacgacuucuccaagcagcugcagcagagcauguccagcgcggacuccacgcaggccugaggacuagucccuguucccagagcccacuuuuuuuucuuuuuuugaaauaaaauagccugucuuucagaucucaaaggcucuuuucagagccaccaaaaaaaaaaaaaaaaaaaaaaaaaaaaaaaaaaaaaaaaaaaaaaaaaaaaaaaaaaaaaaaaaaaaaaaaaaaaaaaaaaaaaaaaaaaaaaaaaaaaa

SEQ ID NO: 19140 - RNA, 1532 nt, Artificial Sequence
  SARS-CoV-2__MT846598.1__nucleocapsid protein (N) mRNA gc
aggagagucccgcagucggcguccagcggcucugcuuguucgugugugugucguugcaggccuuauucaagcuuaccaugagcgacaacggcccccagaaccagcgcaacgccccgcggaucaccuucgggggccccuccgacagcaccggguccaaccagaacggcgagcgcagcggggcccgguccaagcagcgccggccccagggccugcccaacaacacggcgagcugguucaccgcccucacccagcacggcaaggaggaccugaaguucccgcgcgggcagggcgugcccaucaacaccaacuccagccccgacgaccagaucggguacuaccggcgcgccacgcggcgcauccggggcggggacggcaagaugaaggaccugagcccccgcugguacuucuacuaccucggcaccgggccggaggccggccugcccuacggggccaacaaggacggcaucaucugggucgcgaccgagggcgcccugaacacccccaaggaccacaucgggacgcggaaccccgccaacaacgccgcgaucgugcuccagcugccgcagggcaccacccugcccaagggguucuacgccgagggcucccgcgggggcucccaggccagcucccggagcuccagccgcucccggaacagcucccgcaacagcacccccggcagcucccgggggacgagccccgcccgcauggccggcaacgggggcgacgcggcccucgcccugcugcuccuggaccggcugaaccagcucgaguccaagaugagcgggaagggccagcagcagcagggccagaccgugaccaagaaguccgccgccgaggcgagcaagaagccgcgccagaagcgcaccgccacgaaggccuacaacgucacccaggccuucgggcggcgcggccccgagcagacccaggggaacuucggcgaccaggagcugauccggcaggggaccgacuacaagcacuggccccagaucgcccaguucgcgcccuccgccagcgccuucuucggcaugucccgcaucggcauggaggugacgccgagcgggaccuggcugaccuacaccggcgccaucaagcucgacgacaaggaccccaacuucaaggaccaggugauccugcugaacaagcacaucgacgccuacaagacguucccgcccaccgagcccaagaaggacaagaagaagaaggcggacgccacccaggcccucccccagcggcagaagaagcagcagaccgucacgcugcugcccgccgcggaccucgacgacuucuccaagcagcugcagcagagcauguccagcgccgacuccacccaggccugaggacuagucccuguucccagagcccacuuuuuuuucuuuuuuugaaauaaaauagccugucuuucagaucucaaaggcucuuuucagagccaccaaaaaaaaaaaaaaaaaaaaaaaaaaaaaaaaaaaaaaaaaaaaaaaaaaaaaaaaaaaaaaaaaaaaaaaaaaaaaaaaaaaaaaaaaaaaaaaaaaaaa

SEQ ID NO: 19141 - RNA, 1532 nt, Artificial Sequence
  SARS-CoV-2__MT846653.1__nucleocapsid protein (N) mRNA gc
aggagagucccgcagucggcguccagcggcucugcuuguucgugugugugucguugcaggccuuauucaagcuuaccaugagcgacaacggcccccagaaccagcgcaacgccccgcggaucaccuucgggggccccuccgacagcaccggguccaaccagaacggcgagcgcagcggggcccgguccaagcagcgccggccccagggccugcccaacaacacggcgagcugguucaccgcccucacccagcacggcaaggaggaccugaaguucccgcgcgggcagggcgugcccaucaacaccaacuccagccccgacgaccagaucggguacuaccggcgcgccacgcggcgcauccggggcggggacggcaagaugaaggaccugagcccccgcugguacuucuacuaccucggcaccgggccggaggccggccugcccuacggggccaacaaggacggcaucaucugggucgcgaccgagggcgcccugaacacccccaaggaccacaucgggacgcggaaccccgccaacaacgccgcgaucgugcuccagcugccgcagggcaccacccugcccaagggguucuacgccgagggcucccgcgggggcucccaggccagcucccggagcuccagccgcucccggaacagcucccgcaacagcacccccggcagcucccgggggacgagccccgcccgcauggccggcaacgggggcgacgcggcccucgcccugcugcuccuggaccggcugaaccagcucgaguccaagaugagcgggaagggccagcagcagcagggccagaccgugaccaagaaguccgccgccgaggcgagcaagaagccgcgccagaagcgcaccgccacgaaggccuacaacgucacccaggccuucgggcggcgcggccccgagcagacccaggggaacuucggcgaccaggagcugauccggcaggggaccgacuacaagcacuggccccagaucgcccaguucgcgcccuccgccagcgccuucuucggcaugucccgcaucggcauggaggugacgccgagcgggaccuggcugaccuacaccggcgccaucaagcucgacgacaaggaccccaacuucaaggaccaggugauccugcugaacaagcacaucgacgccuacaagacguucccgcccaccgaguccaagaaggacaagaagaagaaggcggacgagacccaggcccucccccagcggcagaagaagcagcagaccgucacgcugcugcccgccgccgaccucgacgacuucagcaagcagcugcagcaguccaugagcuccgcggacagcacccaggccugaggacuagucccuguucccagagcccacuuuuuuuucuuuuuuugaaauaaaauagccugucuuucagaucucaaaggcucuuuucagagccaccaaaaaaaaaaaaaaaaaaaaaaaaaaaaaaaaaaaaaaaaaaaaaaaaaaaaaaaaaaaaaaaaaaaaaaaaaaaaaaaaaaaaaaaaaaaaaaaaaaaaa

SEQ ID NO: 19142 - RNA, 1532 nt, Artificial Sequence
  SARS-CoV-2__MT846665.1__nucleocapsid protein (N) mRNA gc
aggagagucccgcagucggcguccagcggcucugcuuguucgugugugugucguugcaggccuuauucaagcuuaccaugagcgacaacggcccccagaaccagcgcaacgccccgcggaucaccuucgggggccccuccgacagcaccggguccaaccagaacggcgagcgcagcggggcccgguccaagcagcgccggccccagggccugcccaacaacacggcgagcugguucaccgcccucacccagcacggcaaggaggaccugaaguucccgcgcgggcagggcgugcccaucaacaccaacuccagccccgacgaccagaucggguacuaccggcgcgccacgcggcgcauccggggcggggacggcaagaugaaggaccugagcccccgcugguacuucuacuaccucggcaccgggccggaggccggccugcacuacggggccaacaaggacggcaucaucugggucgcgaccgagggcgcccugaacacccccaaggaccacaucgggacgcggaaccccgccaacaacgccgcgaucgugcuccagcugccccagggcaccacccugccgaagggguucuacgccgagggcucccgcgggggcucccaggccagcucccggagcuccagccgcucccggaacagcucccgcaacagcacccccggcagcuccaagcggacgagccccgcccgcauggccgggaacggcggggacgcggcccucgcccugcugcuccuggaccggcugaaccagcucgaguccaagaugagcggcaaggggcagcagcagcagggccagaccgugaccaagaaguccgccgccgaggcgagcaagaagccccgccagaagcgcaccgccacgaaggccuacaacgucacccaggccuucggccggcgcgggccggagcagacccagggcaacuucggggaccaggagcugauccggcagggcaccgacuacaagcacuggccccagaucgcccaguucgcgcccuccgccagcgccuucuucgggaugucccgcaucggcauggaggugacgcccagcggcaccuggcugaccuacaccggggccaucaagcucgacgacaaggacccgaacuucaaggaccaggugauccugcugaacaagcacaucgacgccuacaagacguucccgcccaccgagcccaagaaggacaagaagaagaaggcggacgagacccaggcccucccccagcggcagaagaagcagcagaccgucacgcugcugcccgccgccgaccucgacgacuucuccaagcagcugcagcagagcauguccagcgcggacuccacccaggccugaggacuagucccuguucccagagcccacuuuuuuuucuuuuuuugaaauaaaauagccugucuuucagaucucaaaggcucuuuucagagccaccaaaaaaaaaaaaaaaaaaaaaaaaaaaaaaaaaaaaaaaaaaaaaaaaaaaaaaaaaaaaaaaaaaaaaaaaaaaaaaaaaaaaaaaaaaaaaaaaaaaaa

SEQ ID NO: 19143 - RNA, 1532 nt, Artificial Sequence
  SARS-CoV-2__MT846681.1__nucleocapsid protein (N) mRNA gc
aggagagucccgcagucggcguccagcggcucugcuuguucgugugugugucguugcaggccuuauucaagcuuaccaugagcgacaacggcccccagaaccagcgcaacgccccgcggaucaccuucgggggccccuccgacagcaccggguccaaccagaacggcgagcgcagcggggcccgguccaagcagcgccggccccagggccugcccaacaacacggcgagcugguucaccgcccucacccagcacggcaaggaggaccugaaguucccgcgcgggcagggcgugcccaucaacaccaacuccagccccgacgaccagaucggguacuaccggcgcgccacgcggcgcauccggggcggggacggcaagaugaaggaccugagcccccgcugguacuucuacuaccucggcaccgggccggaggccggccugcccuacggggccaacaaggacggcaucaucugggucgcgaccgagggcgcccugaacacccccaaggaccacaucgggacgcggaaccccgccaacaacgccgcgaucgugcuccagcugccgcagggcaccacccugcccaagggguucuacgccgagggcagccgcgggggcucccaggccagcucccggagcuccagccgcucccggaacagcucccgcaacagcacccccggcagcucccgggggacgagcuccgcccgcauggccggcaacgggggcgacgcggcccucgcccugcugcuccuggaccggcugaaccagcucgagagcaagauguccgggaagggccagcagcagcagggccagaccgugaccaagaaguccgccgccgaggcguccaagaagccccgccagaagcgcaccgccacgaaggccuacaacgucacccaggccuucgggcggcgcggcccggagcagacccaggggaacuucggcgaccaggagcugauccggcaggggaccgacuacaagcacuggccccagaucgcccaguucgcgcccagcgccuccgccuucuucggcaugagccgcaucggcauggaggugacgcccuccgggaccuggcugaccuacaccggcgccaucaagcucgacgacaaggacccgaacuucaaggaccaggugauccugcugaacaagcacaucgacgccuacaagacguucccgcccaccgagcccaagaaggacaagaagaagaaggcggacgagacccaggcccucccccagcggcagaagaagcagcagaccgucacgcugcugcccgccgccgaccucgacgacuucagcaagcagcugcagcaguccaugagcuccgcggacagcacccaggccugaggacuagucccuguucccagagcccacuuuuuuuucuuuuuuugaaauaaaauagccugucuuucagaucucaaaggcucuuuucagagccaccaaaaaaaaaaaaaaaaaaaaaaaaaaaaaaaaaaaaaaaaaaaaaaaaaaaaaaaaaaaaaaaaaaaaaaaaaaaaaaaaaaaaaaaaaaaaaaaaaaaaa

SEQ ID NO: 19144 - RNA, 1532 nt, Artificial Sequence
  SARS-CoV-2__MT847216.1__nucleocapsid protein (N) mRNA gc
aggagagucccgcagucggcguccagcggcucugcuuguucgugugugugucguugcaggccuuauucaagcuuaccaugagcgacaacggcccccagaaccagcgcaacgcccugcggaucaccuucgggggcccguccgacagcaccggguccaaccagaacggcgagcgcagcggggcccgguccaagcagcgccggccccagggccuccccaacaacacggcgagcugguucaccgcccugacccagcacggcaaggaggaccugaaguucccccgcgggcagggcgugccgaucaacaccaacuccagccccgacgaccagaucggguacuaccggcgcgccacgcggcgcauccggggcggggacggcaagaugaaggaccucagcccccgcugguacuucuacuaccugggcaccgggcccgaggccggccugccguacggggccaacaaggacggcaucaucugggucgcgaccgagggcgcccucaacacccccaaggaccacaucgggacgcggaaccccgccaacaacgccgcgaucgugcugcagcugccccagggcaccacccucccgaagggguucuacgccgagggcucccgcgggggcucccaggccagcucccggagcuccagccgcucccggaacagcucccgcaacagcacccccggcagcuccaagcggacgagccccgcccgcauggccgggaacggcggggacgcggcccuggcccugcuccugcuggaccggcucaaccagcuggaguccaagaugagcggcaaggggcagcagcagcagggccagaccgugaccaagaaguccgccgccgaggcgagcaagaagccccgccagaagcgcaccgccacgaaggccuacaacgucacccaggccuucggccggcgcgggccggagcagacccagggcaacuucggggaccaggagcugauccggcagggcaccgacuacaagcacuggccccagaucgcccaguucgcgcccuccgccagcgccuucuucgggaugucccgcaucggcauggaggugacgcccagcggcaccuggcucaccuacaccggggccaucaagcuggacgacaaggacccgaacuucaaggaccaggugauccugcucaacaagcacaucgacgccuacaagacguucccgcccaccgagcccaagaaggacaagaagaagaaggcggacgagacccaggcccugccccagcggcagaagaagcagcagaccgucacgcugcuccccgccgccgaccuggacgacuucuccaagcagcugcagcagagcauguccagcgcggacuccacccaggccugaggacuagucccuguucccagagcccacuuuuuuuucuuuuuuugaaauaaaauagccugucuuucagaucucaaaggcucuuuucagagccaccaaaaaaaaaaaaaaaaaaaaaaaaaaaaaaaaaaaaaaaaaaaaaaaaaaaaaaaaaaaaaaaaaaaaaaaaaaaaaaaaaaaaaaaaaaaaaaaaaaaaa

SEQ ID NO: 19145 - RNA, 1532 nt, Artificial Sequence
  SARS-CoV-2__MT847220.1__nucleocapsid protein (N) mRNA gc
aggagagucccgcagucggcguccagcggcucugcuuguucgugugugugucguugcaggccuuauucaagcuuaccaugagcgacaacggcccccagaaccagcgcaacgccccgcggaucaccuucgggggccccuccgacagcaccggguccaaccagaacggcgagcgcagcggggcccgguccaagcagcgccggccccagggccugcccaacaacacggcgagcugguucaccgcccucacccagcacggcaaggaggaccugaaguucccgcgcgggcagggcgugcccaucaacaccaacuccagccccgacgaccagaucggguacuaccggcgcgccacgcggcgcauccggggcggggacggcaagaugaaggaccugagcccccgcugguacuucuacuaccucggcaccgggccggaggccggccugcccuacggggccaacaaggacggcaucaucugggucgcgaccgagggcgcccugaacacccccaaggaccacaucgggacgcggaaccccgccaacaacgccgcgaucgugcuccagcugccgcagggcaccacccugcccaagggguucuacgccgagggcagccgcgggggcucccaggccagcucccggagcuccagccgcucccggaacagcucccgcaacagcacccccggcagcuccaagcggacgagccccgcccgcauguccgggaacggcggggacgccgcgcucgcccugcugcuccuggaccggcugaaccagcucgagagcaagauguccggcaaggggcagcagcagcagggccagaccgugaccaagaaguccgccgccgaggccuccaagaagccgcgccagaagcgcaccgcgacgaaggccuacaacgucacccaggccuucggccggcgcgggcccgagcagacccagggcaacuucggggaccaggagcugauccggcagggcaccgacuacaagcacuggccccagaucgcccaguucgcccccagcgcguccgccuucuucgggaugagccgcaucggcauggaggugacgccguccggcaccuggcugaccuacaccggggccaucaagcucgacgacaaggaccccaacuucaaggaccaggugauccugcugaacaagcacaucgacgccuacaagacguucccgcccaccgagcccaagaaggacaagaagaagaaggccgacgagacccaggcgcucccccagcggcagaagaagcagcagaccgucacgcugcugcccgccgccgaccucgacgacuucagcaagcagcugcagcaguccaugagcuccgccgacagcacccaggcgugaggacuagucccuguucccagagcccacuuuuuuuucuuuuuuugaaauaaaauagccugucuuucagaucucaaaggcucuuuucagagccaccaaaaaaaaaaaaaaaaaaaaaaaaaaaaaaaaaaaaaaaaaaaaaaaaaaaaaaaaaaaaaaaaaaaaaaaaaaaaaaaaaaaaaaaaaaaaaaaaaaaaa

SEQ ID NO: 19146 - RNA, 1532 nt, Artificial Sequence
  SARS-CoV-2__MT847221.1__nucleocapsid protein (N) mRNA gc
aggagagucccgcagucggcguccagcggcucugcuuguucgugugugugucguugcaggccuuauucaagcuuaccaugagcgacaacggcccccagaaccagcgcaacgccccgcggaucaccuucgggggccccuccgacagcaccggguccaaccagaacggcgagcgcagcggggcccgguccaagcagcgccggccccagggccugcccaacaacacggcgagcugguucaccgcccucacccagcacggcaaggaggaccugaaguucccgcgcgggcagggcgugcccaucaacaccaacuccagccccgacgaccagaucggguacuaccggcgcgccacgcggcgcauccggggcggggacggcaagaugaaggaccugagcccccgcugguacuucuacuaccucggcaccgggccggaggccggccugcccuacggggccaacaaggacggcaucaucugggucgcgaccgagggcgcccugaacacccccaaggaccacaucgggacgcggaaccccgccaacaacgccgcgaucgugcuccagcugccgcagggcaccacccugcccaagggguucuacgccgagggcucccgcgggggcucccaggccagcucccggagcuccagccgcucccggaacagcucccgcaacagcacccccggcagcuccaagcggacgagccccgcccgcauggccgggaacggcggggacgcggcccucgcccugcugcuccuggaccggcugaaccagcucgaguccaagaugagcggcaaggggcagcagcagcagggccagaccgugaccaagaaguccgccgccgaggcgagcaagaagccgcgccagaagcgcaccgccacgaaggccuacaacgucacccaggccuucggccggcgcgggcccgagcagacccagggcaacuucggggaccaggagcugauccggcagggcaccgacuacaagcacuggccccagaucgcccaguucgcgcccuccgccagcgccuucuucgggaugucccgcaucggcauggaggugacgccgagcggcaccuggcugaccuacaccggggccaucaagcucgacgacaaggaccccaacuucaaggaccaggugauccugcugaacaagcacaucgacgccuacaagacguucccgcccaccgagcccaagaaggacaagaagaagaaggcggacgccacccaggcccucccccagcggcagaagaagcagcagaccgucacgcugcugcccgccgcggaccucgacgacuucuccaagcagcugcagcagagcauguccagcgccgacuccacccaggccugaggacuagucccuguucccagagcccacuuuuuuuucuuuuuuugaaauaaaauagccugucuuucagaucucaaaggcucuuuucagagccaccaaaaaaaaaaaaaaaaaaaaaaaaaaaaaaaaaaaaaaaaaaaaaaaaaaaaaaaaaaaaaaaaaaaaaaaaaaaaaaaaaaaaaaaaaaaaaaaaaaaaa

SEQ ID NO: 19147 - RNA, 1532 nt, Artificial Sequence
  SARS-CoV-2__MT847223.1__nucleocapsid protein (N) mRNA gc
aggagagucccgcagucggcguccagcggcucugcuuguucgugugugugucguugcaggccuuauucaagcuuaccaugagcgacaacggcccccagaaccaccgcaacgccccgcggaucaccuucgggggccccuccgacagcaccggguccaaccagaacggcgagcgcagcggggcccgguccaagcagcgccggccccagggccugcccaacaacacggcgagcugguucaccgcccucacccagcacggcaaggaggaccugaaguucccgcgcgggcagggcgugcccaucaacaccaacuccagccccgacgaccagaucggguacuaccggcgcgccacgcggcgcauccggggcggggacggcaagaugaaggaccugagcccccgcugguacuucuacuaccucggcaccgggccggaggccggccugcccuacggggccaacaaggacggcaucaucugggucgcgaccgagggcgcccugaacacccccaaggaccacaucgggacgcggaaccccgccaacaacgccgcgaucgugcuccagcugccgcagggcaccacccugcccaagggguucuacgccgagggcucccgcgggggcucccaggccagcucccggagcuccagccgcucccggaacagcucccgcaacagcacccccggcagcuccaagcggacgagccccgcccgcauggccgggaacggcggggacgcggcccucgcccugcugcuccuggaccggcugaaccagcucgaguccaagaugagcggcaaggggcagcagcagcagggccagaccgugaccaagaaguccgccgccgaggcgagcaagaagccgcgccagaagcgcaccgccacgaaggccuacaacgucacccaggccuucggccggcgcgggcccgagcagacccagggcaacuucggggaccaggagcugauccggcagggcaccgacuacaagcacuggccccagaucgcccaguucgcgcccuccgccagcgccuucuucgggaugucccgcaucggcauggaggugacgccgagcggcaccuggcugaccuacaccggggccaucaagcucgacgacaaggaccccaacuucaaggaccaggugauccugcugaacaagcacaucgacgccuacaagacguucccgcccaccgagcccaagaaggacaagaagaagaaggcggacgagacccaggcccucccccagcggcagaagaagcagcagaccgucacgcugcugcccgccgccgaccucgacgacuucuccaagcagcugcagcagagcauguccagcgcggacuccacccaggccugaggacuagucccuguucccagagcccacuuuuuuuucuuuuuuugaaauaaaauagccugucuuucagaucucaaaggcucuuuucagagccaccaaaaaaaaaaaaaaaaaaaaaaaaaaaaaaaaaaaaaaaaaaaaaaaaaaaaaaaaaaaaaaaaaaaaaaaaaaaaaaaaaaaaaaaaaaaaaaaaaaaaa

SEQ ID NO: 19148 - RNA, 1532 nt, Artificial Sequence
  SARS-CoV-2__MT847226.1__nucleocapsid protein (N) mRNA gc
aggagagucccgcagucggcguccagcggcucugcuuguucgugugugugucguugcaggccuuauucaagcuuaccaugagcgacaacggcccccagaaccagcgcaacgccccgcggaucaccuucgggggccccuccgacagcaccggguccaaccagaacggcgagcgcagcggggcccgguccaagcagcgccggccccagggccugcccaacaacacggcgagcugguucaccgcccucacccagcacggcaaggaggaccugaaguucccgcgcgggcagggcgugcccaucaacaccaacuccagccccgacgaccagaucggguacuaccggcgcgccacgcggcgcauccggggcggggacggcaagaugaaggaccugagcccccgcugguacuucuacuaccucggcaccgggccggaggccggccugcccuacggggccaacaaggacggcaucaucugggucgcgaccgagggcgccuucaacacccccaaggaccacaucgggacgcggaaccccgccaacaacgccgcgaucgugcugcagcucccgcagggcaccacccugcccaagggguucuacgccgagggcucccgcgggggcucccaggccagcucccggagcuccagccgcucccggaacagcucccgcaacagcacccccggcagcuccaagcggacgagccccgcccgcauggccgggaacggcggggacgcggcccuggcccuccugcugcucgaccggcugaaccagcuggaguccaagaugagcggcaaggggcagcagcagcagggccagaccgugaccaagaaguccgccgccgaggcgagcaagaagccgcgccagaagcgcaccgccacgaaggccuacaacgucacccaggccuucggccggcgcgggcccgagcagacccagggcaacuucggggaccaggagcucauccggcagggcaccgacuacaagcacuggccccagaucgcccaguucgcgcccuccgccagcgccuucuucgggaugucccgcaucggcauggaggugacgccgagcggcaccuggcugaccuacaccggggccaucaagcuggacgacaaggaccccaacuucaaggaccaggugauccuccugaacaagcacaucgacgccuacaagacguucccgcccaccgagcccaagaaggacaagaagaagaaggcguacgagacccaggcccugccccagcggcagaagaagcagcagaccgucacgcuccugcccgccgccgaccuggacgacuucuccaagcagcuccagcagagcauguccagcgcggacuccacccaggccugaggacuagucccuguucccagagcccacuuuuuuuucuuuuuuugaaauaaaauagccugucuuucagaucucaaaggcucuuuucagagccaccaaaaaaaaaaaaaaaaaaaaaaaaaaaaaaaaaaaaaaaaaaaaaaaaaaaaaaaaaaaaaaaaaaaaaaaaaaaaaaaaaaaaaaaaaaaaaaaaaaaaa

SEQ ID NO: 19149 - RNA, 1532 nt, Artificial Sequence
  SARS-CoV-2__MT843286.1__nucleocapsid protein (N) mRNA gc
aggagagucccgcagucggcguccagcggcucugcuuguucgugugugugucguugcaggccuuauucaagcuuaccaugagcgacaacggcccccagaaccagcgcaacgccccgcggaucaccuucgggggccccuccgacagcaccggguccaaccagaacggcgagcgcagcggggcccgguccaagcagcgccggccccagggccugcccaacaacacggcgagcugguucaccgcccucacccagcacggcaaggaggaccugaaguucccgcgcgggcagggcgugcccaucaacaccaacuccagccccgacgaccagaucggguacuaccggcgcgccacgcggcgcauccggggcggggacggcaagaugaaggaccugagcccccgcugguacuucuacuaccucggcaccgggccggaggccggccugcccuacggggccaacaaggacggcaucaucugggucgcgaccgagggcgcccugaacacccccaaggaccacaucgggacgcggaaccccgccaacaacgccgcgaucgugcuccagcugccgcagggcaccacccugcccaagggguucuacgccgagggcucccgcgggggcucccaggccagcucccggagcuccagccgcucccggaacagcucccgcaacagcacccccggcagcucccgggggacgagccccgcccgcauggccggcaacgggggcgacgcggcccucgcccugcugcuccuggaccggcugaaccagcucgaguccaagaucagcgggaagggccagcagcagcagggccagaccgugaccaagaaguccgccgccgaggcgagcaagaagccgcgccagaagcgcaccgccacgaaggccuacaacgucacccaggccuucgggcggcgcggccccgagcagacccaggggaacuucggcgaccaggagcugauccggcaggggaccgacuacaagcacuggccccagaucgcccaguucgcgcccuccgccagcgccuucuucggcaugucccgcaucggcauggaggugacgccgagcgggaccuggcugaccuacaccggcgccaucaagcucgacgacaaggaccccaacuucaaggaccaggugauccugcugaacaagcacaucgacgccuacaagacguucccgcccaccgagcccaagaaggacaagaagaagaaggcggacgagacccaggcccucccccagcggcagaagaagcagcagaccgucacgcugcugcccgccgccgaccucgacgacuucuccaagcagcugcagcagagcauguccagcgcggacuccacccaggccugaggacuagucccuguucccagagcccacuuuuuuuucuuuuuuugaaauaaaauagccugucuuucagaucucaaaggcucuuuucagagccaccaaaaaaaaaaaaaaaaaaaaaaaaaaaaaaaaaaaaaaaaaaaaaaaaaaaaaaaaaaaaaaaaaaaaaaaaaaaaaaaaaaaaaaaaaaaaaaaaaaaaa

SEQ ID NO: 19150 - RNA, 1532 nt, Artificial Sequence
  SARS-CoV-2__MT843316.1__nucleocapsid protein (N) mRNA gc
aggagagucccgcagucggcguccagcggcucugcuuguucgugugugugucguugcaggccuuauucaagcuuaccaugagcgacaacggcccccagaaccagcgcaacgccccgcggaucaccuucgggggccccuccgacagcaccggguccaaccagaacggcgagcgcagcggggcccgguccaagcagcgccggccccagggccugcccaacaacacggcgagcugguucaccgcccucacccagcacggcaaggaggaccugaaguucccgcgcgggcagggcgugcccaucaacaccaacuccagccccgacgaccagaucggguacuaccggcgcgccacgcggcgcauccggggcggggacggcaagaugaaggaccugagcccccgcugguacuucuacuaccucggcaccgggccggaggccggccugcccuacggggccaacaaggacggcaucaucugggucgcgaccgagggcgcccugaacacccccaaggaccacaucgggacgcggaaccccgccaacaacgccgcgguggugcuccagcugccgcagggcaccacccugcccaagggguucuacgccgagggcagccgcgggggcucccaggccuacagccgguccagcucccgcagccggaacuccagccgcaacuccacccccggcagcagccgggggacgucccccgcccgcauggccggcaacgggggcgacgcggcccucgcccugcugcuccuggaccggcugaaccagcucgagagcaagauguccgggaagggccagcagcagcagggccagaccgucaccaagaaguccgccgccgaggcguccaagaagccgcgccagaagcgcaccgccacgaaggccuacaacgugacccaggccuucgggcggcgcggccccgagcagacccaggggaacuucggcgaccaggagcugauccggcaggggaccgacuacaagcacuggccccagaucgcccaguucgcgcccagcgccuccgccuucuucggcaugagccgcaucggcauggaggugacgccguccgggaccuggcugaccuacaccggcgccaucaagcucgacgacaaggaccccaacuucaaggaccaggucauccugcugaacaagcacaucgacgccuacaagacguucccgcccaccgagcccaagaaggacaagaagaagaaggcggacgagacccaggcccucccccagcggcagaagaagcagcagaccgugacgcugcugcccgccgccgaccucgacgacuucagcaagcagcugcagcaguccaugagcuccgcggacagcacccaggccugaggacuagucccuguucccagagcccacuuuuuuuucuuuuuuugaaauaaaauagccugucuuucagaucucaaaggcucuuuucagagccaccaaaaaaaaaaaaaaaaaaaaaaaaaaaaaaaaaaaaaaaaaaaaaaaaaaaaaaaaaaaaaaaaaaaaaaaaaaaaaaaaaaaaaaaaaaaaaaaaaaaaa

SEQ ID NO: 19151 - RNA, 1532 nt, Artificial Sequence
  SARS-CoV-2__MT844022.1__nucleocapsid protein (N) mRNA gc
aggagagucccgcagucggcguccagcggcucugcuuguucgugugugugucguugcaggccuuauucaagcuuaccaugagcgacaacggcccccagaaccagcgcaacgccccgcggaucaccuucgggggccccuccgacagcaccggguccaaccagaacggcgagcgcagcggggcccgguccaagcagcgccggccccagggccugcccaacaacacggcgagcugguucaccgcccucacccagcacggcaaggaggaccugaaguucccgcgcgggcagggcgugcccaucaacaccaacuccagccccgacgaccagaucggguacuaccggcgcgccacgcggcgcauccggggcggggacggcaagaugaaggaccugagcccccgcugguacuucuacuaccucggcaccgggccggaggccggccugcccuacggggccaacaaggacggcaucaucugggucgcgaccgagggcgcccugaacacccccaaggaccacaucgggacgcggaaccccgccaacaacgccgcgaucgugcuccagcugccgcagggcaccacccugcccaagggguucuacgccgagggcucccgcgggggcucccaggccagcucccggagcuccagccgcucccggaacagcucccgcaacagcacccccggcagcucccgggggacgagccccgcccgcauggccggcaacgggggcgacgcggcccucgcccugcugcuccuggaccggcugaaccagcucgaguccaagaugagcgggaagggccagcagcagcagggccagaccgugaccaagaaguccgccgccgaggcgagcaagaagccgcgccagaagcgcaccgccacgaaggccuacaacgucacccaggccuucgggcggcgcggccccgagcagacccaggggaacuucggcgaccaggagcugauccggcaggggaccgacuacaagcacuggccccagaucgcccaguucgcgcccuccgccagcgccuucuucggcaugucccgcgugggcauggaggugacgccgagcgggaccuggcugaccuacaccggcgccaucaagcucgacgacaaggaccccaacuucaaggaccaggucauccugcugaacaagcacaucgacgccuacaagacguucccgcccaccgagcccaagaaggacaagaagaagaaggcggacgagacccaggcccucccccagcggcagaagaagcagcagaccgugacgcugcugcccgccgccgaccucgacgacuucuccaagcagcugcagcagagcauguccagcgcggacuccacccaggccugaggacuagucccuguucccagagcccacuuuuuuuucuuuuuuugaaauaaaauagccugucuuucagaucucaaaggcucuuuucagagccaccaaaaaaaaaaaaaaaaaaaaaaaaaaaaaaaaaaaaaaaaaaaaaaaaaaaaaaaaaaaaaaaaaaaaaaaaaaaaaaaaaaaaaaaaaaaaaaaaaaaaa

SEQ ID NO: 19152 - RNA, 1532 nt, Artificial Sequence
  SARS-CoV-2__MT844044.1__nucleocapsid protein (N) mRNA gc
aggagagucccgcagucggcguccagcggcucugcuuguucgugugugugucguugcaggccuuauucaagcuuaccaugagcgacaacggcccccagaaccagcgcaacgccccgcggaucaccuucgggggccccuccgacagcaccggguccaaccagaacggcgagcgcagcggggcccgguccaagcagcgccggccccagggccugcccaacaacacggcgagcugguucaccgcccucacccagcacggcaaggaggaccugaaguucccgcgcgggcagggcgugcccaucaacaccaacuccagccccgacgaccagaucggguacuaccggcgcgccacgcggcgcauccggggcggggacggcaagaugaaggaccugagcccccgcugguacuucuacuaccucggcaccgggccggaggccggccugcccuacggggccaacaaggacggcaucaucugggucgcgaccgagggcgcccugaacacccccaaggaccacaucgggagccggaaccccgccaacaacgccgcgaucgugcuccagcugccgcagggcacgacccugcccaagggguucuacgccgagggcucccgcgggggcagccaggccuccagccgguccagcucccgcagccggaacuccagccgcaacagcacccccggcuccagccgggggaccucccccgcccgcauggccggcaacgggggcgacgcggcccucgcccugcugcuccuggaccggcugaaccagcucgagagcaagauguccgggaagggccagcagcagcagggccagacggugaccaagaaguccgccgccgaggcguccaagaagccgcgccagaagcgcaccgccaccaaggccuacaacgucacgcaggccuucgggcggcgcggccccgagcagacccaggggaacuucggcgaccaggagcugauccggcaggggaccgacuacaagcacuggccccagaucgcccaguucgcgcccagcgccuccgccuucuucggcaugagccgcaucggcauggaggugaccccguccgggacguggcugaccuacaccggcgccaucaagcucgacgacaaggaccccaacuucaaggaccaggugauccugcugaacaagcacaucgacgccuacaagaccuucccgcccacggagcccaagaaggacaagaagaagaaggcggacgagacccaggcccucccccagcggcagaagaagcagcagaccgucacccugcugcccgccgccgaccucgacgacuucagcaagcagcugcagcaguccaugagcuccgcggacagcacgcaggccugaggacuagucccuguucccagagcccacuuuuuuuucuuuuuuugaaauaaaauagccugucuuucagaucucaaaggcucuuuucagagccaccaaaaaaaaaaaaaaaaaaaaaaaaaaaaaaaaaaaaaaaaaaaaaaaaaaaaaaaaaaaaaaaaaaaaaaaaaaaaaaaaaaaaaaaaaaaaaaaaaaaaa

SEQ ID NO: 19153 - RNA, 1532 nt, Artificial Sequence
  SARS-CoV-2__MT831123.1__nucleocapsid protein (N) mRNA gc
aggagagucccgcagucggcguccagcggcucugcuuguucgugugugugucguugcaggccuuauucaagcuuaccaugagcgacaacggcccccagaaccagcgcaacgccccgcggaucaccuucggggagcccuccgacagcaccggcuccaaccagaacggggagcgcagcggcgcccgguccaagcagcgccggccccaggggcugcccaacaacacggcgagcugguucaccgcccucacccagcacggcaaggaggaccugaaguucccgcgcggccagggggugcccaucaacaccaacuccagccccgacgaccagaucggcuacuaccggcgcgccacgcggcgcauccgcgggggcgacgggaagaugaaggaccugagcccccggugguacuucuacuaccucggcaccggcccggaggccgggcugcccuacggcgccaacaaggacgggaucaucugggucgcgaccgagggcgcccugaacacccccaaggaccacaucggcacgcggaaccccgccaacaacgccgcgaucgugcuccagcugccgcaggggaccacccugcccaagggcuucuacgccgaggggucccgcggcgggucccaggccagcucccggagcuccagccgcucccggaacagcucccgcaacagcacccccggcagcuccaagcggacgagccccgcccgcauggccggcaacgggggcgacgcggcccucgcccugcugcuccuggaccggcugaaccagcucgaguccaagaugagcgggaagggccagcagcagcaggggcagaccgugaccaagaaguccgccgccgaggcgagcaagaagccgcgccagaagcgcaccgccacgaaggccuacaacgucacccaggccuucggccggcgcggccccgagcagacccaggggaacuucggcgaccaggagcugauccggcaggggaccgacuacaagcacuggccccagaucgcccaguucgcgcccuccgccagcgccuucuucggcaugucccgcaucgggauggaggugacgccgagcggcaccuggcugaccuacaccggcgccaucaagcucgacgacaaggaccccaacuucaaggaccaggugauccugcugaacaagcacaucgacgccuacaagacguucccgcccaccgagcccaagaaggacaagaagaagaaggcggacgagacccaggcccucccccagcggcagaagaagcagcagaccgucacgcugcugcccgccgccgaccucgacgacuucuccaagcagcugcagcagagcauguccagcgcggacuccacccaggccugaggacuagucccuguucccagagcccacuuuuuuuucuuuuuuugaaauaaaauagccugucuuucagaucucaaaggcucuuuucagagccaccaaaaaaaaaaaaaaaaaaaaaaaaaaaaaaaaaaaaaaaaaaaaaaaaaaaaaaaaaaaaaaaaaaaaaaaaaaaaaaaaaaaaaaaaaaaaaaaaaaaaa

SEQ ID NO: 19154 - RNA, 1532 nt, Artificial Sequence
  SARS-CoV-2__MT831131.1__nucleocapsid protein (N) mRNA gc
aggagagucccgcagucggcguccagcggcucugcuuguucgugugugugucguugcaggccuuauucaagcuuaccaugagcgacaacggcccccagaaccagcgcaacgccccgcggaucaccuucgggggccccuccgacagcaccggguccaaccagaacggcgagcgcagcggggcccgguccaagcagcgccggccccagggccugcccaacaacacggcgagcugguucaccgcccucacccagcacggcaaggaggaccugaaguucccgcgcgggcagggcgugcccaucaacaccaacuccagccccgacgaccagaucggguacuaccggcgcgccacgcggcgcauccggggcggggacggcaagaugaaggaccugagcccccgcugguacuucuacuaccucggcaccgggccggaggccggccugcccuacggggccaacaaggacggcaucaucugggucgcgaccgagggcgcccugaacacccccaaggaccacaucgggacgcggaaccccgccaacaacgccgcgaucgugcuccagcugccgcagggcaccacccugcccaagggguucuacgccgagggcucccgcgggggcucccaggccagcucccggagcuccagccgcucccggaacagcucccgcaacagcacccccggcagcuccaagcggacgagccccgcccgcauggccgggaacggcggggacgcggcccucgcccugcugcuccuggaccggcugaaccagcucgaguccaagaugagcggcaaggggcagcagcagcagggccagaccgugaccaagaaguccgccgccgaggcgagcaagaagccgcgccagaagcgcaccgccacgaaggccuacaacgucacccaggccuucggccggcgcgggcccgagcagacccagggcaacuucggggaccaggagcugauccggcagggcaccgacuacaagcacuggccccagaucgcccaguucgcgcccuccgccagcgccuucuucgggaugucccgcaucggcauggaggugacgcugagcggcaccuggcucaccuacaccggggccaucaagcuggacgacaaggacccgaacuucaaggaccaggugauccugcucaacaagcacaucgacgccuacaagacguucccgcccaccgagcccaagaaggacaagaagaagaaggcggacgagacccaggcccugccccagcggcagaagaagcagcagaccgucacgcugcuccccgccgccgaccuggacgacuucuccaagcagcugcagcagagcauguccagcgcggacuccacccaggccugaggacuagucccuguucccagagcccacuuuuuuuucuuuuuuugaaauaaaauagccugucuuucagaucucaaaggcucuuuucagagccaccaaaaaaaaaaaaaaaaaaaaaaaaaaaaaaaaaaaaaaaaaaaaaaaaaaaaaaaaaaaaaaaaaaaaaaaaaaaaaaaaaaaaaaaaaaaaaaaaaaaaa

SEQ ID NO: 19155 - RNA, 1532 nt, Artificial Sequence
  SARS-CoV-2__MT831148.1__nucleocapsid protein (N) mRNA gc
aggagagucccgcagucggcguccagcggcucugcuuguucgugugugugucguugcaggccuuauucaagcuuaccaugagcgacaacggcccccagaaccagcgcaacgccccgcggaucaccuucgggggccccuccgacagcaccggguccaaccagaacggcgagcgcagcggggcccgguccaagcagcgccggccccagggccugcccaacaacacggcgagcugguucaccgcccucacccagcacggcaaggaggaccugaaguucccgcgcgggcagggcgugcccaucaacaucaacuccagccccgacgaccagaucggguacuaccggcgcgccacccggcgcauccggggcggggacggcaagaugaaggaccugagcccccgcugguacuucuacuaccucggcacggggccggaggccggccugcccuacggggccaacaaggacggcaucaucugggucgcgaccgagggcgcccugaacacccccaaggaccacaucgggacccggaaccccgccaacaacgccgcgaucgugcuccagcugccgcagggcacgacccugcccaagggguucuacgccgagggcucccgcgggggcucccaggccagcucccggagcuccagccgcucccggaacagcucccgcaacagcacccccggcagcuccaagcggaccagccccgcccgcauggccgggaacggcggggacgcggcccucgcccugcugcuccuggaccggcugaaccagcucgaguccaagaugagcggcaaggggcagcagcagcagggccagacggugaccaagaaguccgccgccgaggcgagcaagaagccgcgccagaagcgcaccgccaccaaggccuacaacgucacgcaggccuucggccggcgcgggcccgagcagacccagggcaacuucggggaccaggagcugauccggcagggcaccgacuacaagcacuggccccagaucgcccaguucgcgcccuccgccagcgccuucuucgggaugucccgcaucggcauggaggugaccccgagcggcacguggcugaccuacaccggggccaucaagcucgacgacaaggaccccaacuucaaggaccaggugauccugcugaacaagcacaucgacgccuacaagaccuucccgcccacggagcccaagaaggacaagaagaagaaggcggacgagacccaggcccucccccagcggcagaagaagcagcagaccgucacccugcugcccgccgccgaccucgacgacuucuccaagcagcugcagcagagcauguccagcgcggacuccacgcaggccugaggacuagucccuguucccagagcccacuuuuuuuucuuuuuuugaaauaaaauagccugucuuucagaucucaaaggcucuuuucagagccaccaaaaaaaaaaaaaaaaaaaaaaaaaaaaaaaaaaaaaaaaaaaaaaaaaaaaaaaaaaaaaaaaaaaaaaaaaaaaaaaaaaaaaaaaaaaaaaaaaaaaa

SEQ ID NO: 19156 - RNA, 1532 nt, Artificial Sequence
  SARS-CoV-2__MT831153.1__nucleocapsid protein (N) mRNA gc
aggagagucccgcagucggcguccagcggcucugcuuguucgugugugugucguugcaggccuuauucaagcuuaccaugagcgacaacggcccccagaaccagcgcaacgccccgcggaucaccuucgggggccccuccgacagcaccggguccaaccagaacggcgagcgcagcggggcccgguccaagcagcgccggccccagggccugcccaacaacacggcgagcugguucaccgcccucacccagcacggcaaggaggaccugaaguucccgcgcgggcagggcgugcccaucaacaccaacuccagccccgacgaccagaucggguacuaccggcgcgccacgcggcgcauccggggcggggacggcaagaugaaggaccugagcccccgcugguacuucuacuaccucggcaccgggccggaggccggccugcccuacggggccaacaaggacggcaucaucugggucgcgaccgagggcgcccugaacacccccaaggaccacaucgggacgcggaaccucgccaacaacgccgcgaucgugcugcagcugccccagggcaccacccucccgaagggguucuacgccgagggcucccgcgggggcucccaggccagcucccggagcuccagccgcucccggaacagcucccgcaacagcacccccggcagcuccaagcggacgagccccgcccgcauggccgggaacggcggggacgcggcccuggcccugcuccugcuggaccggcucaaccagcuggaguccaagaugagcggcaaggggcagcagcagcagggccagaccgugaccaagaaguccgccgccgaggcgagcaagaagccccgccagaagcgcaccgccacgaaggccuacaacgucacccaggccuucggccggcgcgggccggagcagacccagggcaacuucggggaccaggagcugauccggcagggcaccgacuacaagcacuggccccagaucgcccaguucgcgcccuccgccagcgccuucuucgggaugucccgcaucggcauggaggugacgcccagcggcaccuggcucaccuacaccggggccaucaagcuggacgacaaggacccgaacuucaaggaccaggugauccugcucaacaagcacaucgacgccuacaagacguucccgcccaccgagcccaagaaggacaagaagaagaaggcggacgagacccaggcccugccccagcggcagaagaagcagcagaccgucacgcugcuccccgccgccgaccuggacgacuucuccaagcagcugcagcagagcauguccagcgcggacuccacccaggccugaggacuagucccuguucccagagcccacuuuuuuuucuuuuuuugaaauaaaauagccugucuuucagaucucaaaggcucuuuucagagccaccaaaaaaaaaaaaaaaaaaaaaaaaaaaaaaaaaaaaaaaaaaaaaaaaaaaaaaaaaaaaaaaaaaaaaaaaaaaaaaaaaaaaaaaaaaaaaaaaaaaaa

SEQ ID NO: 19157 - RNA, 1532 nt, Artificial Sequence
  SARS-CoV-2__MT831158.1__nucleocapsid protein (N) mRNA gc
aggagagucccgcagucggcguccagcggcucugcuuguucgugugugugucguugcaggccuuauucaagcuuaccaugagcgacaacggcccccagaaccagcgcaacgccccgcggaucaccuucgggggccccuccgacagcaccggguccaaccagaacggcgagcgcagcggggcccgguccaagcagcgccggccccagggccugcccaacaacacggcgagcugguucaccgcccucacccagcacggcaaggaggaccugaaguucccgcgcgggcagggcgugcccaucaacaccaacuccagccccgacgaccagaucggguacuaccggcgcgccacgcggcgcauccggggcggggacggcaagaugaaggaccugagcccccgcugguacuucuacuaccucggcaccgggccggaggccggccugcccuacggggccaacaaggacggcaucaucugggucgcgaccgagggcgcccugaacacccccaaggaccacaucgggacgcggaaccccgccaacaacgccgcgaucgugcuccagcugccgcagggcaccacccugcccaagggguucuacgccgagggcucccgcgggggcucccaggccagcucccggagcuccagccgcucccggaacagcucccgcaacagcacccccggcagcuccaagcggacgagccccgcccgcauggccgggaacggcggggacgcggcccucgcccugcugcuccuggaccggcugaaccagcucgaguccaagaugagcggcaaggggcagcagcagcagggccagaccgugaccaagaaguccgccgccgaggcgagcaagaagccgcgccagaagcgcaccgccacgaaggccuacaacgucacccaggccuucggccggcgcgggcccgagcagacccagggcaacuucggggaccaggagcugauccggcagggcaccgacuacaagcacuggccccagaucgcccaguucgcgcccuccgccagcgccuucuucgggaugucccgcaucggcauggaggugacgccgagcggcaccuggcugaccuacaccggggccaucaagcucgacgacaaggaccccaacuucaaggaccaggugauccugcugaacaagcacaucgacgccuacaagacguucccgcccaccgagcccaagaaggacaagaagaagaaggcggacgagacccaggcccucccccagcggcacaagaagcagcagaccgucacgcugcugcccgccgccgaccucgacgacuucuccaagcagcugcagcagagcauguccagcgcggacuccacccaggccugaggacuagucccuguucccagagcccacuuuuuuuucuuuuuuugaaauaaaauagccugucuuucagaucucaaaggcucuuuucagagccaccaaaaaaaaaaaaaaaaaaaaaaaaaaaaaaaaaaaaaaaaaaaaaaaaaaaaaaaaaaaaaaaaaaaaaaaaaaaaaaaaaaaaaaaaaaaaaaaaaaaaa

SEQ ID NO: 19158 - RNA, 1532 nt, Artificial Sequence
  SARS-CoV-2__MT831179.1__nucleocapsid protein (N) mRNA gc
aggagagucccgcagucggcguccagcggcucugcuuguucgugugugugucguugcaggccuuauucaagcuuaccaugagcgacaacggcccccagaaccagcgcaacgccccgcggaucaccuucgggggccccuccgacagcaccggguccaaccagaacggcgagcgcagcggggcccgguccaagcagcgccggccccagggccugcccaacaacacggcgagcugguucaccgcccucacccagcacggcaaggaggaccugaaguucccgcgcgggcagggcgugcccaucaacaccaacuccagccccgacgaccagaucggguacuaccggcgcgccacgcggcgcauccggggcggggacggcaagaugaaggaccugagcccccgcugguacuucuacuaccucggcaccgggccggaggccggccugcccuacggggccaacaaggacggcaucaucugggucgcgaccgagggcgcccugaacacccccaaggaccacaucgggacgcggaaccccgccaacaacgccgcgaucgugcuccagcugccgcagggcaccacccugcccaagggguucuacgccgagggcucccgcgggggcucccaggccagcucccggagcuccagccgcucccggaacagcucccgcaacagcacccccggcagcuccaagcggacgagccccgcccgcauggccgggaacggcggggacgcggcccucgcccugcugcuccuggaccggcugaaccagcucgaguccaagaugagcggcaaggggcagcagcagcagggccagaccgugaccaagaaguccgccgccgaggcgagcaagaagccgcgccagaagcgcaccgccacgaaggccuacaacgucacccaggccuucggccggcgcgggcccgagcagacccagggcaacuucggggaccaggagcugauccggcagggcaccgacuacaagcacuggccccagaucgcccaguucgcgcccuccgccagcgccuucuucgggaugucccgcaucggcauggaggugacgccgagcggcaccuggcugaccuacaccggggccaucaagcucgacgacaaggaccccaacuucaaggaccaggugauccugcugaacaagcacaucgacgccuacaagacguucccgcccaccgagcccaagaaggacaagaagaagaaggcggacgagacccaggccagcccccagcggcagaagaagcagcagaccgucacgcuccugcccgccgccgaccuggacgacuucuccaagcagcuccagcaguccaugagcuccgcggacagcacccaggccugaggacuagucccuguucccagagcccacuuuuuuuucuuuuuuugaaauaaaauagccugucuuucagaucucaaaggcucuuuucagagccaccaaaaaaaaaaaaaaaaaaaaaaaaaaaaaaaaaaaaaaaaaaaaaaaaaaaaaaaaaaaaaaaaaaaaaaaaaaaaaaaaaaaaaaaaaaaaaaaaaaaaa

SEQ ID NO: 19159 - RNA, 1532 nt, Artificial Sequence
  SARS-CoV-2__MT831196.1__nucleocapsid protein (N) mRNA gc
aggagagucccgcagucggcguccagcggcucugcuuguucgugugugugucguugcaggccuuauucaagcuuaccaugagcgacaacggcccccagaaccagcgcaacgccccgcggaucaccuucgggggccccuccgacagcaccggguccaaccagaacggcgagcgcagcggggcccgguccaagcagcgccggccccagggccugcccaacaacacggcgagcugguucaccgcccucacccagcacggcaaggaggaccugaaguucccgcgcgggcagggcgugcccaucaacaccaacuccagccccgacgaccagaucggguacuaccggcgcgccacgcggcgcauccggggcggggacggcaagaugaaggaccugagcccccgcugguacuucuacuaccucggcaccgggccggaggccggccugcccuacggggccaacaaggacggcaucaucugggucgcgaccgagggcgcccugaacacccccaaggaccacaucgggacgcggaaccccgccaacaacgccgcgaucgugcuccagcugccgcagggcaccacccugcccaagggguucuacgccgagggcucccgcgggggcucccaggccagcucccggagcuccagccgcucccggaacagcucccgcaacagcacccccggcagcuccaagcggacgagccccgcccgcauggccgggaacggcggggacgcggcccucgcccugcugcuccuggaccggcugaaccagcucgaguccaagaugagcggcaaggggcagcagcagcagggccagaccgugaccaagaaguccgccgccgaggcgagcaagaagccgcgccagaagcgcaccgccacgaaggccuacaacgucacccaggccuucggccggcgcgggcccgagcagacccagggcaacuucggggaccaggagcugauccggcagggcaccgacuacaagcacuggccccagaucgcccaguucgcgcccuccgccagcgccuucuucgggaugucccgcaucggcauggaggugacgccgagcggcaccuggcugaccuacaccggggccaucaagcucgacgacaaggaccccaacuucaaggaccaggugauccugcugaacaagcacaucgacgccuacaagacguucccgcccaccgagcccaagaaggacaagaacaagaaggcggacgagacccaggcccucccccagcggcagaagaagcagcagaccgucacgcugcugcccgccgccgaccucgacgacuucuccaagcagcugcagcagagcauguccagcgcggacuccacccaggccugaggacuagucccuguucccagagcccacuuuuuuuucuuuuuuugaaauaaaauagccugucuuucagaucucaaaggcucuuuucagagccaccaaaaaaaaaaaaaaaaaaaaaaaaaaaaaaaaaaaaaaaaaaaaaaaaaaaaaaaaaaaaaaaaaaaaaaaaaaaaaaaaaaaaaaaaaaaaaaaaaaaaa

SEQ ID NO: 19160 - RNA, 1532 nt, Artificial Sequence
  SARS-CoV-2__MT831223.1__nucleocapsid protein (N) mRNA gc
aggagagucccgcagucggcguccagcggcucugcuuguucgugugugugucguugcaggccuuauucaagcuuaccaugagcgacaacggcccccagaaccagcgcaacgccccgcggaucaccuucgggggccccuccgacagcaccggguccaaccagaacggcgagcgcagcggggcccgguccaagcagcgccggccccagggccugcccaacaacacggcgagcugguucaccgcccucacccagcacggcaaggaggaccugaaguucccgcgcgggcagggcgugcccaucaacaccaacuccagccccgacgaccagaucggguacuaccggcgcgccacgcggcgcauccggggcggguacggcaagaugaaggaccugagcccccgcugguacuucuacuaccucggcaccgggccggaggccggccugcccuacggggccaacaaggacggcaucaucugggucgcgaccgagggcgcccugaacacccccaaggaccacaucgggacgcggaaccccgccaacaacgccgcgaucgugcuccagcugccgcagggcaccacccugcccaagggguucuacgccgagggcucccgcgggggcucccaggccagcucccggagcuccagccgcucccggaacagcucccgcaacagcacccccggcagcuccaagcggacgagccccgcccgcauggccgggaacggcggggacgcggcccucgcccugcugcuccuggaccggcugaaccagcucgaguccaagaugagcggcaaggggcagcagcagcagggccagaccgugaccaagaaguccgccgccgaggcgagcaagaagccgcgccagaagcgcaccgccacgaaggccuacaacgucacccaggccuucggccggcgcgggcccgagcagacccagggcaacuucggggaccaggagcugauccggcagggcaccgacuacaagcacuggccccagaucgcccaguucgcgcccuccgccagcgccuucuucgggaugucccgcaucggcauggaggugacgccgagcggcaccuggcugaccuacaccggggccaucaagcucgacgacaaggaccccaacuucaaggaccaggugauccugcugaacaagcacaucgacgccuacaagacguucccgcccaccgagcccaagaaggacaagaagaagaaggcggacgagacccaggcccucccccagcggcagaagaagcagcagaccgucacgcugcugcccgccgccgaccucgacgacuucuccaagcagcugcagcagagcauguccagcgcggacuccacccaggccugaggacuagucccuguucccagagcccacuuuuuuuucuuuuuuugaaauaaaauagccugucuuucagaucucaaaggcucuuuucagagccaccaaaaaaaaaaaaaaaaaaaaaaaaaaaaaaaaaaaaaaaaaaaaaaaaaaaaaaaaaaaaaaaaaaaaaaaaaaaaaaaaaaaaaaaaaaaaaaaaaaaaa

SEQ ID NO: 19161 - RNA, 1532 nt, Artificial Sequence
  SARS-CoV-2__MT831224.1__nucleocapsid protein (N) mRNA gc
aggagagucccgcagucggcguccagcggcucugcuuguucgugugugugucguugcaggccuuauucaagcuuaccaugagcgacaacggcccccagaaccagcgcaacgccccgcggaucaccuucgggggccccuccgacagcaccggguccaaccagaacggcgagcgcagcggggcccgguccaagcagcgccggccccagggccugcccaacaacacggcgagcugguucaccgcccucacccagcacggcaaggaggaccugaaguucccgcgcgggcagggcgugcccaucaacaccaacuccagccccgacgaccagaucggguacuaccggcgcgccacgcggcgcauccggggcggggacggcaagaugaaggaccugagcccccgcugguacuucuacuaccucggcaccgggccggaggccggccugcccuacggggccaacaaggacggcaucaucugggucgcgaccgagggcgcccugaacacccccaaggaccacaucgggacgcggaaccucgccaacaacgccgcgaucgugcugcagcugccccagggcaccacccucccgaagggguucuacgccgagggcucccgcgggggcucccaggccagcucccggagcuccagccgcucccggaacagcucccgcaacagcacccccggcagcucccgggggacgagccccgcccgcauggccggcaacgggggcgacgcggcccuggcccugcuccugcuggaccggcucaaccagcuggaguccaagaugagcgggaagggccagcagcagcagggccagaccgugaccaagaaguccgccgccgaggcgagcaagaagccccgccagaagcgcaccgccacgaaggccuacaacgucacccaggccuucgggcggcgcggcccggagcagacccaggggaacuucggcgaccaggagcugauccggcaggggaccgacuacaagcacuggccccagaucgcccaguucgcgcccuccgccagcgccuucuucggcaugucccgcaucggcauggaggugacgcccagcgggaccuggcucaccuacaccggcgccaucaagcuggacgacaaggacccgaacuucaaggaccaggugauccugcucaacaagcacaucgacgccuacaagacguucccgcccaccgagcccaagaaggacaagaagaagaaggcggacgagacccaggcccugccccagcggcagaagaagcagcagaccgucacgcugcuccccgccgccgaccuggacgacuucuccaagcagcugcagcagagcauguccagcgcggacuccacccaggccugaggacuagucccuguucccagagcccacuuuuuuuucuuuuuuugaaauaaaauagccugucuuucagaucucaaaggcucuuuucagagccaccaaaaaaaaaaaaaaaaaaaaaaaaaaaaaaaaaaaaaaaaaaaaaaaaaaaaaaaaaaaaaaaaaaaaaaaaaaaaaaaaaaaaaaaaaaaaaaaaaaaaa

SEQ ID NO: 19162 - RNA, 1532 nt, Artificial Sequence
  SARS-CoV-2__MT831284.1__nucleocapsid protein (N) mRNA gc
aggagagucccgcagucggcguccagcggcucugcuuguucgugugugugucguugcaggccuuauucaagcuuaccaugagcgacaacggcccccagaaccagcgcaacgccccgcggaucaccuucgggggccccuccgacagcaccggguccaaccagaacggcgagcgcagcggggcccgguccaagcagcgccggccccagggccugcccaacaacacggcgagcugguucaccgcccucacccagcacggcaaggaggaccugaaguucccgcgcgggcagggcgugcccaucaacaccaacuccagccccgacgaccagaucggguacuaccggcgcgccacgcggcgcauccggggcggggacggcaagaugaaggaccugagcccccgcugguacuucuacuaccucggcaccgggccggaggccggccugcccuacggggccaacaaggacggcaucaucugggucgcgaccgagggcgcccugaacacccccaaggaccacaucgggacgcggaaccccgccaacaacgccgcgaucgugcuccagcugccgcagggcaccacccugcccaagggguucuacgccgagggcagccgcgggggcucccaggccagcucccggagcuccagccgcucccggaacagcucccgcaacagcacccccggcagcuccaagcggacgagccccgcccgcauggccgggaacggcggggacgcggcccucgcccugcugcuccuggaccggcugaaccagcucgaguccaagaugagcggcaagucccagcagcagcaggggcagaccgugaccaagaaguccgccgccgaggcguccaagaagccgcgccagaagcgcaccgccacgaaggccuacaacgucacccaggccuucggccggcgcggccccgagcagacccaggggaacuucggcgaccaggagcugauccggcaggggaccgacuacaagcacuggccccagaucgcccaguucgcgcccagcgccuccgccuucuucggcaugagccgcaucgggauggaggugacgccguccggcaccuggcugaccuacaccggcgccaucaagcucgacgacaaggaccccaacuucaaggaccaggugauccugcugaacaagcacaucgacgccuacaagacguucccgcccaccgagcccaagaaggacaagaagaagaaggcggacgagacccaggcccucccccagcggcagaagaagcagcagaccgucacgcugcugcccgccgccgaccucgacgacuucagcaagcagcugcagcaguccaugagcuccgcggacagcacccaggccugaggacuagucccuguucccagagcccacuuuuuuuucuuuuuuugaaauaaaauagccugucuuucagaucucaaaggcucuuuucagagccaccaaaaaaaaaaaaaaaaaaaaaaaaaaaaaaaaaaaaaaaaaaaaaaaaaaaaaaaaaaaaaaaaaaaaaaaaaaaaaaaaaaaaaaaaaaaaaaaaaaaaa

SEQ ID NO: 19163 - RNA, 1532 nt, Artificial Sequence
  SARS-CoV-2__MT831285.1__nucleocapsid protein (N) mRNA gc
aggagagucccgcagucggcguccagcggcucugcuuguucgugugugugucguugcaggccuuauucaagcuuaccaugagcgacaacggcccccagaaccagcgcaacgccccgcggaucaccuucgggggccccuccgacagcaccggguccaaccagaacggcgagcgcagcggggcccgguccaagcagcgccggccccagggccugcccaacaacacggcgagcugguucaccgcccucacccagcacggcaaggaggaccugaaguucccgcgcgggcagggcgugcccaucaacaccaacuccagccccgacgaccagaucggguacuaccggcgcgccacgcggcgcauccggggcggggacggcaagaugaaggaccugagcccccgcugguacuucuacuaccucggcaccgggccggaggccggccugcccuacggggccaacaaggacggcaucaucugggucgcgaccgagggcgcccugaacacccccaaggaccacaucgggacgcggaaccccgccaacaacgccgcgaucgugcuccagcugccgcagggcaccacccugcccaagggguucuacgccgagggcucccgcgggggcucccaggccagcucccggagcuccagccgcucccggaacagcucccgcaacagcacccccggcagcuccaagcggacgagccccgcccgcauggccgggaacggcggggacgcggcccucgcccugcugcuccuggaccggcugaaccaccucgaguccaagaugagcggcaaggggcagcagcagcagggccagaccgugaccaagaaguccgccgccgaggcgagcaagaagccgcgccagaagcgcaccgccacgaaggccuacaacgucacccaggccuucggccggcgcgggcccgagcagacccagggcaacuucggggaccaggagcugauccggcagggcaccgacuacaagcacuggccccagaucgcccaguucgcgcccuccgccagcgccuucuucgggaugucccgcaucggcauggaggugacgccgagcggcaccuggcugaccuacaccggggccaucaagcucgacgacaaggaccccaacuucaaggaccaggugauccugcugaacaagcacaucgacgccuacaagacguucccgcccaccgagcccaagaaggacaagaagaagaaggcggacgagacccaggcccucccccagcggcagaagaagcagcagaccgucacgcugcugcccgccgccgaccucgacgacuucuccaagcagcugcagcagagcauguccagcgcggacuccacccaggccugaggacuagucccuguucccagagcccacuuuuuuuucuuuuuuugaaauaaaauagccugucuuucagaucucaaaggcucuuuucagagccaccaaaaaaaaaaaaaaaaaaaaaaaaaaaaaaaaaaaaaaaaaaaaaaaaaaaaaaaaaaaaaaaaaaaaaaaaaaaaaaaaaaaaaaaaaaaaaaaaaaaaa

SEQ ID NO: 19164 - RNA, 1532 nt, Artificial Sequence
  SARS-CoV-2__MT831300.1__nucleocapsid protein (N) mRNA gc
aggagagucccgcagucggcguccagcggcucugcuuguucgugugugugucguugcaggccuuauucaagcuuaccaugagcgacaacggcccccagaaccagcgcaacgccccgcggaucaccuucgggggccccuccgacagcaccggguccaaccagaacggcgagcgcagcggggcccgguccaagcagcgccggccccagggccugcccaacaacacggcgagcugguucaccgcccucacccagcacggcaaggaggaccugaaguucccgcgcgggcagggcgugcccaucaacaccaacuccagccccgacgaccagaucggguacuaccggcgcgccacgcggcgcauccggggcggggacggcaagaugaaggaccugagcccccgcugguacuucuacuaccucggcaccgggccggaggccggccugcccuacggggccaacaaggacggcaucaucugggucgcgaccgagggcgcccugaacacccccaaguaccacaucgggacgcggaaccccgccaacaacgccgcgaucgugcuccagcugccgcagggcaccacccugcccaagggguucuacgccgagggcucccgcgggggcucccaggccagcucccggagcuccagccgcucccggaacagcucccgcaacagcacccccggcagcuccaagcggacgagccccgcccgcauggccgggaacggcggggacgcggcccucgcccugcugcuccuggaccggcugaaccagcucgaguccaagaugagcggcaaggggcagcagcagcagggccagaccgugaccaagaaguccgccgccgaggcgagcaagaagccgcgccagaagcgcaccgccacgaaggccuacaacgucacccaggccuucggccggcgcgggcccgagcagacccagggcaacuucggggaccaggagcugauccggcagggcaccgacuacaagcacuggccccagaucgcccaguucgcgcccuccgccagcgccuucuucgggaugucccgcaucggcauggaggugacgccgagcggcaccuggcugaccuacaccggggccaucaagcucgacgacaaggaccccaacuucaaggaccaggugauccugcugaacaagcacaucgacgccuacaagacguucccgcccaccgagcccaagaaggacaagaagaagaaggcggacgagacccaggcccucccccagcggcagaagaagcagcagaccgucacgcugcugcccgccgccgaccucgacgacuucuccaagcagcugcagcagagcauguccagcgcggacuccacccaggccugaggacuagucccuguucccagagcccacuuuuuuuucuuuuuuugaaauaaaauagccugucuuucagaucucaaaggcucuuuucagagccaccaaaaaaaaaaaaaaaaaaaaaaaaaaaaaaaaaaaaaaaaaaaaaaaaaaaaaaaaaaaaaaaaaaaaaaaaaaaaaaaaaaaaaaaaaaaaaaaaaaaaa

SEQ ID NO: 19165 - RNA, 1532 nt, Artificial Sequence
  SARS-CoV-2__MT831333.1__nucleocapsid protein (N) mRNA gc
aggagagucccgcagucggcguccagcggcucugcuuguucgugugugugucguugcaggccuuauucaagcuuaccaugagcgacaacggccccaagaaccagcgcaacgccccgcggaucaccuucgggggccccuccgacagcaccggguccaaccagaacggcgagcgcagcggggcccgguccaagcagcgccggccccagggccugcccaacaacacggcgagcugguucaccgcccucacccagcacggcaaggaggaccugaaguucccgcgcgggcagggcgugcccaucaacaccaacuccagccccgacgaccagaucggguacuaccggcgcgccacgcggcgcauccggggcggggacggcaagaugaaggaccugagcccccgcugguacuucuacuaccucggcaccgggccggaggccggccugcccuacggggccaacaaggacggcaucaucugggucgcgaccgagggcgcccugaacacccccaaggaccacaucgggacgcggaaccccgccaacaacgccgcgaucgugcuccagcugccgcagggcaccacccugcccaagggguucuacgccgagggcucccgcgggggcucccaggccagcucccggagcuccagccgcucccggaacagcucccgcaacagcacccccggcagcucccgggggacgagccccgcccgcauggccggcaacgggggcgacgcggcccucgcccugcugcuccuggaccggcugaaccagcucgaguccaagaugagcgggaagggccagcagcagcagggccagaccgugaccaagaaguccgccgccgaggcgagcaagaagccgcgccagaagcgcaccgccacgaaggccuacaacgucacccaggccuucgggcggcgcggccccgagcagacccaggggaacuucggcgaccaggagcugauccggcaggggaccgacuacaagcacuggccccagaucgcccaguucgcgcccuccgccagcgccuucuucggcaugucccgcaucggcauggaggugacgccgagcgggaccuggcugaccuacaccggcgccaucaagcucgacgacaaggaccccaacuucaaggaccaggugauccugcugaacaagcacaucgacgccuacaagacguucccgcccaccgagcccaagaaggacaagaagaagaaggcggacgagacccaggcccucccccagcggcagaagaagcagcagaccgucacgcugcugcccgccgccgaccucgacgacuucuccaagcagcugcagcagagcauguccagcgcggacuccacccaggccugaggacuagucccuguucccagagcccacuuuuuuuucuuuuuuugaaauaaaauagccugucuuucagaucucaaaggcucuuuucagagccaccaaaaaaaaaaaaaaaaaaaaaaaaaaaaaaaaaaaaaaaaaaaaaaaaaaaaaaaaaaaaaaaaaaaaaaaaaaaaaaaaaaaaaaaaaaaaaaaaaaaaa

SEQ ID NO: 19166 - RNA, 1532 nt, Artificial Sequence
  SARS-CoV-2__MT831357.1__nucleocapsid protein (N) mRNA gc
aggagagucccgcagucggcguccagcggcucugcuuguucgugugugugucguugcaggccuuauucaagcuuaccaugagcgacaacggcccccagaaccagcgcaacgccccgcggaucaccuucgggggccccuccgacagcaccggguccaaccagaacggcgagcgcagcggggcccgguccaagcagcgccggccccagggccugcccaacaacacggcgagcugguucaccgcccucacccagcacggcaaggaggaccugaaguucccgcgcgggcagggcgugcccaucaacaccaacuccagccccgacgaccagaucggguacuaccggcgcgccacgcggcgcauccggggcggggacggcaagaugaaggaccugagcccccgcugguacuucuacuaccucggcaccgggccggaggccggccugcccuacggggccaacaaggacggcaucaucugggucgcgaccgagggcgcccugaacacccccaaggaccacaucgggacgcggaaccccgccaacaacgccgcgaucgugcuccagcugccgcagggcaccacccugcccaagggguucuacgccgagggcucccgcgggggcucccaggccagcucccggagcuccagccgcucccggaacagcucccgcaacagcacccccggcagcuccaagcggacgagccccgcccgcauggccgggaacggcggggacgcggcccucgcccugcugcuccuggaccggcugaaccagcucgaguccaagaugagcggcaaggggcagcagcagcagggccagaccgugaccaagaaguccgccgccgaggcgagcaagaagccgcgccagaagcgcaccgccacgaaggccuacaacgucacccaggccuucggccggcgcgggcccgagcagacccagggcaacuucggggaccaggagcugauccggcgcggcaccgacuacaagcacuggccccagaucgcccaguucgcgcccuccgccagcgccuucuucgggaugucccggaucggcauggaggugacgccgagcggcaccuggcugaccuacaccggggccaucaagcucgacgacaaggaccccaacuucaaggaccaggugauccugcugaacaagcacaucgacgccuacaagacguucccgcccaccgagcccaagaaggacaagaagaagaaggcggacgagacccaggcccucccccagcgccagaagaagcagcagaccgucacgcugcugcccgccgccgaccucgacgacuucuccaagcagcugcagcagagcauguccagcgcggacuccacccaggccugaggacuagucccuguucccagagcccacuuuuuuuucuuuuuuugaaauaaaauagccugucuuucagaucucaaaggcucuuuucagagccaccaaaaaaaaaaaaaaaaaaaaaaaaaaaaaaaaaaaaaaaaaaaaaaaaaaaaaaaaaaaaaaaaaaaaaaaaaaaaaaaaaaaaaaaaaaaaaaaaaaaaa

SEQ ID NO: 19167 - RNA, 1532 nt, Artificial Sequence
  SARS-CoV-2__MT831359.1__nucleocapsid protein (N) mRNA gc
aggagagucccgcagucggcguccagcggcucugcuuguucgugugugugucguugcaggccuuauucaagcuuaccaugagcgacaacggcccccagaaccagcgcaacgccccgcggaucaccuucgggggccccuccgacagcaccggguccaaccagaacggcgagcgcagcggggcccgguccaagcagcgccggccccagggccugcccaacaacacggcgagcugguucaccgcccucacccagcacggcaaggaggaccugaaguucccgcgcgggcagggcgugcccaucaacaccaacuccagccccgacgaccagaucggguacuaccggcgcgccacgcggcgcauccggggcggggacggcaagaugaaggaccugagcccccgcugguacuucuacuaccucggcaccgggccggaggccggccugcccuacggggccaacaaggacggcaucaucugggucgcgaccgagggcgcccugaacacccccaaggaccacaucgggacgcggaaccccgccaacaacgccgcgaucgugcuccagcugccgcagggcaccacccugcccaagggguucuacgccgagggcucccgcgggggcucccaggccagcucccggagcuccagccgcucccggaacagcucccgcaacagcacccccggcagcuccaagcggacgagccccgcccgcauggccgggaacggcggggacgcggcccucgcccugcugcuccuggaccggcugaaccagcucgaguccaagaugagcggcaaggggcagcagcagcagggccagaccgugaccaagaaguccgccgccgaggcgagcaagaagccgcgccagaagcgcaccgccacgaaggccuacaacgucacccaggccuucggccggcgcgggcccgagcagacccagggcaacuucggggaccaggagcugauccggcagggcaccgacuacaagcacuggccccagaucgcccaguucgcgcccuccgccagcgccuucuucgggaugucccgcaucggcauggaggugaucccgagcggcacguggcugaccuacaccggggccaucaagcucgacgacaaggaccccaacuucaaggaccaggugauccugcugaacaagcacaucgacgccuacaagaccuucccgcccacggagcccaagaaggacaagaagaagaaggcggacgagacccaggcccucccccagcggcagaagaagcagcagaccgucacccugcugcccgccgccgaccucgacgacuucuccaagcagcugcagcagagcauguccagcgcggacuccacgcaggccugaggacuagucccuguucccagagcccacuuuuuuuucuuuuuuugaaauaaaauagccugucuuucagaucucaaaggcucuuuucagagccaccaaaaaaaaaaaaaaaaaaaaaaaaaaaaaaaaaaaaaaaaaaaaaaaaaaaaaaaaaaaaaaaaaaaaaaaaaaaaaaaaaaaaaaaaaaaaaaaaaaaaa

SEQ ID NO: 19168 - RNA, 1532 nt, Artificial Sequence
  SARS-CoV-2__MT831366.1__nucleocapsid protein (N) mRNA gc
aggagagucccgcagucggcguccagcggcucugcuuguucgugugugugucguugcaggccuuauucaagcuuaccaugagcgacaacggcccccagaaccagcgcaacgccccgcggaucaccuucgggggccccuccgacagcaccggguccaaccagaacggcgagcgcagcggggcccgguccaagcagcgccggccccagggccugcccaacaacacggcgagcugguucaccgcccucacccagcacggcaaggaggaccugaaguucccgcgcgggcagggcgugcccaucaacaccaacuccagccccgacgaccagaucggguacuaccggcgcgccacgcggcgcauccggggcggggacggcaagaugaaggaccugagcccccgcugguacuucuacuaccucggcaccgggccggaggccggccugcccuacggggccaacaaggacggcaucaucugggucgcgaccgagggcgcccugaacacccccaaggaccacaucgggacgcggaaccccgccaacaacgccgcgaucgugcuccagcugccgcagggcaccacccugcccaagggguucuacgccgagggcucccgcgggggcucccaggccagcucccggagcuccagccgcucccggaacagcucccgcaacagcacccccggcagcucccgggggacgagccccgcccgcauggccggcaacgggggcgacgcggcccucgcccugcugcuccuggaccggcugaaccagcucgaguccaagaugagcgggaagggccagcagcagcagggccagaccgugaccaagaaguccgccgccgaggcgagcaagaagccgcgccagaagcgcaccgccacgaaggccuacaacgucacccaggccuucgggcggcgcggccccgagcagacccaggggaacuucggcgaccaggagcugauccggcaggggaccgacuacaagcacuggccccagaucgcccaguucgcgcccuccgccagcgccuucuucggcaugucccgcaucggcauggaggugacgccgagcgggaccuggcugaccuacaccggcgccaucaagcucgacgacaaggaccccaacuucaaggaccaggugauccugcugaacaagcacaucgacgccuacaagacguucccgcccaccgagcccaagaaggacaagaagaagaaggcggacgagacccaggcccucccccagcggcagaagaagcagcagaccgucacgcugcugcccgccgccgaccucgacgacuucuccaagcagcugcagcagagcauguccagcgcggacuccauccaggccugaggacuagucccuguucccagagcccacuuuuuuuucuuuuuuugaaauaaaauagccugucuuucagaucucaaaggcucuuuucagagccaccaaaaaaaaaaaaaaaaaaaaaaaaaaaaaaaaaaaaaaaaaaaaaaaaaaaaaaaaaaaaaaaaaaaaaaaaaaaaaaaaaaaaaaaaaaaaaaaaaaaaa

SEQ ID NO: 19169 - RNA, 1532 nt, Artificial Sequence
  SARS-CoV-2__MT831409.1__nucleocapsid protein (N) mRNA gc
aggagagucccgcagucggcguccagcggcucugcuuguucgugugugugucguugcaggccuuauucaagcuuaccaugagcgacaacggcccccagaaccagcgcaacgccccgcggaucaccuucgggggccccuccgacagcaccggguccaaccagaacggcgagcgcagcggggcccgguccaagcagcgccggccccagggccugcccaacaacacggcgagcugguucaccgcccucacccagcacggcaaggaggaccugaaguucccgcgcgggcagggcgugcccaucaacaccaacuccagccccgacgaccagaucggguacuaccggcgcgccacgcggcgcauccggggcggggacggcaagaugaaggaccugagcccccgcugguacuucuacuaccucggcaccgggccggaggccggccugcccuacggggccaacaaggacggcaucaucugggucgcgaccgagggcgcccugaacacccccaaggaccacaucgggacgcggaaccccgccaacaacgccgcgaucgugcuccagcugccgcagggcaccacccugcccaagggguucuacgccgagggcucccgcgggggcucccaggccagcucccggagcuccagccgcucccggaacagcucccgcaacagcacccccggcagcuccaagcggacgagccccgcccgcauggccgggaacggcggggacgcggcccucgcccugcugcuccuggaccggcugaaccagcucgaguccaagaugagcggcaaggggcagcagcagcagggccagaccgugaccaagaaguccgccgccgaggcgagcaagaagccgcgccagaagcgcaccgccacgaaggccuacaacgucacccaggccuucggccggcgcgggcccgagcagacccagggcaacuucggggaccaggagcugauccggcagggcaccgacuacaagcacuggccccagaucgcccaguucgcgcccuccgccagcgccuucuucgggaugucccgcaucggcauggaggugacgccgagcggcaccuggcugaccuacaccggggccaucaagcucgacgacaaggaccccaacuucaaggaccaggugauccugcugaacaagcacaucgacgccuacaagacguucccgcccaccgagcccaagaaggacaagaagaagaaggcggacgagacccaggcccucccccagcggcagaagaagcagcagaccgucacgcugcugcccgccguggaccucgacgacuucuccaagcagcugcagcagagcauguccagcgccgacuccacccaggcgugaggacuagucccuguucccagagcccacuuuuuuuucuuuuuuugaaauaaaauagccugucuuucagaucucaaaggcucuuuucagagccaccaaaaaaaaaaaaaaaaaaaaaaaaaaaaaaaaaaaaaaaaaaaaaaaaaaaaaaaaaaaaaaaaaaaaaaaaaaaaaaaaaaaaaaaaaaaaaaaaaaaaa

SEQ ID NO: 19170 - RNA, 1532 nt, Artificial Sequence
  SARS-CoV-2__MT831449.1__nucleocapsid protein (N) mRNA gc
aggagagucccgcagucggcguccagcggcucugcuuguucgugugugugucguugcaggccuuauucaagcuuaccaugagcgacaacggcccccagaaccagcgcaacgccccgcggaucaccuucgggggccccuccgacagcaccggguccaaccagaacggcgagcgcagcggggcccgguccaagcagcgccggccccagggccugcccaacaacacggcgagcugguucaccgcccucacccagcacggcaaggaggaccugaaguucccgcgcgggcagggcgugcccaucaacaccaacuccagccccgacgaccagaucggguacuaccggcgcgccacgcggcgcauccggggcggggacggcaagaugaaggaccugagcccccgcugguacuucuacuaccucggcaccgggccggaggccggccugcccuacggggccaacaaggacggcaucaucugggucgcgaccgagggcgcccugaacacccccaaggaccacaucgggacgcggaaccccgccaacaacgccgcgaucgugcuccagcugccgcagggcaccacccugcccaagggguucuacgccgagggcucccgcgggggcucccaggccagcucccggagcuccagccgcucccggaacagcucccgcaacagcauccccggcagcucccgggggaccagccccgcccgcauggccggcaacgggggcgacgcggcccucgcccugcugcuccuggaccggcugaaccagcucgaguccaagaugagcgggaagggccagcagcagcagggccagacggugaccaagaaguccgccgccgaggcgagcaagaagccgcgccagaagcgcaccgccaccaaggccuacaacgucacgcaggccuucgggcggcgcggccccgagcagacccaggggaacuucggcgaccaggagcugauccggcaggggaccgacuacaagcacuggccccagaucgcccaguucgcgcccuccgccagcgccuucuucggcaugucccgcaucggcauggaggugaccccgagcgggacguggcugaccuacaccggcgccaucaagcucgacgacaaggaccccaacuucaaggaccaggugauccugcugaacaagcacaucgacgccuacaagaccuucccgcccacggagcccaagaaggacaagaagaagaaggcggacgagacccaggcccucccccagcggcagaagaagcagcagaccgucacccugcugcccgccgccgaccucgacgacuucuccaagcagcugcagcagagcauguccagcgcggacuccacgcaggccugaggacuagucccuguucccagagcccacuuuuuuuucuuuuuuugaaauaaaauagccugucuuucagaucucaaaggcucuuuucagagccaccaaaaaaaaaaaaaaaaaaaaaaaaaaaaaaaaaaaaaaaaaaaaaaaaaaaaaaaaaaaaaaaaaaaaaaaaaaaaaaaaaaaaaaaaaaaaaaaaaaaaa

SEQ ID NO: 19171 - RNA, 1532 nt, Artificial Sequence
  SARS-CoV-2__MT831483.1__nucleocapsid protein (N) mRNA gc
aggagagucccgcagucggcguccagcggcucugcuuguucgugugugugucguugcaggccuuauucaagcuuaccaugagcgacaacggcccccagaaccagcgcaacgccccgcggaucaccuucgggggccccuccgacagcaccggguccaaccagaacggcgagcgcagcggggcccgguccaagcagcgccggccccagggccugcccaacaacacggcgagcugguucaccgcccucacccagcacggcaaggaggaccugaaguucccgcgcgggcagggcgugcccaucaacaccaacuccagccccgacgaccagaucggguacuaccggcgcgccacgcggcgcauccggggcggggacggcaagaugaaggaccugagcccccgcugguacuucuacuaccucggcaccgggccggaggccggccugcccuacggggccaacaaggacggcaucaucugggucgcgaccgagggcgcccugaacacccccaaggaccacaucgggacgcggaaccccgccaacaacgccgcgaucgugcuccagcugccgcagggcaccauccugcccaagggguucuacgccgagggcucccgcgggggcucccaggccagcucccggagcuccagccgcucccggaacagcucccgcaacagcacccccggcagcucccgggggaccagccccgcccgcauggccggcaacgggggcgacgcggcccucgcccugcugcuccuggaccggcugaaccagcucgaguccaagaugagcgggaagggccagcagcagcagggccagacggugaccaagaaguccgccgccgaggcgagcaagaagccgcgccagaagcgcaccgccaccaaggccuacaacgucacgcaggccuucgggcggcgcggccccgagcagacccaggggaacuucggcgaccaggagcugauccggcaggggaccgacuacaagcacuggccccagaucgcccaguucgcgcccuccgccagcgccuucuucggcaugucccgcaucggcauggaggugaccccgagcgggacguggcugaccuacaccggcgccaucaagcucgacgacaaggaccccaacuucaaggaccaggugauccugcugaacaagcacaucgacgccuacaagaccuucccgcccacggagcccaagaaggacaagaagaagaaggcggacgagacccaggcccucccccagcggcagaagaagcagcagaccgucacccugcugcccgccgccgaccucgacgacuucuccaagcagcugcagcagagcauguccagcgcggacuccacgcaggccugaggacuagucccuguucccagagcccacuuuuuuuucuuuuuuugaaauaaaauagccugucuuucagaucucaaaggcucuuuucagagccaccaaaaaaaaaaaaaaaaaaaaaaaaaaaaaaaaaaaaaaaaaaaaaaaaaaaaaaaaaaaaaaaaaaaaaaaaaaaaaaaaaaaaaaaaaaaaaaaaaaaaa

SEQ ID NO: 19172 - RNA, 1532 nt, Artificial Sequence
  SARS-CoV-2__MT831593.1__nucleocapsid protein (N) mRNA gc
aggagagucccgcagucggcguccagcggcucugcuuguucgugugugugucguugcaggccuuauucaagcuuaccaugagcgacaacggcccccagaaccagcgcaacgccccgcggaucaccuucgggggccccuccgacagcaccggguccaaccagaacggcgagcgcagcggggcccgguccaagcagcgccggccccagggccugcccaacaacacggcgagcugguucaccgcccucacccagcacggcaaggaggaccugaaguucucccgcgggcagggcgugccgaucaacaccaacagcucccccgacgaccagaucggguacuaccggcgcgccacgcggcgcauccggggcggggacggcaagaugaaggaccugagcccccgcugguacuucuacuaccucggcaccgggcccgaggccggccugccguacggggccaacaaggacggcaucaucugggucgcgaccgagggcgcccugaacacccccaaggaccacaucgggacgcggaaccccgccaacaacgccgcgaucgugcuccagcugccccagggcaccacccugccgaagggguucuacgccgagggcucccgcgggggcagccaggccuccagccgguccagcucccgcagccggaacuccagccgcaacagcacccucggcuccagccgggggacgucccccgcccgcauggccggcaacgggggcgacgcggcccuggcccugcuccugcuggaccggcucaaccagcuggagagcaagauguccgggaagggccagcagcagcagggccagaccgugaccaagaaguccgccgccgaggcgagcaagaagccccgccagaagcgcaccgccacgaaggccuacaacgucacccaggccuucgggcggcgcggccccgagcagacccaggggaacuucggcgaccaggagcugauccggcaggggaccgacuacaagcacuggccgcagaucgcccaguucgcgcccagcgccuccgccuucuucggcaugagccgcaucggcauggaggugacgcccuccgggacccuccugaccuacaccggcgccaucaagcuggacgacaaggaccccaacuucaaggaccaggugauccuccugaacaagcacaucgacgccuacaagacguucccgcccaccgagcccaagaaggacaagaagaagaaggcggacgagacccaggcccugccccagcggcagaagaagcagcagaccgucacgcuccugccggccgccgaccuggacgacuucagcaagcagcuccagcaguccaugagcuccgcggacagcacccaggccugaggacuagucccuguucccagagcccacuuuuuuuucuuuuuuugaaauaaaauagccugucuuucagaucucaaaggcucuuuucagagccaccaaaaaaaaaaaaaaaaaaaaaaaaaaaaaaaaaaaaaaaaaaaaaaaaaaaaaaaaaaaaaaaaaaaaaaaaaaaaaaaaaaaaaaaaaaaaaaaaaaaaa

SEQ ID NO: 19173 - RNA, 1532 nt, Artificial Sequence
  SARS-CoV-2__MT831658.1__nucleocapsid protein (N) mRNA gc
aggagagucccgcagucggcguccagcggcucugcuuguucgugugugugucguugcaggccuuauucaagcuuaccaugagcgacaacggcccccagaaccagcgcaacgccccgcggaucaccuucgggggccccuccgacagcaccggguccaaccagaacggcgagcgcagcggggcccgguccaagcagcgccggccccagggccugcccaacaacacggcgagcugguucaccgcccucacccagcacggcaaggaggaccugaaguucccgcgcgggcagggcgugcccaucaacaccaacuccagccccgacgaccagaucggguacuaccggcgcgccacgcggcgcauccggggcggggacggcaagaugaaggaccugagcccccgcugguacuucuacuaccucggcaccgggccggaggccggccugcccuacggggccaacaaggacggcaucaucugggucgcgaccgagggcgcccugaacacccccaaggaccacaucgggacgcggaaccccgccaacaacgccgcgaucgugcuccagcugccgcagggcaccacccugcccaagggguucuacgccgagggcucccgcgggggcucccaggccagcucccggagcuccagccgcucccggaacagcucccgcaacagcacccccggcagcuccaagcggacgagccccgcccgcauggccgggaacggcggggacgcggcccucgcccugcugcuccuggaccggcugaaccagcucgaguccaagaugagcggcaaggggcagcagcagcagggccagaccgugaccaagaaguccgccgccgaggcgagcaagaagccgcgccagaagcgcaccgccacgaaggccuacaacgucacccaggccuucggccggcgcgggcccgagcagacccagggcaacuucggggaccaggagcugauccggcagggcaccgacuacaagcacuggccccagaucgcccaguucgcgcccuccgccagcgccuucuucgggaugucccgcaucggcauggaggugacgccgagcggcaccuggcugaccuacaccggggccaucaagcucgacgacaaggaccccaacuucaaggaccaggugauccugcugaacaagcacaucgacgccuacaagacguucccgcccaccgagcccaagaaggacaagaagaagaaggcggacgagacccaggcccucccccagcggcagaagaagcagcagaccgucacgcugcugcccgccgccgaccucgacgacuucuccaagcagcugcagcagagcaugggcuccgcggacagcacccaggccugaggacuagucccuguucccagagcccacuuuuuuuucuuuuuuugaaauaaaauagccugucuuucagaucucaaaggcucuuuucagagccaccaaaaaaaaaaaaaaaaaaaaaaaaaaaaaaaaaaaaaaaaaaaaaaaaaaaaaaaaaaaaaaaaaaaaaaaaaaaaaaaaaaaaaaaaaaaaaaaaaaaaa

SEQ ID NO: 19174 - RNA, 1532 nt, Artificial Sequence
  SARS-CoV-2__MT831701.1__nucleocapsid protein (N) mRNA gc
aggagagucccgcagucggcguccagcggcucugcuuguucgugugugugucguugcaggccuuauucaagcuuaccaugagcgacaacggcccccagaaccagcgcaacgccccgcggaucaccuucgggggccccuccgacagcaccggguccaaccagaacggcgagcgcagcggggcccgguccaagcagcgccggccccagggccugcccaacaacacggcgagcugguucaccgcccucacccagcacggcaaggaggaccugaaguucccgcgcgggcagggcgugcccaucaacaccaacuccagccccgacgaccagaucggguacuaccggcgcgccacgcggcgcauccggggcggggacggcaagaugaaggaccugagcccccgcugguacuucuacuaccucggcaccgggccggaggccggccugcccuacggggccaacaaggacggcaucaucugggucgcgaccgagggcgcccugaacacccccaaggaccacaucgggacgcggaaccccgccaacaacgccgcgaucgugcuccagcugccgcagggcaccacccugcccaagggguucuacgccgagggcucccgcgggggcucccaggccagcucccggagcuccagccgcucccggaacagcucccgcaacagcacccccggcagcuccaagcggacgagccccgcccgcauggccgggaacggcggggacgcggcccucgcccugcugcuccuggaccggcugaaccagcucgaguccaagaugagcggcaaggggcagcagcagcagggccagaccgugaccaagaaguccagcgccgaggccuccaagaagccgcgccagaagcgcaccgcgacgaaggccuacaacgucacccaggccuucggccggcgcgggcccgagcagacccagggcaacuucggggaccaggagcugauccggcagggcaccgacuacaagcacuggccccagaucgcccaguucgcccccagcgcguccgccuucuucgggaugagccgcaucggcauggaggugacgccguccggcaccuggcugaccuacaccggggccaucaagcucgacgacaaggaccccaacuucaaggaccaggugauccugcugaacaagcacaucgacgccuacaagacguucccgcccaccgagcccaagaaggacaagaagaagaaggccgacgagacccaggcgcucccccagcggcagaagaagcagcagaccgucacgcugcugcccgccgccgaccucgacgacuucagcaagcagcugcagcaguccaugagcuccgccgacagcacccaggcgugaggacuagucccuguucccagagcccacuuuuuuuucuuuuuuugaaauaaaauagccugucuuucagaucucaaaggcucuuuucagagccaccaaaaaaaaaaaaaaaaaaaaaaaaaaaaaaaaaaaaaaaaaaaaaaaaaaaaaaaaaaaaaaaaaaaaaaaaaaaaaaaaaaaaaaaaaaaaaaaaaaaaa

SEQ ID NO: 19175 - RNA, 1532 nt, Artificial Sequence
  SARS-CoV-2__MT831717.1__nucleocapsid protein (N) mRNA gc
aggagagucccgcagucggcguccagcggcucugcuuguucgugugugugucguugcaggccuuauucaagcuuaccaugagcgacaacggcccccagaaccagcgcaacgccccgcggaucaccuucgggggccccuccgacagcaccggguccaaccagaacggcgagcgcagcggggcccgguccaagcagcgccggccccagggccugcccaacaacacggcgagcugguucaccgcccucacccagcacggcaaggaggaccugaaguucccgcgcgggcagggcgugcccaucaacaccaacuccagccccgacgaccagaucggguacuaccggcgcgccacgcggcgcauccggggcggggacggcaagaugaaggaccugagcccccgcugguacuucuacuaccucggcaccgggccggaggccggccugcccuacggggccaacaaggacggcaucaucugggucgcgaccgagggcgcccugaacacccccaaggaccacaucgggacgcggaaccccgccaacaacgccgcgaucgugcuccagcugccgcagggcaccacccugcccaagggguucuacgccgagggcagccgcgggggcucccaggccagcucccggagcuccagccgcucccggaacagcgcccgcaacuccacccccggcagcagccgggggacgucccccgcccgcauggcgggcaacgggggcgacgccgcccucgcccugcugcuccuggaccggcugaaccagcucgagagcaagauguccgggaagggccagcagcagcagggccagaccgugaccaagaaguccgccgcggaggccuccaagaagccgcgccagaagcgcaccgccacgaaggccuacaacgucacccaggccuucgggcggcgcggccccgagcagacccaggggaacuucggcgaccaggagcugauccggcaggggaccgacuacaagcacuggccccagaucgcgcaguucgcccccagcgccuccgccuucuucggcaugagccgcaucggcauggaggugacgccguccgggaccuggcugaccuacaccggcgccaucaagcucgacgacaaggaccccaacuucaaggaccaggugauccugcugaacaagcacaucgacgcguacaagacguucccgcccaccgagcccaagaaggacaagaagaagaaggccgacgagacccaggcccucccccagcggcagaagaagcagcagaccgucacgcugcugcccgccgcggaccucgacgacuucagcaagcagcugcagcaguccaugagcuccgccgacagcacccaggccugaggacuagucccuguucccagagcccacuuuuuuuucuuuuuuugaaauaaaauagccugucuuucagaucucaaaggcucuuuucagagccaccaaaaaaaaaaaaaaaaaaaaaaaaaaaaaaaaaaaaaaaaaaaaaaaaaaaaaaaaaaaaaaaaaaaaaaaaaaaaaaaaaaaaaaaaaaaaaaaaaaaaa

SEQ ID NO: 19176 - RNA, 1532 nt, Artificial Sequence
  SARS-CoV-2__MT831745.1__nucleocapsid protein (N) mRNA gc
aggagagucccgcagucggcguccagcggcucugcuuguucgugugugugucguugcaggccuuauucaagcuuaccaugagcgacaacggcccccagaaccagcgcaacgccccgcggaucaccuucgggggccccuccgacagcaccggguccaaccagaacggcgagcgcagcggggcccgguccaagcagcgccggccccagggccugcccaacaacacggcgagcugguucaccgcccucacccagcacggcaaggaggaccugaaguucccgcgcgggcagggcgugcccaucaacaccaacuccagccccgacgaccagaucggguacuaccggcgcgccacgcggcgcauccggggcggggacggcaagaugaaggaccugagcccccgcugguacuucuacuaccucggcaccgggccggaggccggccugcccuacggggccaacaaggacggcaucaucugggucgcgaccgagggcgcccugaacacccccaaggaccacaucgggacgcggaaccccgccaacaacgccgcgaucgugcuccagcugccgcagggcaccacccugcccaagggguucuacgccgagggcucccgcgggggcucccaggccagcucccggagcuccagccgcucccggaacagcucccgcaacagcacccccggcagcucccgggggacgagccccgcccgcauggccggcaacgggggcgacgcggcccucgcccugcugcuccuggaccggcugaaccagcucgaguccaagaugagcgggaagggccagcagcagcagggccagaccgugaccaagaaguccgccgccgaggcgagcaagaagccgcgccagaagcgcaccgccacgaaggccuacaacgucacccaggccuucgggcggcgcggccccgagcagacccaggggaacuucggcgaccaggagcugauccggcaggggaccgacuacaagcacuggccccagaucgcccaguucgcgcccuccgccagcgccuucuucggcaugucccgcaucggcauggaggugacgccgagcgggaccuggcugaccuacaccggcgccaucaagcucgacgacaaggaccccacguucaaggaccaggugauccugcugaacaagcacaucgacgccuacaagaccuucccgcccaccgagcccaagaaggacaagaagaagaaggcggacgagacccaggcccucccccagcggcagaagaagcagcagacggucacccugcugcccgccgccgaccucgacgacuucuccaagcagcugcagcagagcauguccagcgcggacuccacccaggccugaggacuagucccuguucccagagcccacuuuuuuuucuuuuuuugaaauaaaauagccugucuuucagaucucaaaggcucuuuucagagccaccaaaaaaaaaaaaaaaaaaaaaaaaaaaaaaaaaaaaaaaaaaaaaaaaaaaaaaaaaaaaaaaaaaaaaaaaaaaaaaaaaaaaaaaaaaaaaaaaaaaaa

SEQ ID NO: 19177 - RNA, 1532 nt, Artificial Sequence
  SARS-CoV-2__MT831837.1__nucleocapsid protein (N) mRNA gc
aggagagucccgcagucggcguccagcggcucugcuuguucgugugugugucguugcaggccuuauucaagcuuaccaugagcgacaacggcccccagaaccagcgcaacgccccgcggaucaccuucgggggccccuccgacagcaccggguccaaccagaacggcgagcgcagcggggcccgguccaagcagcgccggccccagggccugcccaacaacacggcgagcugguucaccgcccucacccagcacggcaaggaggaccugaaguucccgcgcgggcagggcgugcccaucaacaccaacuccagccccgacgaccagaucggguacuaccggcgcgccacgcggcgcauccggggcggggacggcaagaugaaggaccugagcccccgcugguacuucuacuaccucggcaccgggccggaggccggccugcccuacggggccaacaaggacggcaucaucugggucgcgaccgagggcgcccugaacacccccaaggaccacaucgggacgcggaaccccgccaacaacgccgcgaucgugcuccagcugccgcagggcaccacccugcccaagggguucuacgccgagggcucccgcgggggcucccaggccagcucccggagcuccagccgcucccggaacagcucccgcaacagcacccccggcagcucccgggggacgagccccgcccgcguggccggcaacgggggcgacgcggcccucgcccugcugcuccuggaccggcugaaccagcucgaguccaagaugagcgggaagggccagcagcagcagggccagaccgucaccaagaaguccgccgccgaggcgagcaagaagccgcgccagaagcgcaccgccacgaaggccuacaacgugacccaggccuucgggcggcgcggccccgagcagacccaggggaacuucggcgaccaggagcugauccggcaggggaccgacuacaagcacuggccccagaucgcccaguucgcgcccuccgccagcgccuucuucggcaugucccgcaucggcauggaggugacgccgagcgggaccuggcugaccuacaccggcgccaucaagcucgacgacaaggaccccaacuucaaggaccaggucauccugcugaacaagcacaucgacgccuacaagacguucccgcccaccgagcccaagaaggacaagaagaagaaggcggacgagacccaggcccucccccagcggcagaagaagcagcagaccgugacgcugcugcccgccgccgaccucgacgacuucuccaagcagcugcagcagagcauguccagcgcggacuccacccaggccugaggacuagucccuguucccagagcccacuuuuuuuucuuuuuuugaaauaaaauagccugucuuucagaucucaaaggcucuuuucagagccaccaaaaaaaaaaaaaaaaaaaaaaaaaaaaaaaaaaaaaaaaaaaaaaaaaaaaaaaaaaaaaaaaaaaaaaaaaaaaaaaaaaaaaaaaaaaaaaaaaaaaa

SEQ ID NO: 19178 - RNA, 1532 nt, Artificial Sequence
  SARS-CoV-2__MT833958.1__nucleocapsid protein (N) mRNA gc
aggagagucccgcagucggcguccagcggcucugcuuguucgugugugugucguugcaggccuuauucaagcuuaccaugagcgacaacggcccccagaaccagcgcaacgccccgcggaucaccuucgggggccccuccgacagcaccggguccaaccagaacggcaagcgcagcggggcccgguccaagcagcgccggccccagggccugcccaacaacacggcgagcugguucaccgcccucacccagcacggcaaggaggaccugaaguucccgcgcgggcagggcgugcccaucaacaccaacuccagccccgacgaccagaucggguacuaccggcgcgccacgcggcgcauccggggcggggacggcaagaugaaggaccugagcccccgcugguacuucuacuaccucggcaccgggccggaggccggccugcccuacggggccaacaaggacggcaucaucugggucgcgaccgagggcgcccugaacacccccaaggaccacaucgggacgcggaaccccgccaacaacgccgcgaucgugcuccagcugccgcagggcaccacccugcccaagggguucuacgccgagggcucccgcgggggcucccaggccagcucccggagcuccagccgcucccggaacagcucccgcaacagcacccccggcagcuccaagcggacgagccccgcccgcauggccgggaacggcggggacgcggcccucgcccugcugcuccuggaccggcugaaccagcucgaguccaagaugagcggcaaggggcagcagcagcagggccagaccgugaccaagaaguccgccgccgaggcgagcaagaagccgcgccagaagcgcaccgccacgaaggccuacaacgucacccaggccuucggccggcgcgggcccgagcagacccagggcaacuucggggaccaggagcugauccggcagggcaccgacuacaagcacuggccccagaucgcccaguucgcgcccuccgccagcgccuucuucgggaugucccgcaucggcauggaggugacgccgagcggcaccuggcugaccuacaccggggccaucaagcucgacgacaaggaccccaacuucaaggaccaggugauccugcugaacaagcacaucgacgccuacaagacguucccgcccaccgagcccaagaaggacaagaagaagaaggcggacgagacccaggcccucccccagcggcagaagaagcagcagaccgucacgcugcugcccgccgccgaccucgacgacuucuccaagcagcugcagcagagcauguccagcgcggacuccacccaggccugaggacuagucccuguucccagagcccacuuuuuuuucuuuuuuugaaauaaaauagccugucuuucagaucucaaaggcucuuuucagagccaccaaaaaaaaaaaaaaaaaaaaaaaaaaaaaaaaaaaaaaaaaaaaaaaaaaaaaaaaaaaaaaaaaaaaaaaaaaaaaaaaaaaaaaaaaaaaaaaaaaaaa

SEQ ID NO: 19179 - RNA, 1532 nt, Artificial Sequence
  SARS-CoV-2__MT833965.1__nucleocapsid protein (N) mRNA gc
aggagagucccgcagucggcguccagcggcucugcuuguucgugugugugucguugcaggccuuauucaagcuuaccaugagcgacaacggcccccagaaccagcgcaacgccccgcggaucaccuucgggggccccuccgacagcaccggguccaaccagaacggcgagcgcagcggggcccgguccaagcagcgccggccccagggccugcccaacaacacggcgagcugguucaccgcccucacccagcacggcaaggaggaccugaaguucccgcgcgggcagggcgugcccaucaacaccaacuccagccccgacgaccagaucggguacuaccggcgcgccacgcggcgcauccggggcggggacggcaagaugaaggaccugagcccccgcugguacuucuacuaccucggcaccgggccggaggccggccugcccuacggggccaacaaggacggcaucaucugggucgcgaccgagggcgcccugaacacccccaaggaccacaucgggacgcggaaccccgccaacaacgccgcgaucgugcuccagcugccgcagggcaccacccugcccaagggguucuacguggagggcucccgcgggggcucccaggccagcucccggagcuccagccgcucccggaacagcucccgcaacagcacccccggcagcucccgggggacgagccccgcccgcauggccggcaacgggggcgacgccgcgcucgcccugcugcuccuggaccggcugaaccagcucgaguccaagaugagcgggaagggccagcagcagcagggccagaccgucaccaagaaguccgccgccgaggccagcaagaagccgcgccagaagcgcaccgcgacgaaggccuacaacgugacccaggccuucgggcggcgcggccccgagcagacccaggggaacuucggcgaccaggagcugauccggcaggggaccgacuacaagcacuggccccagaucgcccaguucgcccccuccgcgagcgccuucuucggcaugucccgcaucggcauggaggugacgccgagcgggaccuggcugaccuacaccggcgccaucaagcucgacgacaaggaccccaacuucaaggaccaggucauccugcugaacaagcacaucgacgccuacaagacguucccgcccaccgagcccaagaaggacaagaagaagaaggccgacgagacccaggcgcucccccagcggcagaagaagcagcagaccgugacgcugcugcccgccgccgaccucgacgacuucuccaagcagcugcagcagagcauguccagcgccgacuccacccaggcgugaggacuagucccuguucccagagcccacuuuuuuuucuuuuuuugaaauaaaauagccugucuuucagaucucaaaggcucuuuucagagccaccaaaaaaaaaaaaaaaaaaaaaaaaaaaaaaaaaaaaaaaaaaaaaaaaaaaaaaaaaaaaaaaaaaaaaaaaaaaaaaaaaaaaaaaaaaaaaaaaaaaaa

SEQ ID NO: 19180 - RNA, 1532 nt, Artificial Sequence
  SARS-CoV-2__MT833974.1__nucleocapsid protein (N) mRNA gc
aggagagucccgcagucggcguccagcggcucugcuuguucgugugugugucguugcaggccuuauucaagcuuaccaugagcgacaacggcccccagaaccagcgcaacgccccgcggaucaccuucgggggccccuccgacagcaccggguccaaccagaacggcgagcgcagcggggcccgguccaagcagcgccggccccagggccugcccaacaacacggcgagcugguucaccgcccucacccagcacggcaaggaggaccugaaguucccgcgcgggcagggcgugcccaucaacaccaacuccagccccgacgaccagaucggguacuaccggcgcgccacgcggcgcauccggggcggggacggcaagaugaaggaccugagcccccgcugguacuucuacuaccucggcaccgggccggaggccggccugcccuacggggccaacaaggacggcaucaucugggucgcgaccgagggcgcccugaacacccccaaggaccacaucgggacgcggaaccccgccaacaacgccgcgaucgugcuccagcugccgcagggcaccacccugcccaagggguucuacgccgagggcagccgcgggggcucccaggccagcucccggagcuccagccgcucccggaacagcucccgcaacagcaccagcggcuccagcaagcggacgucccccgcccgcauggccgggaacggcggggacgcggcccucgcccugcugcuccuggaccggcugaaccagcucgagagcaagauguccggcaaggggcagcagcagcagggccagaccgugaccaagaaguccgccgccgaggcguccaagaagccccgccagaagcgcaccgccacgaaggccuacaacgucacccaggccuucggccggcgcgggccggagcagacccagggcaacuucggggaccaggagcugauccggcagggcaccgacuacaagcacuggccccagaucgcccaguucgcgcccagcgccuccgccuucuucgggaugagccgcaucggcauggaggugacgcccuccggcaccuggcugaccuacaccggggccaucaagcucgacgacaaggacccgaacuucaaggaccaggugauccugcugaacaagcacaucgacgccuacaagacguucccgcccaccgagcccaagaaggacaagaagaagaaggcggacgagacccaggcccucccccagcggcagaagaagcagcagaccgucacgcugcugcccgccgccgaccucgacgacuucagcaagcagcugcagcaguccaugagcuccgcggacagcacccaggccugaggacuagucccuguucccagagcccacuuuuuuuucuuuuuuugaaauaaaauagccugucuuucagaucucaaaggcucuuuucagagccaccaaaaaaaaaaaaaaaaaaaaaaaaaaaaaaaaaaaaaaaaaaaaaaaaaaaaaaaaaaaaaaaaaaaaaaaaaaaaaaaaaaaaaaaaaaaaaaaaaaaaa

SEQ ID NO: 19181 - RNA, 1532 nt, Artificial Sequence
  SARS-CoV-2__MT834002.1__nucleocapsid protein (N) mRNA gc
aggagagucccgcagucggcguccagcggcucugcuuguucgugugugugucguugcaggccuuauucaagcuuaccaugagcgacaacggcccccagaaccagcgcaacgccccgcggaucaccuucgggggccccuccgacagcaccggguccaaccagaacggcgagcgcagcggggcccgguccaagcagcgccggccccagggccugcccaacaacacggcgagcugguucaccgcccucacccagcacggcaaggaggaccugaaguucccgcgcgggcagggcgugcccaucaacaccaacuccagccccgacgaccagaucggguacuaccggcgcgccacgcggcgcauccggggcggggacggcaagaugaaggaccugagcccccgcugguacuucuacuaccucggcaccgggccggaggccggccugcccuacggggccaacaaggacggcaucaucugggucgcgaccgagggcgcccugaacacccccaaggaccacaucgggacgcggaaccccgccaacaacguggccaucgugcuccagcugccgcagggcaccacccugcccaagggguucuacgcggagggcucccgcgggggcucccaggccagcucccggagcuccagccgcucccggaacagcucccgcaacagcacccccggcagcuccaagcggacgagccccgcccgcauggccgggaacggcggggacgccgcgcucgcccugcugcuccuggaccggcugaaccagcucgaguccaagaugagcggcaaggggcagcagcagcagggccagaccgucaccaagaaguccgccgccgaggccagcaagaagccgcgccagaagcgcaccgcgacgaaggccuacaacgugacccaggccuucggccggcgcgggcccgagcagacccagggcaacuucggggaccaggagcugauccggcagggcaccgacuacaagcacuggccccagaucgcccaguucgcccccuccgcgagcgccuucuucgggaugucccgcaucggcauggaggugacgccgagcggcaccuggcugaccuacaccggggccaucaagcucgacgacaaggaccccaacuucaaggaccaggucauccugcugaacaagcacaucgacgccuacaagacguucccgcccaccgagcccaagaaggacaagaagaagaaggccgacgagacccaggcgcucccccagcggcagaagaagcagcagaccgugacgcugcugcccgccgccgaccucgacgacuucuccaagcagcugcagcagagcauguccagcgccgacuccacccaggcgugaggacuagucccuguucccagagcccacuuuuuuuucuuuuuuugaaauaaaauagccugucuuucagaucucaaaggcucuuuucagagccaccaaaaaaaaaaaaaaaaaaaaaaaaaaaaaaaaaaaaaaaaaaaaaaaaaaaaaaaaaaaaaaaaaaaaaaaaaaaaaaaaaaaaaaaaaaaaaaaaaaaaa

SEQ ID NO: 19182 - RNA, 1532 nt, Artificial Sequence
  SARS-CoV-2__MT834031.1__nucleocapsid protein (N) mRNA gc
aggagagucccgcagucggcguccagcggcucugcuuguucgugugugugucguugcaggccuuauucaagcuuaccaugagcgacaacggcccccagaaccagcgcaacgccccgcggaucaccuucgggggccccuccgacagcaccggguccaaccagaacggcgagcgcagcggggcccgguccaagcagcgccggccccagggccugcccaacaacacggcgagcugguucaccgcccucacccagcacggcaaggaggaccugaaguucccgcgcgggcagggcgugcccaucaacaccaacuccagccccgacgaccagaucggguacuaccggcgcgccacgcggcgcauccggggcggggacggcaagaugaaggaccugagcccccgcugguacuucuacuaccucggcaccgggccggaggccggccugcccuacggggccaacaaggacggcaucaucugggucgcgaccgagggcgcccugaacacccccaaggaccacaucgggacgcggaaccccgccaacaacgccgcgaucgugcuccagcugccgcagggcaccacccugcccaagggguucuacgccgagggcucccgcgggggcucccaggccagcucccggagcuccagccgcucccggaacagcucccgcaacagcacccccggcagcuccaagcggacgagccccgcccgcauggccgggaacggcggggacgcggcccucgcccugcugcuccuggaccggcugaaccagcucgaguccaagaugagcggcaaggggcagcagcagcagggccagaccgugaccaagaaguccgccgccgaggcgagcaagaagccgcgccagaagcgcaccgccacgaaggccuacaacgucacccaggccuucggccggcgcgggcccgagcagacccagggcaacuucggggaccaggagcugauccggcagggcaccgacuacaagcacuggccccagaucgcccaguucgcgcccuccgccagcgccuucuucgggaugucccgcaucggcauggaggugacgccgagcggcaccuggcugaccuacaucggggccaucaagcucgacgacaaggaccccaacuucaaggaccaggugauccugcugaacaagcacaucgacgccuacaagaccuucccgcccacggagcccaagaaggacaagaagaagaaggcggacgagacccaggcccucccccagcggcagaagaagcagcagaccgucacccugcugcccgccgccgaccucgacgacuucuccaagcagcugcagcagagcauguccagcgcggacuccacgcaggccugaggacuagucccuguucccagagcccacuuuuuuuucuuuuuuugaaauaaaauagccugucuuucagaucucaaaggcucuuuucagagccaccaaaaaaaaaaaaaaaaaaaaaaaaaaaaaaaaaaaaaaaaaaaaaaaaaaaaaaaaaaaaaaaaaaaaaaaaaaaaaaaaaaaaaaaaaaaaaaaaaaaaa

SEQ ID NO: 19183 - RNA, 1532 nt, Artificial Sequence
  SARS-CoV-2__MT834038.1__nucleocapsid protein (N) mRNA gc
aggagagucccgcagucggcguccagcggcucugcuuguucgugugugugucguugcaggccuuauucaagcuuaccaugagcgacaacggcccccagaaccagcgcaacgccccgcggaucaccuucgggggccccuccgacagcaccggguccaaccagaacggcgagcgcagcggggcccgguccaagcagcgccggccccagggccugcccaacaacacggcgagcugguucaccgcccucacccagcacggcaaggaggaccugaaguucccgcgcgggcagggcgugcccaucaacaccaacuccagccccgacgaccagaucggguacuaccggcgcgccacgcggcgcauccggggcggggacggcaagaugaaggaccugagcccccgcugguacuucuacuaccucggcaccgggccggaggccggccugcccuacggggccaacaaggacggcaucaucugggucgcgaccgagggcgcccugaacacccccaaggaccacaucgggacgcggaaccccgccaacaacgccgcgaucgugcuccagcugccgcagggcaccacccugcccaagggguucuacgccgagggcucccgcgggggcucccaggccagcucccggagcuccagccgcucccggaacagcucccgcaacagcacccccggcagcucccgggggacgagccccgcccgcauggccggcaacgggggcgacgcggcccucgcccugcugcuccuggaccggcugaaccagcucgaguccaagaugagcgggaagggccagcagcagcagggccagaccgugaccaagaaguccgccgccgaggcgagcaagaagccgcgccagaagcgcaccgccacgaaggccuacaacgucacccaggccuucgggcggcgcggccccgagcagacccaggggaacuucggcgaccaggagcugauccggcaggggaccgacuacaagcacuggccccagaucgcccaguucgcgcccuccgccagcgccuucuucggcaugucccgcaucggcauggaggugacgccgagcgggaccuggcugaccuacaccggcgccaucaagcucgacgacaaggaccccaacuucaaggaccaggugauccugcugaacaagcacaucgacgccuacaagacguucccgcccaccgagcccaagaaggacaagaagaagaaggcgggggagacccaggcccucccccagcggcagaagaagcagcagaccgucacgcugcugcccgccgccgaccucgacgacuucuccaagcagcugcagcagagcauguccagcgcggacuccacccaggccugaggacuagucccuguucccagagcccacuuuuuuuucuuuuuuugaaauaaaauagccugucuuucagaucucaaaggcucuuuucagagccaccaaaaaaaaaaaaaaaaaaaaaaaaaaaaaaaaaaaaaaaaaaaaaaaaaaaaaaaaaaaaaaaaaaaaaaaaaaaaaaaaaaaaaaaaaaaaaaaaaaaaa

SEQ ID NO: 19184 - RNA, 1532 nt, Artificial Sequence
  SARS-CoV-2__MT834043.1__nucleocapsid protein (N) mRNA gc
aggagagucccgcagucggcguccagcggcucugcuuguucgugugugugucguugcaggccuuauucaagcuuaccaugagcgacaacggcccccagaaccagcgcaacgccccgcggaucaccuucgggggccccuccgacagcaccggguccaaccagaacggcgagcgcagcggggcccgguccaagcagcgccggccccagggccugcccaacaacacggcgagcugguucaccgcccucacccagcacggcaagguggaccugaaguucccgcgcgggcagggcguccccaucaacaccaacuccagccccgacgaccagaucggguacuaccggcgcgccacgcggcgcauccggggcggggacggcaagaugaaggaccugagcccccgcugguacuucuacuaccucggcaccgggccggaggccggccugcccuacggggccaacaaggacggcaucaucuggguggcgaccgagggcgcccugaacacccccaaggaccacaucgggacgcggaaccccgccaacaacgccgcgaucgugcuccagcugccgcagggcaccacccugcccaagggguucuacgccgagggcagccgcgggggcucccaggccagcucccggagcuccagccgcucccggaacagccuccgcaacuccacccccggcagcagccgggggacgucccccgcccgcauggccggcaacgggggcgacgcggcccuggcccugcuccugcuggaccggcucaaccagcuggagagcaagauguccgggaagggccagcagcagcagggccagaccgucaccaagaaguccgccgccgaggcguccaagaagccgcgccagaagcgcaccgccacgaaggccuacaacgugacccaggccuucgggcggcgcggccccgagcagacccaggggaacuucggcgaccaggagcugauccggcaggggaccgacuacaagcacuggccccagaucgcccaguucgcgcccagcgccuccgccuucuucggcaugagccgcaucggcauggaggugacgccguccgggaccuggcucaccuacaccggcgccaucaagcuggacgacaaggaccccaacuucaaggaccaggucauccugcucaacaagcacaucgacgccuacaagacguucccgcccaccgagcccaagaaggacaagaagaagaaggcggacgagacccaggcccugccccagcggcagaagaagcagcagaccgugauccugcuccccgccgccgaccuggacgacuucagcaagcagcugcagcaguccaugagcuccgcggacagcacgcaggccugaggacuagucccuguucccagagcccacuuuuuuuucuuuuuuugaaauaaaauagccugucuuucagaucucaaaggcucuuuucagagccaccaaaaaaaaaaaaaaaaaaaaaaaaaaaaaaaaaaaaaaaaaaaaaaaaaaaaaaaaaaaaaaaaaaaaaaaaaaaaaaaaaaaaaaaaaaaaaaaaaaaaa

SEQ ID NO: 19185 - RNA, 1532 nt, Artificial Sequence
  SARS-CoV-2__MT834069.1__nucleocapsid protein (N) mRNA gc
aggagagucccgcagucggcguccagcggcucugcuuguucgugugugugucguugcaggccuuauucaagcuuaccaugagcgacaacggcccccagaaccagcgcaacgccccgcacaucaccuucgggggccccuccgacagcaccggguccaaccagaacggcgagcggagcggggcccgcuccaagcagcggcgcccccagggccugcccaacaacacggcgagcugguucaccgcccucacccagcacggcaaggaggaccugaaguucccgcgggggcagggcgugcccaucaacaccaacuccagccccgacgaccagaucggguacuaccgccgggccacgcgccggauccgcggcggggacggcaagaugaaggaccugagcccccggugguacuucuacuaccucggcaccgggccggaggccggccugcccuacggggccaacaaggacggcaucaucugggucgcgaccgagggcgcccugaacacccccaaggaccacaucgggacgcgcaaccccgccaacaacgccgcgaucgugcuccagcugccgcagggcaccacccugcccaagggguucuacgccgagggcucccgcgggggcucccaggccagcucccggagcuccagccggucccgcaacagcucccggaacagcacccccggcagcuccaagcgcacgagccccgcccggauggccgggaacggcggggacgcggcccucgcccugcugcuccuggaccgccugaaccagcucgaguccaagaugagcggcaaggggcagcagcagcagggccagaccgugaccaagaaguccgccgccgaggcgagcaagaagccgcggcagaagcgcaccgccacgaaggccuacaacgucacccaggccuucggccgccgggggcccgagcagacccagggcaacuucggggaccaggagcugauccgccagggcaccgacuacaagcacuggccccagaucgcccaguucgcgcccuccgccagcgccuucuucgggaugucccggaucggcauggaggugacgccgagcggcaccuggcugaccuacaccggggccaucaagcucgacgacaaggaccccaacuucaaggaccaggugauccugcugaacaagcacaucgacgccuacaagacguucccgcccaccgagcccaagaaggacaagaagaagaaggcggacgagacccaggcccucccccagcgccagaagaagcagcagaccgucacgcugcugcccgccgccgaccucgacgacuucuccaagcagcugcagcagagcauguccagcgcggacuccacccaggccugaggacuagucccuguucccagagcccacuuuuuuuucuuuuuuugaaauaaaauagccugucuuucagaucucaaaggcucuuuucagagccaccaaaaaaaaaaaaaaaaaaaaaaaaaaaaaaaaaaaaaaaaaaaaaaaaaaaaaaaaaaaaaaaaaaaaaaaaaaaaaaaaaaaaaaaaaaaaaaaaaaaaa

SEQ ID NO: 19186 - RNA, 1532 nt, Artificial Sequence
  SARS-CoV-2__MT834123.1__nucleocapsid protein (N) mRNA gc
aggagagucccgcagucggcguccagcggcucugcuuguucgugugugugucguugcaggccuuauucaagcuuaccaugagcgacaacggcccccagaaccagcgcaacgccccgcggaucaccuucgggggccccuccgacagcaccggguccaaccagaacggcgagcgcagcggggcccgguccaagcagcgccggccccagggccugagcaacaacacggcguccugguucaccgcccucacccagcacggcaaggaggaccugaaguucccccgcgggcagggcgugccgaucaacaccaacagcucccccgacgaccagaucggguacuaccggcgcgccacgcggcgcauccggggcggggacggcaagaugaaggaccugagcccccgcugguacuucuacuaccucggcaccgggcccgaggccggccugccguacggggccaacaaggacggcaucaucugggucgcgaccgagggcgcccugaacacccccaaggaccacaucgggacgcggaaccccgccaacaacgccgcgaucgugcuccagcugccccagggcaccacccugccgaagggguucuacgccgagggcucccgcgggggcagccaggccuccagccgguccagcucccgcagccggaacuccagccgcaacagcacccccggcuccagcaagcggacgucccccgcccgcauggccgggaacggcggggacgcggcccucgcccugcugcuccuggaccggcugaaccagcucgagagcaagauguccggcaaggggcagcagcagcagggccagaccgugaccaagaaguccgccgccgaggcgagcaagaagccccgccagaagcgcaccgccacgaaggccuacaacgucacccaggccuucggccggcgcgggccggagcagacccagggcaacuucggggaccaggagcugauccggcagggcaccgacuacaagcacuggccccagaucgcccaguucgcgcccagcgccuccgccuucuucgggaugagccgcaucggcauggaggugacgcccuccggcaccuggcugaccuacaccggggccaucaagcucgacgacaaggacccgaacuucaaggaccaggugauccugcugaacaagcacaucgacgccuacaagacguucccgcccaccgagcccaagaaggacaagaagaagaaggcggacgagacccaggcccucccccagcggcagaagaagcagcagaccgucacgcugcugcccgccgccgaccucgacgacuucagcaagcagcugcagcaguccaugagcuccgcggacagcacccaggccugaggacuagucccuguucccagagcccacuuuuuuuucuuuuuuugaaauaaaauagccugucuuucagaucucaaaggcucuuuucagagccaccaaaaaaaaaaaaaaaaaaaaaaaaaaaaaaaaaaaaaaaaaaaaaaaaaaaaaaaaaaaaaaaaaaaaaaaaaaaaaaaaaaaaaaaaaaaaaaaaaaaaa

SEQ ID NO: 19187 - RNA, 1532 nt, Artificial Sequence
  SARS-CoV-2__MT834129.1__nucleocapsid protein (N) mRNA gc
aggagagucccgcagucggcguccagcggcucugcuuguucgugugugugucguugcaggccuuauucaagcuuaccaugagcgacaacggcccccagaaccagcgcaacgccccgcggaucaccuucgggggccccuccgacagcaccggguccaaccagaacggcgagcgcagcggggcccgguccaagcagcgccggccccagggccugcccaacaacacggcgagcugguucaccgcccucacccagcacggcaaggaggaccugaaguucccgcgcgggcagggcgugcccaucaacaccaacuccagccccgacgaccagaucggguacuaccggcgcgccacgcggcgcauccggggcggggacggcaagaugaaggaccugagcccccgcugguacuucuacuaccucggcaccgggccggaggccggccugcccuacggggccaacaaggacggcaucaucugggucgcgaccgagggcgcccugaacacccccaaggaccacaucgggacgcggaaccccgccaacaacgccgcgaucgugcuccagcugccgcagggcaccacccugcccaagggguucuacgccgagggcucccgcgggggcucccaggccagcucccggagcuccagccgcucccggaacagcucccgcaacagcacccccggcagcuccaagcggacgagccccgcccgcauggccgggaacggcggggacgcggcccucgcccugcugcuccuggaccggcugaaccagcucgaguccaagaugagcggcaaggggcagcagcagcagggccagaccgugaccaagaaguccgccgccgaggcgagcaagaagccgcgccagaagcgcaccgccacgaaggccuacaacgucacccaggccuucggccggcgcgggcccgagcagacccagggcaacuucggggaccaggagcugauccggcagggcaccgacuacaagcacuggccccagaucgcccaguucgcgcccuccgccagcgccuucuucgggaugucccgcaucggcauggaggugacgccgagcggcauguggcugaccuacaccggggccaucaagcucgacgacaaggaccccaacuucaaggaccaggugauccugcugaacaagcacaucgacgccuacaagaccuucccgcccacggagcccaagaaggacaagaagaagaaggcggacgagacccaggcccucccccagcggcagaagaagcagcagaccgucacccugcugcccgccgccgaccucgacgacuucuccaagcagcugcagcagagcauguccagcgcggacuccacgcaggccugaggacuagucccuguucccagagcccacuuuuuuuucuuuuuuugaaauaaaauagccugucuuucagaucucaaaggcucuuuucagagccaccaaaaaaaaaaaaaaaaaaaaaaaaaaaaaaaaaaaaaaaaaaaaaaaaaaaaaaaaaaaaaaaaaaaaaaaaaaaaaaaaaaaaaaaaaaaaaaaaaaaaa

SEQ ID NO: 19188 - RNA, 1532 nt, Artificial Sequence
  SARS-CoV-2__MT834213.1__nucleocapsid protein (N) mRNA gc
aggagagucccgcagucggcguccagcggcucugcuuguucgugugugugucguugcaggccuuauucaagcuuaccaugagcgacaacggcccccagaaccagcgcaacgccccgcggaucaccuucgggggccccuccgacagcaccggguccaaccagaacggcgagcgcagcggggcccgguccaagcagcgccggccccagggccugcccaacaacacggcgagcugguucaccgcccucacccagcacggcaaggaggaccugaaguucccgcgcgggcagggcgugcccaucaacaccaacuccagccccgacgaccagaucggguacuaccggcgcgccacgcggcgcauccggggcggggacggcaagaugaaggaccugagcccccgcugguacuucuacuaccucggcaccgggccggaggccggccugcccuacggggccaacaaggacggcaucaucugggucgcgaccgagggcgcccugaacacccccaaggaccacaucgggacgcggaaccccgccaacaacgccgcgaucgugcuccagcugccgcagggcaccacccugcccaagggguucuacgccgagggcucccgcgggggcucccaggccagcucccggagcuccagccgcucccggaacagcucccgcaacagcacccccggcagcucccgggggacgagccccgcccgcauggccggcaacgggggcgacgcggcccucgcccugcugcuccuggaccggcugaaccagcucgaguccaagaugagcgggaagggccagcagcagcagggccagaccgugaccaagaaguccgccgccgaggcgagcaagaagccgcgccagaagcgcaccgccacgaaggccuacaacgucacccaggccuucgggcggcgcggccccgagcagacccaggggaacuucggcgaccaggagcugauccggcaggggaccgacuacaagcacuggccccagaucgcccaguucgcgcccuccgccagcgccuucuucggcaugucccgcaucggcauggaggugacgccgagcgggauguggcugaccuacaccggcgccaucaagcucgacgacaaggaccccaacuucaaggaccaggugauccugcugaacaagcacaucgacgccuacaagaccuucccgcccacggagcccaagaaggacaagaagaagaaggcggacgagacccaggcccucccccagcggcagaagaagcagcagaccgucacccugcugcccgccgccgaccucgacgacuucuccaagcagcugcagcagagcauguccagcgcggacuccacgcaggccugaggacuagucccuguucccagagcccacuuuuuuuucuuuuuuugaaauaaaauagccugucuuucagaucucaaaggcucuuuucagagccaccaaaaaaaaaaaaaaaaaaaaaaaaaaaaaaaaaaaaaaaaaaaaaaaaaaaaaaaaaaaaaaaaaaaaaaaaaaaaaaaaaaaaaaaaaaaaaaaaaaaaa

SEQ ID NO: 19189 - RNA, 1532 nt, Artificial Sequence
  SARS-CoV-2__MT834233.1__nucleocapsid protein (N) mRNA gc
aggagagucccgcagucggcguccagcggcucugcuuguucgugugugugucguugcaggccuuauucaagcuuaccaugagcgacaacggcccccagaaccagcgcaacgccccgcggaucaccuucgggggccccuccgacagcaccggguccaaccagaacggcgagcgcagcggggcccgguccaagcagcgccggccccagggccugcccaacaacacggcgagcugguucaccgcccucacccagcacggcaaggaggaccugaaguucccgcgcgggcagggcgugcccaucaacaccaacuccagccccgacgaccagaucggguacuaccggcgcgccacgcggcgcauccggggcggggacggcaagaugaaggaccugagcccccgcugguacuucuacuaccucggcaccgggccggaggccggccugcccuacggggccaacaaggacggcaucaucugggucgcgaccgagggcgcccugaacacccccaaggaccacaucgggacgcggaaccccgccaacaacgccgcgaucgugcuccagcugccgcagggcaccacccugcccaagggguucuacgccgagggcucccgcgggggcucccaggccagcucccggagcuccagccgcucccggaacagcucccgcaacagcacccccggcagcucccgggggacgagccccgcccgcauggccggcaacgggggcgacgcggcccucgcccugcugcuccuggaccggcugaaccagcucgaguccaagaugagcgggaagggccagcagcagcagggccagaccgugaccaagaaguccgccgccgaggcgagcaagaagccgcgccagaagcgcaccgccacgaaggccuacaacgucacccaggccuucgggcggcgcggccccgagcagacccaggggaacuucggcgaccaggagcugauccggcaggggaccgacuacaagcacuggccccagaucgcccaguucgcgcccuccgccagcgccuucuucggcaugucccgcaucggcauggaggugacgccgagcgggaccuggcugaccuacaccggcgccaucaagcucgacgacaaggaccccaacuucaaggaccaggugauccugcugaacaagcacaucgacgccuacaagacguucccccucaccgagcccaagaaggacaagaagaagaaggcggacgagacccaggcccugccgcagcggcagaagaagcagcagaccgucacgcugcuccccgccgccgaccuggacgacuucuccaagcagcugcagcagagcauguccagcgcggacuccacccaggccugaggacuagucccuguucccagagcccacuuuuuuuucuuuuuuugaaauaaaauagccugucuuucagaucucaaaggcucuuuucagagccaccaaaaaaaaaaaaaaaaaaaaaaaaaaaaaaaaaaaaaaaaaaaaaaaaaaaaaaaaaaaaaaaaaaaaaaaaaaaaaaaaaaaaaaaaaaaaaaaaaaaaa

SEQ ID NO: 19190 - RNA, 1532 nt, Artificial Sequence
  SARS-CoV-2__MT834245.1__nucleocapsid protein (N) mRNA gc
aggagagucccgcagucggcguccagcggcucugcuuguucgugugugugucguugcaggccuuauucaagcuuaccaugagcgacaacggcccccagaaccagcgcaacgccccgcggaucaccuucgggggccccuccgacagcaccggguccaaccagaacggcgagcgcagcggggcccgguccaagcagcgccggccccagggccugcccaacaacacggcgagcugguucaccgcccucacccagcacggcaaggaggaccugaaguucccgcgcgggcagggcgugcccaucaacaccaacuccagccccgacgaccagaucggguacuaccggcgcgccacgcggcgcauccggggcggggacggcaagaugaaggaccugagcccccgcugguacuucuacuaccucggcaccgggccggaggccggccugcccuacggggccaacaaggacggcaucaucugggucgcgaccgagggcgcccugaacacccccaaggaccacaucgggacgcggaaccccgccaacaacgccgcgaucgugcuccagcugccgcagggcaccacccugcccaagggguucuacgccgagggcucccgcgggggcucccaggccagcucccggagcuccagccgcucccggaacagcucccgcaacagcacccccggcagcuccaagcggacgagccccgcccgcauggccgggaacggcggggacgcggcccucgcccugcugcuccuggaccggcugaaccagcucgaguccaagaugagcggcaaggggcagcagcagcagugccagaccgugaccaagaaguccgccgccgaggcgagcaagaagccgcgccagaagcgcaccgccacgaaggccuacaacgucacccaggccuucggccggcgcggccccgagcagacccaggggaacuucggcgaccaggagcugauccggcaggggaccgacuacaagcacuggccccagaucgcccaguucgcgcccuccgccagcgccuucuucggcaugucccgcaucgggauggaggugacgccgagcggcaccuggcugaccuacaccggcgccaucaagcucgacgacaaggaccccaacuucaaggaccaggugauccugcugaacaagcacaucgacgccuacaagacguucccgcccaccgagcccaagaaggacaagaagaagaaggcggacgagacccaggcccucccccagcggcagaagaagcagcagaccgucacgcugcugcccgccgccgaccucgacgacuucuccaagcagcugcagcagagcauguccagcgcggacuccacccaggccugaggacuagucccuguucccagagcccacuuuuuuuucuuuuuuugaaauaaaauagccugucuuucagaucucaaaggcucuuuucagagccaccaaaaaaaaaaaaaaaaaaaaaaaaaaaaaaaaaaaaaaaaaaaaaaaaaaaaaaaaaaaaaaaaaaaaaaaaaaaaaaaaaaaaaaaaaaaaaaaaaaaaa

SEQ ID NO: 19191 - RNA, 1532 nt, Artificial Sequence
  SARS-CoV-2__MT834281.1__nucleocapsid protein (N) mRNA gc
aggagagucccgcagucggcguccagcggcucugcuuguucgugugugugucguugcaggccuuauucaagcuuaccaugagcgacaacggcccccagaaccagcgcaacgccccgcggaucaccuucgggggccccuccgacagcaccggguccaaccagaacggcgagcgcagcggggcccgguccaagcagcgccggccccagggccugcccaacaacacggcgagcugguucaccgcccucacccagcacggcaaggaggaccugaaguucccgcgcgggcagggcgugcccaucaacaccaacuccagccccgacgaccagaucggguacuaccggcgcgccacgcggcgcauccggggcggggacggcaagaugaaggaccugagcccccgcugguacuucuacuaccucggcaccgggccggaggccggccugcccuacggggccaacaaggacggcaucaucugggucgcgaccgagggcgcccugaacacccccaaggaccacaucgggacgcggaaccccgccaacaacgccgcgaucgugcuccagcugccgcagggcaccacccugcccaagggguucuacgccgagggcucccgcgggggcucccaggccagcucccggagcuccagccgcucccggaacagcucccgcaacagcacccccggcagcucccggcgcacgagccccgcccggauggccgggaacggcggggacgcggcccucgcccugcugcuccuggaccgccugaaccagcucgaguccaagaugagcggcaaggggcagcagcagcagggccagaccgugaccaagaaguccgccgccgaggcgagcaagaagccgcgccagaagcggaccgccacgaaggccuacaacgucacccaggccuucggccgccgggggcccgagcagacccagggcaacuucggggaccaggagcugauccgccagggcaccgacuacaagcacuggccccagaucgcccaguucgcgcccuccgccagcgccuucuucgggaugucccggaucggcauggaggugacgccgagcggcaccuggcugaccuacaccggggccaucaagcucgacgacaaggaccccaacuucaaggaccaggugauccugcugaacaagcacaucgacgccuacaagacguucccgcccaccgagcccaagaaggacaagaagaagaaggcggacgagacccaggcccucccccagcgccagaagaagcagcagaccgucacgcugcugcccgccgccgaccucgacgacuucuccaagcagcugcagcagagcauguccagcgcggacuccacccaggccugaggacuagucccuguucccagagcccacuuuuuuuucuuuuuuugaaauaaaauagccugucuuucagaucucaaaggcucuuuucagagccaccaaaaaaaaaaaaaaaaaaaaaaaaaaaaaaaaaaaaaaaaaaaaaaaaaaaaaaaaaaaaaaaaaaaaaaaaaaaaaaaaaaaaaaaaaaaaaaaaaaaaa

SEQ ID NO: 19192 - RNA, 1532 nt, Artificial Sequence
  SARS-CoV-2__MT834348.1__nucleocapsid protein (N) mRNA gc
aggagagucccgcagucggcguccagcggcucugcuuguucgugugugugucguugcaggccuuauucaagcuuaccaugagcgacaacggcccccagaaccagcgcaacgccccgcggaucaccuucgggggccccuccgacagcaccggguccaaccagaacggcgagcgcagcggggcccgguccaagcagcgccggccccagggccugcccaacaacacggcgagcugguucaccgcccucacccagcacggcaaggaggaccugaaguucccgcgcgggcagggcgugcccaucaacaccaacuccagccccgacgaccagaucggguacuaccggcgcgccacgcggcgcauccggggcggggacggcaagaugaaggaccugagcccccgcugguacuucuacuaccucggcaccgggccggaggucggccugcccuacggggccaacaaggacggcaucaucuggguggccaccgagggcgcgcugaacacccccaaggaccacaucgggacgcggaaccccgccaacaacgccgccaucgugcuccagcugccgcagggcaccacccugcccaagggguucuacgcggagggcucccgcgggggcucccaggccagcucccggagcuccagccgcucccggaacagcucccgcaacagcacccccggcagcuccaagcggacgagccccgcccgcauggccgggaacggcggggacgccgcgcucgcccugcugcuccuggaccggcugaaccagcucgaguccaagaugagcggcaaggggcagcagcagcagggccagaccgucaccaagaaguccgccgccgaggccagcaagaagccgcgccagaagcgcaccgcgacgaaggccuacaacgugacccaggccuucggccggcgcgggcccgagcagacccagggcaacuucggggaccaggagcugauccggcagggcaccgacuacaagcacuggccccagaucgcccaguucgcccccuccgcgagcgccuucuucgggaugucccgcaucggcauggaggugacgccgagcggcaccuggcugaccuacaccggggccaucaagcucgacgacaaggaccccaacuucaaggaccaggucauccugcugaacaagcacaucgacgccuacaagacguucccgcccaccgagcccaagaaggacaagaagaagaaggccgacgagacccaggcgcucccccagcggcagaagaagcagcagaccgugacgcugcugcccgccgccgaccucgacgacuucuccaagcagcugcagcagagcauguccagcgccgacuccacccaggcgugaggacuagucccuguucccagagcccacuuuuuuuucuuuuuuugaaauaaaauagccugucuuucagaucucaaaggcucuuuucagagccaccaaaaaaaaaaaaaaaaaaaaaaaaaaaaaaaaaaaaaaaaaaaaaaaaaaaaaaaaaaaaaaaaaaaaaaaaaaaaaaaaaaaaaaaaaaaaaaaaaaaaa

SEQ ID NO: 19193 - RNA, 1532 nt, Artificial Sequence
  SARS-CoV-2__MT834661.1__nucleocapsid protein (N) mRNA gc
aggagagucccgcagucggcguccagcggcucugcuuguucgugugugugucguugcaggccuuauucaagcuuaccaugagcgacaacggcccccagaaccagcgcaacgccccgcggaucaccuucgggggccccuccgacagcaccggguccaaccagaacggcgagcgcagcggggcccgguccaagcagcgccggccccagggccugcccaacaacacggcgagcugguucaccgcccucacccagcacggcaaggaggaccugaaguucccgcgcgggcagggcgugcccaucaacaccaacuccagccccgacgaccagaucggguacuaccggcgcgccacgcggcgcauccggggcggggacggcaagaugaaggaccugagcccccgcugguacuucuacuaccucggcaccgggccggaggccggccugcccuacggggccaacaaggacggcaucaucugggucgcgaccgagggcgcccugaacacccccaaggaccacaucgggacgcggaaccccgccaacaacgccgcgaucgugcuccagcugccgcagggcaccacccugcccaagggguucuacgccgagggcucccgcgggggcucccagaccagcucccggagcuccagccgcucccggaacagcucccgcaacagcacgcccggcagcucccgggggaccagccccgcccgcauggccggcaacgggggcgacgccgcgcucgcccugcugcuccuggaccggcugaaccagcucgaguccaagaugagcgggaagggccagcagcagcagggccagaccgugaccaagaaguccgccgccgaggccagcaagaagccgcgccagaagcgcacggcgaccaaggccuacaacgucacccaggccuucgggcggcgcggccccgagcagacccaggggaacuucggcgaccaggagcugauccggcaggggacggacuacaagcacuggccccagaucgcccaguucgcccccuccgcgagcgccuucuucggcaugucccgcaucggcauggaggugaccccgagcgggaccuggcugaccuacacgggcgccaucaagcucgacgacaaggaccccaacuucaaggaccaggugauccugcugaacaagcacaucgacgccuacaagaccuucccgcccaccgagcccaagaaggacaagaagaagaaggccgacgagacccaggcgcucccccagcggcagaagaagcagcagacggucacccugcugcccgccgccgaccucgacgacuucuccaagcagcugcagcagagcauguccagcgccgacuccacccaggcgugaggacuagucccuguucccagagcccacuuuuuuuucuuuuuuugaaauaaaauagccugucuuucagaucucaaaggcucuuuucagagccaccaaaaaaaaaaaaaaaaaaaaaaaaaaaaaaaaaaaaaaaaaaaaaaaaaaaaaaaaaaaaaaaaaaaaaaaaaaaaaaaaaaaaaaaaaaaaaaaaaaaaa

SEQ ID NO: 19194 - RNA, 1532 nt, Artificial Sequence
  SARS-CoV-2__MT834687.1__nucleocapsid protein (N) mRNA gc
aggagagucccgcagucggcguccagcggcucugcuuguucgugugugugucguugcaggccuuauucaagcuuaccaugagcgacaacggcccccagaaccagcgcaacgccccgcggaucaccuucgggggccccuccgacagcaccggguccaaccagaacggcgagcgcagcggggcccgguccaagcagcgccggccccagggccugcccaacaacacggcgagcugguucaccgcccucacccagcacggcaaggaggaccugaaguucccgcgcgggcagggcgugcccaucaacaccaacuccagccccgacgaccagaucggguacuaccggcgcgccacgcggcgcauccggggcggggacggcaagaugaaggaccugagcccccgcugguacuucuacuaccucggcaccgggccggaggccggccugcccuacggggccaacaaggacggcaucaucugggucgcgaccgagggcgcccugaacacccccaaggaccacaucgggacgcggaaccccgccaacaacgccgcgaucgugcuccagcugccgcagggcaccacccugcccaagggguucuacgccgagggcucccgcgggggcucccaggccagcucccggagcuccagccgcucccggaacagcucccgcaacagcacccccggcagcucccgggggacgagccucgccaagauggccggcaacgggggcgacgcggcccuggcccugcuccugcuggaccgccucaaccagcuggaguccaagaugagcgggaagggccagcagcagcagggccagaccgugaccaagaaguccgccgccgaggcgagcaagaagccccggcagaagcgcaccgccacgaaggccuacaacgucacccaggccuucgggcgccggggcccggagcagacccaggggaacuucggcgaccaggagcugauccgccaggggaccgacuacaagcacuggccccagaucgcccaguucgcgcccuccgccagcgccuucuucggcaugucccggaucggcauggaggugacgcccagcgggaccuggcucaccuacaccggcgccaucaagcuggacgacaaggacccgaacuucaaggaccaggugauccugcucaacaagcacaucgacgccuacaagacguucccgcccaccgagcccaagaaggacaagaagaagaaggcggacgagacccaggcccugucccagcgccagaagaagcagcagaccgucacgcugcuccccgccgccgaccuggacgacuucagcaagcagcugcagcaguccaugagcuccgcggacagcacccaggccugaggacuagucccuguucccagagcccacuuuuuuuucuuuuuuugaaauaaaauagccugucuuucagaucucaaaggcucuuuucagagccaccaaaaaaaaaaaaaaaaaaaaaaaaaaaaaaaaaaaaaaaaaaaaaaaaaaaaaaaaaaaaaaaaaaaaaaaaaaaaaaaaaaaaaaaaaaaaaaaaaaaaa

SEQ ID NO: 19195 - RNA, 1532 nt, Artificial Sequence
  SARS-CoV-2__MT834689.1__nucleocapsid protein (N) mRNA gc
aggagagucccgcagucggcguccagcggcucugcuuguucgugugugugucguugcaggccuuauucaagcuuaccaugagcgacaacggcccccagaaccagcgcaacgccccgcggaucaccuucgggggccccuccgacagcaccggguccaaccagaacggcgagcgcagcggggcccgguccaagcagcgccggccccagggccugcccaacaacacggcgagcugguucaccgcccucacccagcacggcaaggaggaccugaaguucccgcgcgggcagggcgugcccaucaacaccaacuccagccccgacgaccagaucggguacuaccggcgcgccacgcggcgcauccggggcggggacggcaagaugaaggaccugagcccccgcugguacuucuacuaccucggcaccgggccggaggccggccugcccuacggggccaacaaggacggcaucaucugggucgcgaccgagggcgcccugaacacccccaaggaccacaucgggacgcggaaccccgccaacaacgccgcgaucgugcuccagcugccgcagggcaccacccugcccaagggguucuacgccgagggcagccgcgggggcucccaggccagcucccggagcuccagccgcaaccggaacuccagccgcaacuccacccccggcagcagccgggggacgucccccgcccgcauggccggcaacgggggcgacgcggcccucgcccugcugcuccuggaccggcugaaccagcucgagagcaagauguccgggaagggccagcagcagcagggccagaccgugaccaagaaguccgccgccgaggcguccaagaagccgcgccagaagcgcaccgccacgaaggccuacaacgucacccaggccuucgggcggcgcggccccgagcagacccaggggaacuucggcgaccaggagcugauccggcaggggaccgacuacaagcacuggccccagaucgcccaguucgcgcccagcgccuccgccuucuucggcaugagccgcaucggcauggaggugacgccguccgggaccuggcugaccuacaccggcgccaucaagcucgacgacaaggaccccaacuucaaggaccaggugauccugcugaacaagcacaucgacgccuacaagacguucccgcccaccgagcccaagaaggacaagaagaagaaggcggacgagacccaggcccucccccagcggcagaagaagcagcagaccgucacgcugcugcccgccgccgaccucgacgacuucagcaagcagcugcagcaguccaugagcuccgcggacagcacccaggccugaggacuagucccuguucccagagcccacuuuuuuuucuuuuuuugaaauaaaauagccugucuuucagaucucaaaggcucuuuucagagccaccaaaaaaaaaaaaaaaaaaaaaaaaaaaaaaaaaaaaaaaaaaaaaaaaaaaaaaaaaaaaaaaaaaaaaaaaaaaaaaaaaaaaaaaaaaaaaaaaaaaaa

SEQ ID NO: 19196 - RNA, 1532 nt, Artificial Sequence
  SARS-CoV-2__MT834715.1__nucleocapsid protein (N) mRNA gc
aggagagucccgcagucggcguccagcggcucugcuuguucgugugugugucguugcaggccuuauucaagcuuaccaugagcgacaacggcccccagaaccagcgcaacgccccgcggaucaccuucgggggccccuccgacagcaccggguccaaccagaacggcgagcgcagcggggcccgguccaagcagcgccggccccagggccugcccaacaacacggcgagcugguucaccgcccucacccagcacggcaaggaggaccugaaguucccgcgcgggcagggcgugcccaucaacaccaacuccagccccgacgaccagaucggguacuaccggcgcgccacgcggcgcauccggggcggggacggcaagaugaaggaccugagcccccgcugguacuucuacuaccucggcaccgggccggaggccggccugcccuacggggccaacaaggacggcaucaucugggucgcgaccgagggcgcccugaacacccccaaggaccacaucgggacgcggaaccccgccaacaacgccgcgaucgugcuccagcugccgcagggcaccacccugcccaagggguucuacgccgagggcucccgcgggggcucccaggccagcucccggagcuccagccgcucccggaacagcucccgcaacagcacccccggcagcucccgggggacgagccccggccgcauggccgggaacggcggggacgccgcgcucgcccugcugcuccuggaccggcugaaccagcucgaguccaagaugagcggcaagggccagcagcagcaggggcagaccgugaccaagaaguccgccgccgaggccagcaagaagccgcgccagaagcgcaccgcgacgaaggccuacaacgucacccaggccuucggccggcgcgggcccgagcagacccagggcaacuucggggaccaggagcugauccggcagggcaccgacuacaagcacuggccccagaucgcccaguucgcccccuccgcgagcgccuucuucggcaugucccgcaucgggauggaggugacgccgagcggcaccuggcugaccuacaccggggccaucaagcucgacgacaaggaccccaacuucaaggaccaggugauccugcugaacaagcacaucgacgccuacaagacguucccgcccaccgagcccaagaaggacaagaagaagaaggccgacgagacccaggcgcucccccagcggcagaagaagcagcagaccgucauccugcugcccgccgccgaccucgacgacuucuccaagcagcugcagcagagcauguccagcgccgacuccacgcaggcgugaggacuagucccuguucccagagcccacuuuuuuuucuuuuuuugaaauaaaauagccugucuuucagaucucaaaggcucuuuucagagccaccaaaaaaaaaaaaaaaaaaaaaaaaaaaaaaaaaaaaaaaaaaaaaaaaaaaaaaaaaaaaaaaaaaaaaaaaaaaaaaaaaaaaaaaaaaaaaaaaaaaaa

SEQ ID NO: 19197 - RNA, 1532 nt, Artificial Sequence
  SARS-CoV-2__MT827212.1__nucleocapsid protein (N) mRNA gc
aggagagucccgcagucggcguccagcggcucugcuuguucgugugugugucguugcaggccuuauucaagcuuaccaugagcgacaacggcccccagaaccagcgcaacgccccgcggaucaccuucgggggccccuccgacagcaccggguccaaccagaacggcgagcgcagcggggcccgguccaagcagcgccggccccagggccugcccaacaacacggcgagcugguucaccgcccucacccagcacggcaaggaggaccugaaguucccgcgcgggcagggcgugcccaucaacaccaacuccagccccgacgaccagaucggguacuaccggcgcgccacgcggcgcauccggggcggggacggcaagaugaaggaccugagcccccgcugguacuucuacuaccucggcaccgggccggaggccggccugcccuacggggccaacaaggacggcaucaucugggucgcgaccgagggcgcccugaacacccccaaggaccacaucgggacgcggaaccccgccaacaacgccgcgaucgugcuccagcugccgcagggcaccacccugcccaagggguucuacgccgagggcucccgcgggggcucccaggccagcucccggagcuccagccgcucccggaacagcucccgcaacagcacccccggcagcucccgggggacgagccccgcccgcauggccggcaacgggggcgacgcggcccucgcccugcugcuccuggaccggcugaaccagcucgaguccaagaugagcgggaagggccagcagcagcagggccagaccgugaccaagaaguccgucgccgaggccagcaagaagccgcgccagaagcgcaccgcgacgaaggccuacaacgugacccaggccuucgggcggcgcggccccgagcagacccaggggaacuucggcgaccaggagcugauccggcaggggaccgacuacaagcacuggccccagaucgcccaguucgcccccuccgcgagcgccuucuucggcaugucccgcaucggcauggaggugacgccgagcgggaccuggcugaccuacaccggcgccaucaagcucgacgacaaggaccccaacuucaaggaccaggucauccugcugaacaagcacaucgacgccuacaagacguucccgcccaccgagcccaagaaggacaagaagaagaaggccgacgagacccaggcgcucccccagcggcagaagaagcagcagaccgugacgcugcugcccgccgccgaccucgacgacuucuccaagcagcugcagcagagcauguccagcgccgacuccacccaggcgugaggacuagucccuguucccagagcccacuuuuuuuucuuuuuuugaaauaaaauagccugucuuucagaucucaaaggcucuuuucagagccaccaaaaaaaaaaaaaaaaaaaaaaaaaaaaaaaaaaaaaaaaaaaaaaaaaaaaaaaaaaaaaaaaaaaaaaaaaaaaaaaaaaaaaaaaaaaaaaaaaaaaa

SEQ ID NO: 19198 - RNA, 1532 nt, Artificial Sequence
  SARS-CoV-2__MT825091.1__nucleocapsid protein (N) mRNA gc
aggagagucccgcagucggcguccagcggcucugcuuguucgugugugugucguugcaggccuuauucaagcuuaccaugagcgacaacggcccccagaaccagcagaacgccccgcgcaucaccuucgggggccacuccgacagcaccggguccaaccagaacggcgagcggagcggggcccgcuccaagcagcggcgcccccagggccugcccaacaacacggcgagcugguucaccgcccucacccagcacggcaaggaggaccugaaguucccccgggggcagggcgugccgaucaacaccaacuccagccccgacgaccagaucggguacuaccgccgggccacgcgccggauccgcggcggggacggcaagaugaaggaccugagcccccggugguacuucuacuaccucggcaccgggcccgaggccggccugccguacggggccaacaaggacggcaucaucugggucgcgaccgagggcgcccugaacacccccaaggaccacaucgggacgcucaaccccgccaacaacgccgcgaucgugcugcagcugccccagggcaccacccucccgaagggguucuacgccgagggcagccgcgggggcucccaggccagcucccggagcuccagccgcucccggaacagccugcgcaacuccacccccggcagcagccgggggacgucccccgcccgcauggccggcaacgggggcgacgcggcccuggcccuccugcugcucgaccggcugaaccagcuggagagcaagauguccgggaagggccagcagcagcagggccagaccgugaccaagaaguccgccgccgaggcguccaagaagccccgccagaagcggaccgccacgaaggccuacaacgucacccaggccuucgggcgccgcggcccggagcagacccaggggaacuucggcgaccaggagcucauccggcaggggaccgacuacaagcacuggccccagaucgcccaguucgcgcccagcgccuccgccuucuucggcaugagccgcaucggcauggaggugacgcccuccgggaccuggcugaccuacaccggcgccaucaagcuggacgacaaggacccgaacuucaaggaccaggugauccuccugaacaagcacaucgacgccuacaagacguucccgcccaccgagcccaagaaggacaagaagaagaaggcggacgagacccaggcccugccccagcggcagaagaagcagcucaccgucacgcugcugcccgccgccgaccucgacgacuucagcaagcagcugcagcaguccaugagcuccgcggacagcacccaggccugaggacuagucccuguucccagagcccacuuuuuuuucuuuuuuugaaauaaaauagccugucuuucagaucucaaaggcucuuuucagagccaccaaaaaaaaaaaaaaaaaaaaaaaaaaaaaaaaaaaaaaaaaaaaaaaaaaaaaaaaaaaaaaaaaaaaaaaaaaaaaaaaaaaaaaaaaaaaaaaaaaaaa

SEQ ID NO: 19199 - RNA, 1532 nt, Artificial Sequence
  SARS-CoV-2__MT821594.1__nucleocapsid protein (N) mRNA gc
aggagagucccgcagucggcguccagcggcucugcuuguucgugugugugucguugcaggccuuauucaagcuuaccaugagcgacaacggcccccagaaccagcgcaacgccccgcggaucaccuucgggggccccuccgacagcaccggguccaaccagaacggcgagcgcagcggggcccgguccaagcagcgccggccccagggccugcccaacaacacggcgagcugguucaccgcccucacccagcacggcaaggaggaccugaaguucccgcgcgggcagggcgugcccaucaacaccaacuccagccccgacgaccagaucggguacuaccggcgcgccacgcggcgcauccggggcggggacggcaagaugaaggaccugagcccccgcugguacuucuacuaccucggcaccgggccggaggccggccugcccuacggggccaacaaggacggcaucaucugggucgcgaccgagggcgcccugaacacccccaaggaccacaucgggacgcggaaccccgccaacaacgccgcgaucgugcuccagcugccgcagggcaccacccugcccaagggguucuacgccgagggcucccgcgggggcucccaggccagcucccggagcuccagccgcucccggaacagcucccgcaacagcacccccggcagcucccgggggacgagccccgcccgcauggccggcaacgggggcgacgcggcccucgcccugcugcuccuggaccggcugaaccagcucgaguccaagaugagcgggaagggccagcagcagcagggccagaccgugaccaagaaguccgccgccgaggcgagcaagaagccgcgccagaagcgcaccgccacgaaggccuacaacgucacccaggccuucgggcggcgcggccccgagcagacccaggggaacuucggcgaccaggagcugauccggcaggggaccgacuacaagcacuggccccagaucgcccaguucgcgcccuccgccagcgccuucuucggcaugucccgcaucggcauggaggugacgccgagcgggaccuggcugaccuacaccggcgccaucaagcucgacgacaaggaccccaacuucaaggaccaggugauccugcugaacaagcacaucgacgccuacaagacguuccccuccaccgagcccaagaaggacaagaagaagaaggcggacgagacccaggcccucccgcagcggcagaagaagcagcagaccgucacgcugcugcccgccgccgaccucgacgacuucagcaagcagcugcagcaguccaugagcuccgcggacagcacccaggccugaggacuagucccuguucccagagcccacuuuuuuuucuuuuuuugaaauaaaauagccugucuuucagaucucaaaggcucuuuucagagccaccaaaaaaaaaaaaaaaaaaaaaaaaaaaaaaaaaaaaaaaaaaaaaaaaaaaaaaaaaaaaaaaaaaaaaaaaaaaaaaaaaaaaaaaaaaaaaaaaaaaaa

SEQ ID NO: 19200 - RNA, 1532 nt, Artificial Sequence
  SARS-CoV-2__MT821646.1__nucleocapsid protein (N) mRNA gc
aggagagucccgcagucggcguccagcggcucugcuuguucgugugugugucguugcaggccuuauucaagcuuaccaugagcgacaacggcccccagaaccagcgcaacgccccgcggaucaccuucgggggccccuccgacagcaccggguccaaccagaacggcgagcgcagcggggcccgguccaagcagcgccggccccagggccugcccaacaacacggcgagcugguucaccgcccucacccagcacggcaaggaggaccugaaguucccgcgcgggcagggcgugcccaucaacaccaacuccagccccgacgaccagaucggguacuaccggcgcgccacgcggcgcauccggggcggggacggcaagaugaaggaccugagcccccgcugguacuucuacuaccucggcaccgggccggaggccggccugcccuacggggccaacaaggacggcaucaucugggucgcgaccgagggcgcccugaacacccccaaggaccacaucgggacgcggaaccccgccaacaacgccgcgaucgugcuccagcugccgcagggcaccacccugcccaagggguucuacgccgagggcucccgcgggggcucccaggccagcucccggagcuccagccgcucccggaacagcucccgcaacagcacccccggcagcuccaaggggacgagccccgcccggauggccggcaacgggggcgacgcggcccucgcccugcugcuccuggaccgccugaaccagcucgaguccaagaugagcgggaagggccagcagcagcagggccagaccgugaccaagaaguccgccgccgaggcgagcaagaagccgcggcagaagcgcaccgccacgaaggccuacaacgucacccaggccuucgggcgccggggccccgagcagacccaggggaacuucggcgaccaggagcugauccgccaggggaccgacuacaagcacuggccccagaucgcccaguucgcgcccuccgccagcgccuucuucggcaugucccggaucggcauggaggugacgccgagcgggaccuggcugaccuacaccggcgccaucaagcucgacgacaaggaccccaacuucaaggaccaggugauccugcugaacaagcacaucgacgccuacaagacguucccgcccaccgagcccaagaaggacaagaagaagaaggcggacgagacccaggcccucccccagcgccagaagaagcagcagaccgucacgcugcugcccgccgccgaccucgacgacuucuccaagcagcugcagcagagcauguccagcgcggacuccacccaggccugaggacuagucccuguucccagagcccacuuuuuuuucuuuuuuugaaauaaaauagccugucuuucagaucucaaaggcucuuuucagagccaccaaaaaaaaaaaaaaaaaaaaaaaaaaaaaaaaaaaaaaaaaaaaaaaaaaaaaaaaaaaaaaaaaaaaaaaaaaaaaaaaaaaaaaaaaaaaaaaaaaaaa

SEQ ID NO: 19201 - RNA, 1532 nt, Artificial Sequence
  SARS-CoV-2__MT821766.1__nucleocapsid protein (N) mRNA gc
aggagagucccgcagucggcguccagcggcucugcuuguucgugugugugucguugcaggccuuauucaagcuuaccaugagcgacaacggcccccagaaccagcgcaacgccccgcggaucaccuucgggggccccuccgacagcaccggguccaaccagaacggcgagcgcagcggggcccgguccaagcagcgccggccccagggccugcccaacaacacggcgagcugguucaccgcccucacccagcacggcaaggaggaccugaaguucccgcgcgggcagggcgugcccaucaacaccaacuccagccccgacgaccagaucggguacuaccggcgcgccacgcggcgcauccggggcggggacggcaagaugaaggaccugagcccccgcugguacuucuacuaccucggcaccgggccggaggccggccugcccuacggggccaacaaggacggcaucaucugggucgcgaucgagggcgcccugaacacccccaaggaccacaucgggacccggaaccccgccaacaacgccgcgaucgugcuccagcugccgcagggcacgacccugcccaagggguucuacgccgagggcucccgcgggggcucccaggccagcucccggagcuccagccgcucccggaacagcucccgcaacagcacccccggcagcucccgggggaccagccccgcccgcauggccggcaacgggggcgacgcggcccucgcccugcugcuccuggaccggcugaaccagcucgaguccaagaugagcgggaagggccagcagcagcagggccagacggugaccaagaaguccgccgccgaggcgagcaagaagccgcgccagaagcgcaccgccaccaaggccuacaacgucacgcaggccuucgggcggcgcggccccgagcagacccaggggaacuucggcgaccaggagcugauccggcaggggaccgacuacaagcacuggccccagaucgcccaguucgcgcccuccgccagcgccuucuucggcaugucccgcaucggcauggaggugaccccgagcgggacguggcugaccuacaccggcgccaucaagcucgacgacaaggaccccaacuucaaggaccaggugauccugcugaacaagcacaucgacgccuacaagaccuucccgcccacggagcccaagaaggacaagaagaagaaggcggacgagacccaggcccucccccagcggcagaagaagcagcagaccgucacccugcugcccgccgccgaccucgacgacuucuccaagcagcugcagcagagcauguccagcgcggacuccacgcaggccugaggacuagucccuguucccagagcccacuuuuuuuucuuuuuuugaaauaaaauagccugucuuucagaucucaaaggcucuuuucagagccaccaaaaaaaaaaaaaaaaaaaaaaaaaaaaaaaaaaaaaaaaaaaaaaaaaaaaaaaaaaaaaaaaaaaaaaaaaaaaaaaaaaaaaaaaaaaaaaaaaaaaa

SEQ ID NO: 19202 - RNA, 1532 nt, Artificial Sequence
  SARS-CoV-2__MT821773.1__nucleocapsid protein (N) mRNA gc
aggagagucccgcagucggcguccagcggcucugcuuguucgugugugugucguugcaggccuuauucaagcuuaccaugagcgacaacggcccccagaaccagcgcaacgccccgcggaucaccuucgggggccccuccgacagcaucggguccaaccagaacggcgagcgcagcggggcccgguccaagcagcgccggccccagggccugcccaacaacaccgcgagcugguucacggcccucacccagcacggcaaggaggaccugaaguucccgcgcgggcagggcgugcccaucaacaccaacuccagccccgacgaccagaucggguacuaccggcgcgccacccggcgcauccggggcggggacggcaagaugaaggaccugagcccccgcugguacuucuacuaccucggcacggggccggaggccggccugcccuacggggccaacaaggacggcaucaucugggucgcgaccgagggcgcccugaacacccccaaggaccacaucgggacccggaaccccgccaacaacgccgcgaucgugcuccagcugccgcagggcacgacccugcccaagggguucuacgccgagggcucccgcgggggcucccaggccagcucccggagcuccagccgcucccggaacagcucccgcaacagcacccccggcagcucccgggggaccagccccgcccgcauggccggcaacgggggcgacgcggcccucgcccugcugcuccuggaccggcugaaccagcucgaguccaagaugagcgggaagggccagcagcagcagggccagacggugaccaagaaguccgccgccgaggcgagcaagaagccgcgccagaagcgcaccgccaccaaggccuacaacgucacgcaggccuucgggcggcgcggccccgagcagacccaggggaacuucggcgaccaggagcugauccggcaggggaccgacuacaagcacuggccccagaucgcccaguucgcgcccuccgccagcgccuucuucggcaugucccgcaucggcauggaggugaccccgagcgggacguggcugaccuacaccggcgccaucaagcucgacgacaaggaccccaacuucaaggaccaggugauccugcugaacaagcacaucgacgccuacaagaccuucccgcccacggagcccaagaaggacaagaagaagaaggcggacgagacccaggcccucccccagcggcagaagaagcagcagaccgucacccugcugcccgccgccgaccucgacgacuucuccaagcagcugcagcagagcauguccagcgcggacuccacgcaggccugaggacuagucccuguucccagagcccacuuuuuuuucuuuuuuugaaauaaaauagccugucuuucagaucucaaaggcucuuuucagagccaccaaaaaaaaaaaaaaaaaaaaaaaaaaaaaaaaaaaaaaaaaaaaaaaaaaaaaaaaaaaaaaaaaaaaaaaaaaaaaaaaaaaaaaaaaaaaaaaaaaaaa

SEQ ID NO: 19203 - RNA, 1532 nt, Artificial Sequence
  SARS-CoV-2__MT821776.1__nucleocapsid protein (N) mRNA gc
aggagagucccgcagucggcguccagcggcucugcuuguucgugugugugucguugcaggccuuauucaagcuuaccaugagcgacaacggcccccagaaccagcgcaacgccccgcggaucaccuucgggggccccuccgacagcaccggguccaaccagaacggcgagcgcagcggggcccgguccaagcagcgccggccccagggccugcccaacaacacggcgagcugguucaccgcccucacccagcacggcaaggaggaccugaaguucccgcgcgggcagggcgugcccaucaacaccaacuccagccccgacgaccagaucggguacuaccggcgcgccacgcggcgcauccggggcggggacggcaagaugaaggaccugagcccccgcugguacuucuacuaccucggcaccgggccggaggccggccugcccuacggggccaacaaggacggcaucaucugggucgcgaccgagggcgccuucaacacccccaaggaccacaucgggacgcggaaccccgccaacaacgccgcgaucgugcugcagcucccgcagggcaccacccugcccaagggguucuacgccgagggcucccgcgggggcucccaggccagcucccggagcuccagccgcucccggaacagcucccgcaacagcacccccggcagcucccgggggacgagccccgcccgcauggccggcaacgggggcgacgcggcccuggcccuccugcugcucgaccggcugaaccagcuggaguccaagaugagcgggaagggccagcagcagcagggccagaccgugaccaagaaguccgccgccgaggcgagcaagaagccgcgccagaagcgcaccgccacgaaggccuacaacgucacccaggccuucgggcggcgcggccccgagcagacccaggggaacuucggcgaccaggagcucauccggcaggggaccgacuacaagcacuggccccagaucgcccaguucgcgcccuccgccagcgccuucuucggcaugucccgcaucggcauggaggugacgccgagcgggaccuggcugaccuacaccggcgccaucaagcuggacgacaaggaccccaacuucaaggaccaggugauccuccugaacaagcacaucgacgccuacaagacguucccgcccaccgagcccaagaaggacaagaagaagaaggcggacgagacccaggcccugccccagcggcagaagaagcagcagaccgucacgcuccugcccgccgccgaccuggacgacuucuccaagcagcuccagcagagcauguccagcgcggacuccacccaggccugaggacuagucccuguucccagagcccacuuuuuuuucuuuuuuugaaauaaaauagccugucuuucagaucucaaaggcucuuuucagagccaccaaaaaaaaaaaaaaaaaaaaaaaaaaaaaaaaaaaaaaaaaaaaaaaaaaaaaaaaaaaaaaaaaaaaaaaaaaaaaaaaaaaaaaaaaaaaaaaaaaaaa

SEQ ID NO: 19204 - RNA, 1532 nt, Artificial Sequence
  SARS-CoV-2__MT821778.1__nucleocapsid protein (N) mRNA gc
aggagagucccgcagucggcguccagcggcucugcuuguucgugugugugucguugcaggccuuauucaagcuuaccaugagcgacaacggcccccagaaccagcgcaacgccccgcggaucaccuucgggggccccuccgacagcaccggguccaaccagaacggcgagcgcagcggggcccgguccaagcagcgccggccccagggccugcccaacaacacggcgagcugguucaccgcccucacccagcacggcaaggaggaccugaaguucccgcgcgggcagggcgugcccaucaacaccaacuccagccccgacgaccagaucggguacuaccggcgcgccacgcggcgcauccggggcggggacggcaagaugaaggaccugagcccccgcugguacuucuacuaccucggcaccgggccggaggccggccugcccuacggggccaacaaggacggcaucaucugggucgcgaccgagggcgcccugaacacccccaaggaccacaucgggacgcggaaccccgccaacaacgccgcgaucgugcuccagcugccgcagggcaccacccugcccaagggguucuacgccgagggcucccgcgggggcucccaggccagcuccugcagcuccagccggucccgcaacagcucccggaacagcacccccggcagcucccgcgggacgagccccgcccggauggccggcaacgggggcgacgcggcccucgcccugcugcuccuggaccgccugaaccagcucgaguccaagaugagcgggaagggccagcagcagcagggccagaccgugaccaagaaguccgccgccgaggcgagcaagaagccgcggcagaagcgcaccgccacgaaggccuacaacgucacccaggccuucgggcgccggggccccgagcagacccaggggaacuucggcgaccaggagcugauccgccaggggaccgacuacaagcacuggccccagaucgcccaguucgcgcccuccgccagcgccuucuucggcaugucccggaucggcauggaggugacgccgagcgggaccuggcugaccuacaccggcgccaucaagcucgacgacaaggaccccaacuucaaggaccaggugauccugcugaacaagcacaucgacgccuacaagacguucccgcccaccgagcccaagaaggacaagaagaagaaggcggacgagacccaggcccucccccagcgccagaagaagcagcagaccgucacgcugcugcccgccgccgaccucgacgacuucuccaagcagcugcagcagagcauguccagcgcggacuccacccaggccugaggacuagucccuguucccagagcccacuuuuuuuucuuuuuuugaaauaaaauagccugucuuucagaucucaaaggcucuuuucagagccaccaaaaaaaaaaaaaaaaaaaaaaaaaaaaaaaaaaaaaaaaaaaaaaaaaaaaaaaaaaaaaaaaaaaaaaaaaaaaaaaaaaaaaaaaaaaaaaaaaaaaa

SEQ ID NO: 19205 - RNA, 1532 nt, Artificial Sequence
  SARS-CoV-2__MT820465.1__nucleocapsid protein (N) mRNA gc
aggagagucccgcagucggcguccagcggcucugcuuguucgugugugugucguugcaggccuuauucaagcuuaccaugagcgacaacggcccccagaaccagcgcaacgccccgcggaucaccuucgggggccccuccgacagcaccggguccaaccagaacggcgagcgcagcggggcccgguccaagcagcgccggccccagggccugcccaacaacacggcgagcugguucaccgcccucacccagcacggcaaggaggaccugaaguucccgcgcgggcagggcgugcccaucaacaccaacuccagccccgacgaccagaucggguacuaccggcgcgccacgcggcgcauccggggcggggacggcaagaugaaggaccugagcccccgcugguacuucuacuaccucggcaccgggccggaggccggccugcccuacggggccaacaaggacggcaucaucugggucgcgaccgagggcgcccugaacacccccaaggaccacaucgggacgcggaaccccgccaacaacgccgcgaucgugcuccagcugccgcagggcaccacccugcccaagggguucuacgccgagggcucccgcgggggcucccaggccagcucccggagcuccagccgcucccggaacagcucccgcaacagcacccccggcagcuccaagcggacgagccccgcccgcauggccgggaacggcggggacgcggcccucgcccugcugcuccuggaccggcugaaccagcucgaguccaagaugagcggcaaggggcagcagcagcagggccagaccgugaccaagaaguccgccgccgaggcgagcaagaagccgcgccagaagcgcaccgccacgaaggccuacaacgucacccaggccuucggccggcgcgggcccgagcagacccagggcaacuucggggaccaggagcugauccggcagggcaccgacuacaagcacuggccccagaucgcccaguucgcgcccuccgccagcgccuucuucgggaugucccgcaucggcauggaggugacgccgagcggcaccuggcugaccuacaccggggccaucaagcucgacgacaaggaccccaacuucaaggaccaggugauccugcugaacaagcacaucgacgccuacaagacguucccgcccaccgagcccaagauggacaagaagaagaaggcggacgagacccaggcccucccccagcggcagaagaagcagcagaccgucacgcugcugcccgccgccgaccucgacgacuucuccaagcagcugcagcagagcauguccagcgcggacuccacccaggccugaggacuagucccuguucccagagcccacuuuuuuuucuuuuuuugaaauaaaauagccugucuuucagaucucaaaggcucuuuucagagccaccaaaaaaaaaaaaaaaaaaaaaaaaaaaaaaaaaaaaaaaaaaaaaaaaaaaaaaaaaaaaaaaaaaaaaaaaaaaaaaaaaaaaaaaaaaaaaaaaaaaaa

SEQ ID NO: 19206 - RNA, 1532 nt, Artificial Sequence
  SARS-CoV-2__MT810677.1__nucleocapsid protein (N) mRNA gc
aggagagucccgcagucggcguccagcggcucugcuuguucgugugugugucguugcaggccuuauucaagcuuaccaugagcgacaacggccccaagaaccagcgcaacgccccgcggaucaccuucgggggccccuccgacagcaccggguccaaccagaacggcgagcgcagcggggcccgguccaagcagcgccggccccagggccugcccaacaacacggcgagcugguucaccgcccucacccagcacggcaaggaggaccugaaguucccgcgcgggcagggcgugcccaucaacaccaacuccagccccgacgaccagaucggguacuaccggcgcgccacgcggcgcauccggggcggggacggcaagaugaaggaccugagcccccgcugguacuucuacuaccucggcaccgggccggaggccggccugcccuacggggccaacaaggacggcaucaucugggucgcgaccgagggcgcccugaacacccccaaggaccacaucgggacgcggaaccccgccaacaacgccgcgaucgugcuccagcugccgcagggcaccacccugcccaagggguucuacgccgagggcagccgcgggggcucccaggccagcucccggagcuccagccgcucccggaacagccuccgcaacuccacccccggcagcagccgggggacgucccccgcccgcauggccggcaacgggggcgacgcggcccuggcccugcuccugcuggaccggcucaaccagcuggagagcaagauguccgggaagggccagcagcagcagggccagaccgugaccaagaaguccgccgccgaggcguccaagaagccgcgccagaagcgcaccgccacgaaggccuacaacgucacccaggccuucgggcggcgcggccccgagcagacccaggggaacuucggcgaccaggagcugauccggcaggggaccgacuacaagcacuggccccagaucgcccaguucgcgcccagcgccuccgccuucuucggcaugagccgcaucggcauggaggugacgccguccgggaccuggcucaccuacaccggcgccaucaagcuggacgacaaggaccccaacuucaaggaccaggugauccugcucaacaagcacaucgacgccuacaagacguucccgcccaccgagcccaagaaggacaagaagaagaaggcggacgagacccaggcccugccccagcggcagaagaagcagcagaccgucacgcugcuccccgccgccgaccuggacgacuucagcaagcagcugcagcaguccaugagcuccgcggacagcacccaggccugaggacuagucccuguucccagagcccacuuuuuuuucuuuuuuugaaauaaaauagccugucuuucagaucucaaaggcucuuuucagagccaccaaaaaaaaaaaaaaaaaaaaaaaaaaaaaaaaaaaaaaaaaaaaaaaaaaaaaaaaaaaaaaaaaaaaaaaaaaaaaaaaaaaaaaaaaaaaaaaaaaaaa

SEQ ID NO: 19207 - RNA, 1532 nt, Artificial Sequence
  SARS-CoV-2__MT810703.1__nucleocapsid protein (N) mRNA gc
aggagagucccgcagucggcguccagcggcucugcuuguucgugugugugucguugcaggccuuauucaagcuuaccaugagcgacaacggcccccagaaccagcgcaacgccccgcggaucaccuucgggggccccuccgacagcaccggguccaaccagaacggcgagcgcagcggggcccgguccaagcagcgccggccccagggccugcccaacaacacggcgagcugguucaccgcccucacccagcacggcaaggaggaccugaaguucccgcgcgggcagggcgugcccaucaacaccaacuccagccccgacgaccagaucggguacuaccggcgcgccacgcggcgcauccggggcggggacggcaagaugaaggaccugagcccccgcugguacuucuacuaccucggcaccgggccggaggccggccugcccuacggggccaacaaggacggcaucaucugggucgcgaccgagggcgcccugaacacccccaaggaccacaucgggacgcggaaccccgccaacaacgccgcgaucgugcuccagcugccgcagggcaccacccugcccaagggguucuacgccgagggcagccgcgggggcucccaggccagcucccggagcuccagccgcucccggaacagccuccgcaacuccacccccggcagcagccgggggacgucccccgcccgcauggccggcaacgggggcgacgcggcccuggcccugcuccugcuggaccggcucaaccagcuggagagcaagauguccgggaagggccagcagcagcagggccagaccgugaccaagaaguccgccgccgaggcguccaagaagccgcgccagaagcgcaccgccacgaaggccuacaacgucacccaggccuucgggcggcgcggccccgagcagacccaggggaacuucggcgaccaggagcugauccggaaggggaccgacuacaagcacuggccccagaucgcccaguucgcgcccagcgccuccgccuucuucggcaugagccgcaucggcauggaggugacgccguccgggaccuggcucaccuacaccggcgccaucaagcuggacgacaaggaccccaacuucaaggaccaggugauccugcucaacaagcacaucgacgccuacaagacguucccgcccaccgagcccaagaaggacaagaagaagaaggcggacgagacccaggcccugccccagcggcagaagaagcagcagaccgucacgcugcuccccgccgccgaccuggacgacuucagcaagcagcugcagcaguccaugagcuccgcggacagcacccaggccugaggacuagucccuguucccagagcccacuuuuuuuucuuuuuuugaaauaaaauagccugucuuucagaucucaaaggcucuuuucagagccaccaaaaaaaaaaaaaaaaaaaaaaaaaaaaaaaaaaaaaaaaaaaaaaaaaaaaaaaaaaaaaaaaaaaaaaaaaaaaaaaaaaaaaaaaaaaaaaaaaaaaa

SEQ ID NO: 19208 - RNA, 1532 nt, Artificial Sequence
  SARS-CoV-2__MT810718.1__nucleocapsid protein (N) mRNA gc
aggagagucccgcagucggcguccagcggcucugcuuguucgugugugugucguugcaggccuuauucaagcuuaccaugagcgacaacggcccccagaaccagcgcaacgccccgcggaucaccuucgggggccccuccgacagcaccggguccaaccagaacggcgagcgcagcggggcccgguccaagcagcgccggccccagggccugcccaacaacacggcgagcugguucaccgcccucacccagcacggcaaggaggaccugaaguucccgcgcgggcagggcgugcccaucaacaccaacuccagccccgacgaccagaucggguacuaccggcgcgccacgcggcgcauccggggcggggacggcaagaugaaggaccugagcccccgcugguacuucuacuaccucggcaccgggccggaggccggccugcccuacggggccaacaaggacggcaucaucugggucgcgaccgagggcgcccugaacacccccaaggaccacaucgggacgcggaaccccgccaacaacgccgcgaucgugcuccagcugccgcagggcaccacccugcccaagggguucuacgccgagggcagccgcgggggcucccaggccagcucccggagcuccagccgcucccggaacagccuccgcaacuccacccccggcagcagccgggggacgucccccgcccgcauggccggcaacgggggcgacgcggcccuggcccugcuccugcuggaccggcucaaccagcuggagagcaagauguccgggaagggccagcagcagcagggccagaccgugaccaagaaguccgccgccgaggcguccaagaagccgcgccagaagcgcaccgccacgaaggccuacaacgucacccaggccuucgggcggcgcggccccgagcagacccaggggaacuucggcgaccacgagcugauccggcaggggaccgacuacaagcacuggccccagaucgcccaguucgcgcccagcgccuccgccuucuucggcaugagccgcaucggcauggaggugacgccguccgggaccuggcucaccuacaccggcgccaucaagcuggacgacaaggaccccaacuucaaggaccaggugauccugcucaacaagcacaucgacgccuacaagacguucccgcccaccgagcccaagaaggacaagaagaagaaggcggacgagacccaggcccugccccagcggcagaagaagcagcagaccgucacgcugcuccccgccgccgaccuggacgacuucagcaagcagcugcagcaguccaugagcuccgcggacagcacccaggccugaggacuagucccuguucccagagcccacuuuuuuuucuuuuuuugaaauaaaauagccugucuuucagaucucaaaggcucuuuucagagccaccaaaaaaaaaaaaaaaaaaaaaaaaaaaaaaaaaaaaaaaaaaaaaaaaaaaaaaaaaaaaaaaaaaaaaaaaaaaaaaaaaaaaaaaaaaaaaaaaaaaaa

SEQ ID NO: 19209 - RNA, 1532 nt, Artificial Sequence
  SARS-CoV-2__MT810839.1__nucleocapsid protein (N) mRNA gc
aggagagucccgcagucggcguccagcggcucugcuuguucgugugugugucguugcaggccuuauucaagcuuaccaugagcgacaacggcccccagaaccagcgcaacgccccgcggaucaccuucgggggccccuccgacagcaccggguccaaccagaacggcgagcgcagcggggcccgguccaagcagcgccggccccagggccugcccaacaacacggcgagcugguucaccgcccucacccagcacggcaaggaggaccugaaguucccgcgcgggcagggcgugcccaucaacaccaacuccagccccgacgaccagaucggguacuaccggcgcgccacgcggcgcauccggggcggggacggcaagaugaaggaccugagcccccgcugguacuucuacuaccucggcaccgggccggaggccggccugcccuacggggccaacaaggacggcaucaucugggucgcgaccgagggcgcccugaacacccccaaggaccacaucgggacgcggaaccccgccaacaacgccgcgaucgugcuccagcugccgcagggcaccacccugcccaagggguucuacgccgagggcagccgcgggggcucccaggccagcucccggagcuccagccgcucccggaacagccuccgcaacuccacccccggcagcagccgggggacgucccccgcccgcauggccggcaacgggggcgacgcggcccuggcccugcuccugcuggaccggcucaaccagcuggagagcaagauguccgggaagggccagcagcagcagggccagaccgugaccaagaaguccgccgccgaggcguccaagaagccgcgccagaagcgcaccgccacgaaggccuacaacgucacccaggccuucgggcggcgcggccccgagcagauccaggggaacuucggcgaccaggagcugauccggcaggggaccgacuacaagcacuggccccagaucgcccaguucgcgcccagcgccuccgccuucuucggcaugagccgcaucggcauggaggugaccccguccgggacguggcucaccuacaccggcgccaucaagcuggacgacaaggaccccaacuucaaggaccaggugauccugcucaacaagcacaucgacgccuacaagaccuucccgcccacggagcccaagaaggacaagaagaagaaggcggacgagacccaggcccugccccagcggcagaagaagcagcagaccgucacccugcuccccgccgccgaccuggacgacuucagcaagcagcugcagcaguccaugagcuccgcggacagcacgcaggccugaggacuagucccuguucccagagcccacuuuuuuuucuuuuuuugaaauaaaauagccugucuuucagaucucaaaggcucuuuucagagccaccaaaaaaaaaaaaaaaaaaaaaaaaaaaaaaaaaaaaaaaaaaaaaaaaaaaaaaaaaaaaaaaaaaaaaaaaaaaaaaaaaaaaaaaaaaaaaaaaaaaaa

SEQ ID NO: 19210 - RNA, 1532 nt, Artificial Sequence
  SARS-CoV-2__MT810848.1__nucleocapsid protein (N) mRNA gc
aggagagucccgcagucggcguccagcggcucugcuuguucgugugugugucguugcaggccuuauucaagcuuaccaugagcgacaacggcccccagaaccaccgcaacgccccgcggaucaccuucgggggccccuccgacagcaccggguccaaccagaacggcgagcgcagcggggcccgguccaagcagcgccggccccagggccugcccaacaacacggcgagcugguucaccgcccucacccagcacggcaaggaggaccugaaguucccgcgcgggcagggcgugcccaucaacaccaacuccagccccgacgaccagaucggguacuaccggcgcgccacgcggcgcauccggggcggggacggcaagaugaaggaccugagcccccgcugguacuucuacuaccucggcaccgggccggaggccggccugcccuacggggccaacaaggacggcaucaucugggucgcgaccgagggcgcccugaacacccccaaggaccacaucgggacgcggaaccccgccaacaacgccgcgaucgugcuccagcugccgcagggcaccacccugcccaagggguucuacgccgagggcagccgcgggggcucccaggccagcucccggagcuccagccgcucccggaacagccuccgcaacuccacccccggcagcagccgggggacgucccccgcccgcauggccggcaacgggggcgacgcggcccuggcccugcuccugcuggaccggcucaaccagcuggagagcaagauguccgggaagggccagcagcagcagggccagaccgugaccaagaaguccgccgccgaggcguccaagaagccgcgccagaagcgcaccgccacgaaggccuacaacgucacccaggccuucgggcggcgcggccccgagcagacccaggggaacuucggcgaccaggagcugauccggcaggggaccgacuacaagcacuggccccagaucgcccaguucgcgcccagcgccuccgccuucuucggcaugagccgcaucggcauggaggugacgccguccgggaccuggcucaccuacaccggcgccaucaagcuggacgacaaggaccccaacuucaaggaccaggugauccugcucaacaagcacaucgacgccuacaagacguucccgcccaccgagcccaagaaggacaagaagaagaaggcggacgagacccaggcccugccccagcggcagaagaagcagcagaccgucacgcugcuccccgccgccgaccuggacgacuucagcaagcagcugcagcaguccaugagcuccgcggacagcacccaggccugaggacuagucccuguucccagagcccacuuuuuuuucuuuuuuugaaauaaaauagccugucuuucagaucucaaaggcucuuuucagagccaccaaaaaaaaaaaaaaaaaaaaaaaaaaaaaaaaaaaaaaaaaaaaaaaaaaaaaaaaaaaaaaaaaaaaaaaaaaaaaaaaaaaaaaaaaaaaaaaaaaaaa

SEQ ID NO: 19211 - RNA, 1532 nt, Artificial Sequence
  SARS-CoV-2__MT810855.1__nucleocapsid protein (N) mRNA gc
aggagagucccgcagucggcguccagcggcucugcuuguucgugugugugucguugcaggccuuauucaagcuuaccaugagcgacaacggcccccagaaccagcgcaacgccccgcggaucaccuucgggggccccuccgacagcaccggguccaaccagaacggcgagcgcagcggggcccgguccaagcagcgccggccccagggccugcccaacaacacggcgagcugguucaccgcccucacccagcacggcaaggaggaccugaaguucccgcgcgggcagggcgugcccaucaacaccaacuccagccccgacgaccagaucggguacuaccggcgcgccacgcggcgcauccggggcggggacggcaagaugaaggaccugagcccccgcugguacuucuacuaccucggcaccgggccggaggccggccugcccuacggggccaacaaggacggcaucaucugggucgcgaccgagggcgcccugaacacccccaaggaccacaucgggacgcggaaccccgccaacaacgccgcgaucgugcuccagcugccgcagggcaccacccugcccaagggguucuacgccgagggcucccgcgggggcucccaggccagcucccggagcuccagccgcucccggaacagcucccgcaacagcacccccggcagcuccauggggacgagccccgcccggauggccggcaacgggggcgacgcggcccucgcccugcugcuccuggaccgccugaaccagcucgaguccaagaugagcgggaagggccagcagcagcagggccagaccgugaccaagaaguccgccgccgaggcgagcaagaagccgcggcagaagcgcaccgccacgaaggccuacaacgucacccaggccuucgggcgccggggccccgagcagacccaggggaacuucggcgaccaggagcugauccgccaggggaccgacuacaagcacuggccccagaucgcccaguucgcgcccuccgccagcgccuucuucggcaugucccggaucggcauggaggugacgccgagcgggaccuggcugaccuacaccggcgccaucaagcucgacgacaaggaccccaacuucaaggaccaggugauccugcugaacaagcacaucgacgccuacaagacguucccgcccaccgagcccaagaaggacaagaagaagaaggcggacgagacccaggcccucccccagcgccagaagaagcagcagaccgucacgcugcugcccgccgccgaccucgacgacuucuccaagcagcugcagcagagcauguccagcgcggacuccacccaggccugaggacuagucccuguucccagagcccacuuuuuuuucuuuuuuugaaauaaaauagccugucuuucagaucucaaaggcucuuuucagagccaccaaaaaaaaaaaaaaaaaaaaaaaaaaaaaaaaaaaaaaaaaaaaaaaaaaaaaaaaaaaaaaaaaaaaaaaaaaaaaaaaaaaaaaaaaaaaaaaaaaaaa

SEQ ID NO: 19212 - RNA, 1532 nt, Artificial Sequence
  SARS-CoV-2__MT810952.1__nucleocapsid protein (N) mRNA gc
aggagagucccgcagucggcguccagcggcucugcuuguucgugugugugucguugcaggccuuauucaagcuuaccaugagcgacaacggcccccagaaccagcgcaacgccccgcggaucaccuucgggggccccuccgacagcaccggguccaaccagaacggcgagcgcagcggggcccgguccaagcagcgccggccccagggccugcccaacaacacggcgagcugguucaccgcccucacccagcacggcaaggaggaccugaaguucccgcgcgggcagggcgugcccaucaacaccaacuccagccccgacgaccagaucggguacuaccggcgcgccacgcggcgcauccggggcggggacggcaagaugaaggaccugagcccccgcugguacuucuacuaccucggcaccgggccggaggccggccugcccuacggggccaacaaggacggcaucaucugggucgcgaccgagggcgcccugaacacccccaaggaccacaucgggacgcggaaccccgccaacaacgccgcgaucgugcuccagcugccgcagggcaccacccugcccaagggguucuacgccgagggcucccgcgggggcucccaggccagcucccggagcuccagccgcucccggaacagcucccgcaacagcacccccggcagcucccgggggacgagccccgcccgcauggccggcaacgggggcgacgcggcccucgcccugcugcuccuggaccggcugaaccagcucgaguccaagaugagcgggaagggccagcagcagcagggccagaccgugaccaagaaguccgccgccgaggcgagcaagaagccgcgccagaagcgcaccgccacgaaggccuacaacgucacccaggccuucgggcggcgcggccccgagcagacccaggggaacuucggcgaccaggagcugauccggcaggggaccgacuacaagcacuggccccagaucgcccaguucgcgcccuccgccagcgccuucuucggcaugucccgcaucggcauggaggugacgccgagcgggaccuggcugaccuacaccggcgccaucaagcucgacgacaaggaccccaacuucaaggaccaggugauccugcugaacaagcacaucgacgccuacaagacguucccgcccaccgagcccaagaaggacaagaagaagaaggcggacgagacccaggcccucccccagcggcagaagaagcagcagaccgucacgcugcugcacgccgccgaccucgacgacuucuccaagcagcugcagcagagcauguccagcgcggacuccacccaggccugaggacuagucccuguucccagagcccacuuuuuuuucuuuuuuugaaauaaaauagccugucuuucagaucucaaaggcucuuuucagagccaccaaaaaaaaaaaaaaaaaaaaaaaaaaaaaaaaaaaaaaaaaaaaaaaaaaaaaaaaaaaaaaaaaaaaaaaaaaaaaaaaaaaaaaaaaaaaaaaaaaaaa

SEQ ID NO: 19213 - RNA, 1532 nt, Artificial Sequence
  SARS-CoV-2__MT811022.1__nucleocapsid protein (N) mRNA gc
aggagagucccgcagucggcguccagcggcucugcuuguucgugugugugucguugcaggccuuauucaagcuuaccaugagcgacaacggcccccagaaccagcgcaacgccccgcggaucaccuucgggggccccuccgacagcaccggguccaaccagaacggcgagcgcagcggggcccgguccaagcagcgccggccccagggccugcccaacaacacggcgagcugguucaccgcccucacccagcacggcaaggaggaccugaaguucccgcgcgggcagggcgugcccaucaacaccaacuccagccccgacgaccagaucggguacuaccggcgcgccacgcggcgcauccggggcggggacggcaagaugaaggaccugagcccccgcugguacuucuacuaccucggcaccgggccggaggccggccugcccuacggggccaacaaggacggcaucaucugggucgcgaccgagggcgcccugaacacccccaaggaccacaucgggacgcggaaccccgccaacaacgccgcgaucgugcuccagcugccgcagggcaccacccugcccaagggguucuacgccgagggcucccgcgggggcucccaggccagcucccggagcuccagccgcucccggaacagcucccgcaacagcacccccggcagcucccgggggacgagccccgcccgcauggccggcaacgggggcgacgcggcccucgcccugcugcuccuggaccggcugaaccagcucgaguccaagaugagcgggaagggccagcagcagcagggccagaccgugaccaagaaguccgccgccgaggcgagcaagaagccgcgccagaagcgcaccgccacgaaggccuacaacgucacccaggccuucgggcggcgcggccccgagcagacccaggggaacuucggcgaccaggagcugauccggcaggggaccgacuacaagcacuggccccagaucgcccaguucgcgcccuccgccagcgccuucuucggcaugucccgcaucggcauggaggugacgccgagcgggaccuggcugaccuacaccggcgccaucaagcucgacgacaaggaccccaacuucaagcaccaggugauccugcugaacaagcacaucgacgccuacaagacguucccgcccaccgagcccaagaaggacaagaagaagaaggcggacgagacccaggcccucccccagcggcagaagaagcagcagaccgucacgcugcugcccgccgccgaccucgacgacuucuccaagcagcugcagcagagcauguccagcgcggacuccacccaggccugaggacuagucccuguucccagagcccacuuuuuuuucuuuuuuugaaauaaaauagccugucuuucagaucucaaaggcucuuuucagagccaccaaaaaaaaaaaaaaaaaaaaaaaaaaaaaaaaaaaaaaaaaaaaaaaaaaaaaaaaaaaaaaaaaaaaaaaaaaaaaaaaaaaaaaaaaaaaaaaaaaaaa

SEQ ID NO: 19214 - RNA, 1532 nt, Artificial Sequence
  SARS-CoV-2__MT811201.1__nucleocapsid protein (N) mRNA gc
aggagagucccgcagucggcguccagcggcucugcuuguucgugugugugucguugcaggccuuauucaagcuuaccaugagcgacaacggcccccagaaccagcgcaacgccccgcggaucaccuucgggggccccuccgacagcaccggguccaaccagaacggcgagcgcagcggggcccgguccaagcagcgccggccccagggccugcccaacaacacggcgagcugguucaccgcccucacccagcacggcaaggaggaccugaaguucccgcgcgggcagggcgugcccaucaacaccaacuccagccccgacgaccagaucggguacuaccggcgcgccacgcggcgcauccggggcggggacggcaagaugaaggaccugagcccccgcugguacuucuacuaccucggcaccgggccggaggccggccugcccuacggggccaacaaggacggcaucaucugggucgcgaccgagggcgcccugaacacccccaaggaccacaucgggacgcggaaccccgccaacaacgccgcgaucgugcuccagcugccgcagggcaccacccugcccaagggguucuacgccgagggcucccgcgggggcucccaggccagcucccggagcuccagccgcucccggaacagcucccgcaacagcacccccggcagcucccgggggacgagccccgcccgcauggccggcaacgggggcgacgcggcccucgcccugcugcuccuggaccggcugaaccagcucgaguccaagaugagcgggaagggccagcagcagcagggccagaccgugaccaagaaguccgccgccgaggcgagcaagaagccgcgccagaagcgcaccgccacgaaggccuacaacgucacccaggccuucgggcggcgcggccccgagcagacccaggggaacuucggcgaccaggagcugauccggcaggggaccgacuacaagcacuggccccagaucgcccaguucgcgcccuccgccagcgccuucuucggcaugucccgcaucggcauggaggugacgccgagcgggaccuggcugaccuacaccggcgccaucaagcucgacgacaaggaccccaacuucaaggaccaggugauccugcugaacaagcacaucgacgccuacaagacguucccgcccaccgagcccaagaaggacaagaagaagaaggcggacgagacccaggcccucccccagcggcagaagaagcagcagaccgucacgcugcugcccgccgccgaccucgacgacuucuccaagcagcugcagcagagcauguccagcgcggacuccacccacgccugaggacuagucccuguucccagagcccacuuuuuuuucuuuuuuugaaauaaaauagccugucuuucagaucucaaaggcucuuuucagagccaccaaaaaaaaaaaaaaaaaaaaaaaaaaaaaaaaaaaaaaaaaaaaaaaaaaaaaaaaaaaaaaaaaaaaaaaaaaaaaaaaaaaaaaaaaaaaaaaaaaaaa

SEQ ID NO: 19215 - RNA, 1532 nt, Artificial Sequence
  SARS-CoV-2__MT811202.1__nucleocapsid protein (N) mRNA gc
aggagagucccgcagucggcguccagcggcucugcuuguucgugugugugucguugcaggccuuauucaagcuuaccaugagcgacaacggcccccagaaccagcgcaacgccccgcggaucaccuucgggggccccuccgacagcaccggguccaaccagaacggcgagcgcagcggggcccgguccaagcagcgccggccccagggccugcccaacaacacggcgagcugguucaccgcccucacccagcacggcaaggaggaccugaaguucccgcgcgggcagggcgugcccaucaacaccaacuccagccccgacgaccagaucggguacuaccggcgcgccacgcggcgcauccggggcggggacggcaagaugaaggaccugagcccccgcugguacuucuacuaccucggcaccgggccggaggccggccugcccuacggggccaacaaggacggcaucaucugggucgcgaccgagggcgcccugaacacccccaaggaccacaucgggacgcggaaccccgccaacaacgccgcgaucgugcuccagcugccgcagggcaccacccugcccaagggguucuacgccgagggcucccgcgggggcucccaggccagcucccggagcuccagccgcucccggaacagcucccgcaacagcacccccggcagcucccgggggacgagccccgcccgcauggccggcaacgggggcgacgcggcccucgcccugcugcuccuggaccggcugaaccagcucgaguccaagaugagcgggaagggccagcagcagcagggccagaccgugaccaagaaguccgccgccgaggcgagcaagaagccgcgccagaagcgcaccgccacgaaggccuacaacgucacccaggccuucgggcggcgcggccccgagcagacccaggggaacuucggcgaccaggagcugauccggcaggggaccgacuacaagcacuggccccagaucgcccaguucgcgcccuccgccagcgccuucuucggcaugucccgcaucggcauggaggugacgccgagcgggaccuggcugaccuacaccggcgccaucaagcucgacgacaaguaccccaacuucaaggaccaggugauccugcugaacaagcacaucgacgccuacaagacguucccgcccaccgagcccaagaaggacaagaagaagaaggcggacgagacccaggcccucccccagcggcagaagaagcagcagaccgucacgcugcugcccgccgccgaccucgacgacuucuccaagcagcugcagcagagcauguccagcgcggacuccacccaggccugaggacuagucccuguucccagagcccacuuuuuuuucuuuuuuugaaauaaaauagccugucuuucagaucucaaaggcucuuuucagagccaccaaaaaaaaaaaaaaaaaaaaaaaaaaaaaaaaaaaaaaaaaaaaaaaaaaaaaaaaaaaaaaaaaaaaaaaaaaaaaaaaaaaaaaaaaaaaaaaaaaaaa

SEQ ID NO: 19216 - RNA, 1532 nt, Artificial Sequence
  SARS-CoV-2__MT811229.1__nucleocapsid protein (N) mRNA gc
aggagagucccgcagucggcguccagcggcucugcuuguucgugugugugucguugcaggccuuauucaagcuuaccaugagcgacaacggcccccagaaccagcgcaacgccccgcggaucaccuucgggggccccuccgacagcaccggguccaaccagaacggcgagcgcagcggggcccgguccaagcagcgccggccccagggccugcccaacaacacggcgagcugguucaccgcccucacccagcacggcaaggaggaccugaaguucccgcgcgggcagggcgugcccaucaacaccaacuccagccccgacgaccagaucggguacuaccggcgcgccacgcggcgcauccggggcggggacggcaagaugaaggaccugagcccccgcugguacuucuacuaccucggcaccgggccggaggccggccugcccuacggggccaacaaggacggcaucaucugggucgcgaccgagggcgcccugaacacccccaaggaccacaucgggacgcggaaccccgccaacaacgccgcgaucgugcuccagcugccgcagggcaccacccugcccaagggguucuacgccgagggcagccgcgggggcucccaggccagcucccggagcuccagccgcucccggaacagccuccgcaacuccacccccggcagcagccgggggacgucccccgcccgcauggccggcaacgggggcgacgcggcccuggcccugcuccugcuggaccggcucaaccagcuggagagcaagauguccgggaagggccagcagcagcagggccagaccgugaccaagaaguccuccgccgaggccagcaagaagccgcgccagaagcgcaccgcgacgaaggccuacaacgucacccaggccuucgggcggcgcggccccgagcagacccaggggaacuucggcgaccaggagcugauccggcaggggaccgacuacaagcacuggccccagaucgcccaguucgcccccuccgcgagcgccuucuucggcaugucccgcaucggcauggaggugacgccgagcgggaccuggcucaccuacaccggcgccaucaagcuggacgacaaggaccccaacuucaaggaccaggugauccugcucaacaagcacaucgacgccuacaagacguucccgcccaccgagcccaagaaggacaagaagaagaaggccgacgagacccaggcgcugccccagcggcagaagaagcagcagaccgucacgcugcuccccgccgccgaccuggacgacuucuccaagcagcugcagcagagcauguccagcgccgacuccacccaggcgugaggacuagucccuguucccagagcccacuuuuuuuucuuuuuuugaaauaaaauagccugucuuucagaucucaaaggcucuuuucagagccaccaaaaaaaaaaaaaaaaaaaaaaaaaaaaaaaaaaaaaaaaaaaaaaaaaaaaaaaaaaaaaaaaaaaaaaaaaaaaaaaaaaaaaaaaaaaaaaaaaaaaa

SEQ ID NO: 19217 - RNA, 1532 nt, Artificial Sequence
  SARS-CoV-2__MT811240.1__nucleocapsid protein (N) mRNA gc
aggagagucccgcagucggcguccagcggcucugcuuguucgugugugugucguugcaggccuuauucaagcuuaccaugagcgacaacggcccccagaaccagcgcaacgccccgcggaucaccuucgggggccccuccgacagcaccggguccaaccagaacggcgagcgcagcggggcccgguccaagcagcgccggccccagggccugcccaacaacacggcgagcugguucaccgcccucacccagcacggcaaggaggaccugaaguucccgcgcgggcagggcgugcccaucaacaccaacuccagccccgacgaccagaucggguacuaccggcgcgccacgcggcgcauccggggcggggacggcaagaugaaggaccugagcccccgcugguacuucuacuaccucggcaccgggccggaggccggccugcccuacggggccaacaaggacggcaucaucugggucgcgaccgagggcgcccugaacacccccaaggaccacaucgggacgcggaaccccgccaacaacgccgcgaucgugcuccagcugccgcagggcaccacccugcccaagggguucuacgccgagggcagccgcgggggcucccaggccagcucccggagcuccagccgcucccggaacagccuccgcaacuccacccccggcagcagccgggggacgucccccgcccgcauggccggcaacgggggcgacgcggcccuggcccugcuccugcuggaccggcucaaccagcuggagagcaagauguccgggaaggugcagcagcagcagggccagaccgucaccaagaaguccgccgccgaggcguccaagaagccgcgccagaagcgcaccgccacgaaggccuacaacgugacccaggccuucggccggcgcgggcccgagcagacccagggcaacuucggggaccaggagcugauccggcagggcaccgacuacaagcacuggccccagaucgcccaguucgcgcccagcgccuccgccuucuucgggaugagccgcaucggcauggaggugacgccguccggcaccuggcucaccuacaccggggccaucaagcuggacgacaaggaccccaacuucaaggaccaggucauccugcucaacaagcacaucgacgccuacaagacguucccgcccaccgagcccaagaaggacaagaagaagaaggcggacgagacccaggcccugccccagcggcagaagaagcagcagaccgugacgcugcuccccgccgccgaccuggacgacuucagcaagcagcugcagcaguccaugagcuccgcggacagcacccaggccugaggacuagucccuguucccagagcccacuuuuuuuucuuuuuuugaaauaaaauagccugucuuucagaucucaaaggcucuuuucagagccaccaaaaaaaaaaaaaaaaaaaaaaaaaaaaaaaaaaaaaaaaaaaaaaaaaaaaaaaaaaaaaaaaaaaaaaaaaaaaaaaaaaaaaaaaaaaaaaaaaaaaa

SEQ ID NO: 19218 - RNA, 1532 nt, Artificial Sequence
  SARS-CoV-2__MT811246.1__nucleocapsid protein (N) mRNA gc
aggagagucccgcagucggcguccagcggcucugcuuguucgugugugugucguugcaggccuuauucaagcuuaccaugagcgacaacggcccccagaaccagcgcaacgccccgcggaucaccuucgggggccccuccgacagcaccggguccaaccagaacggcgagcgcagcggggcccgguccaagcagcgccggccccagggccugcccaacaacacggcgagcugguucaccgcccucacccagcacggcaaggaggaccugaaguucccgcgcgggcagggcgugcccaucaacaccaacuccagccccgacgaccagaucggguacuaccggcgcgccacgcggcgcauccggggcggggacggcaagaugaaggaccugagcccccgcugguacuucuacuaccucggcaccgggccggaggccggccugcccuacggggccaacaaggacggcaucaucugggucgcgaccgagggcgcccugaacacccccaaggaccacaucgggacgcggaaccccgccaacaacgccgcgaucgugcuccagcugccgcagggcaccacccugcccaagggguucuacgccgagggcagccgcgggggcucccaggccagcucccggagcuccagccgcucccggaacagccuccgcaacuccacccccggcagcagccgggggaucucccccgcccgcauggccggcaacgggggcgacgcggcccuggcccugcuccugcuggaccggcucaaccagcuggagagcaagauguccgggaagggccagcagcagcagggccagacggugaccaagaaguccgccgccgaggcguccaagaagccgcgccagaagcgcaccgccaccaaggccuacaacgucacgcaggccuucgggcggcgcggccccgagcagacccaggggaacuucggcgaccaggagcugauccggcaggggaccgacuacaagcacuggccccagaucgcccaguucgcgcccagcgccuccgccuucuucggcaugagccgcaucggcauggaggugaccccguccgggacguggcucaccuacaccggcgccaucaagcuggacgacaaggaccccaacuucaaggaccaggugauccugcucaacaagcacaucgacgccuacaagaccuucccgcccacggagcccaagaaggacaagaagaagaaggcggacgagacccaggcccugccccagcggcagaagaagcagcagaccgucacccugcuccccgccgccgaccuggacgacuucagcaagcagcugcagcaguccaugagcuccgcggacagcacgcaggccugaggacuagucccuguucccagagcccacuuuuuuuucuuuuuuugaaauaaaauagccugucuuucagaucucaaaggcucuuuucagagccaccaaaaaaaaaaaaaaaaaaaaaaaaaaaaaaaaaaaaaaaaaaaaaaaaaaaaaaaaaaaaaaaaaaaaaaaaaaaaaaaaaaaaaaaaaaaaaaaaaaaaa

SEQ ID NO: 19219 - RNA, 1532 nt, Artificial Sequence
  SARS-CoV-2__MT811251.1__nucleocapsid protein (N) mRNA gc
aggagagucccgcagucggcguccagcggcucugcuuguucgugugugugucguugcaggccuuauucaagcuuaccaugagcgacaacggcccccagaaccagcgcaacgccccggggaucaccuucggcgggcccuccgacagcaccggcuccaaccagaacggggagcggagcggcgcccgcuccaagcagcggcgcccccagggccugcccaacaacacggcgagcugguucaccgcccucacccagcacgggaaggaggaccugaaguucccgcggggccagggggugcccaucaacaccaacuccagccccgacgaccagaucggcuacuaccgccgggccacgcgccggauccgcgggggcgacggcaagaugaaggaccugagcccccggugguacuucuacuaccucgggaccggcccggaggccgggcugcccuacggcgccaacaaggacggcaucaucugggucgcgaccgagggggcccugaacacccccaaggaccacaucggcacgcgcaaccccgccaacaacgccgcgaucgugcuccagcugccgcaggggaccacccugcccaagggcuucuacgccgaggggagccggggcggcucccaggccagcucccgcagcuccagccggucccgcaacagccuccggaacuccacccccgggagcagccgcggcacgucccccgcccggauggccgggaacggcggggacgcggcccuggcccugcuccugcuggaccgccucaaccagcuggagagcaagauguccggcaagggccagcagcagcaggggcagaccgugaccaagaaguccgccgccgaggcguccaagaagccgcggcagaagcgcaccgccacgaaggccuacaacgucacccaggccuucggccgccgggggcccgagcagacccagggcaacuucggggaccaggagcugauccgccagggcaccgacuacaagcacuggccccagaucgcccaguucgcgcccagcgccuccgccuucuucggcaugagccggaucgggauggaggugacgccguccggcaccuggcucaccuacaccggggccaucaagcuggacgacaaggaccccaacuucaaggaccaggugauccugcucaacaagcacaucgacgccuacaagacguucccgcccaccgagcccaagaaggacaagaagaagaaggcggacgagacccaggcccugccccagcgccagaagaagcagcagaccgucacgcugcuccccgccgccgaccuggacgacuucagcaagcagcugcagcaguccaugagcuccgcggacagcacccaggccugaggacuagucccuguucccagagcccacuuuuuuuucuuuuuuugaaauaaaauagccugucuuucagaucucaaaggcucuuuucagagccaccaaaaaaaaaaaaaaaaaaaaaaaaaaaaaaaaaaaaaaaaaaaaaaaaaaaaaaaaaaaaaaaaaaaaaaaaaaaaaaaaaaaaaaaaaaaaaaaaaaaaa

SEQ ID NO: 19220 - RNA, 1532 nt, Artificial Sequence
  SARS-CoV-2__MT811325.1__nucleocapsid protein (N) mRNA gc
aggagagucccgcagucggcguccagcggcucugcuuguucgugugugugucguugcaggccuuauucaagcuuaccaugagcgacaacggcccccagaaccagcgcaacgccccgcggaucaccuucgggggccccuccgacagcaccggguccaaccagaacggcgagcgcagcggggcccgguccaagcagcgccggccccagggccugcccaacaacacggcgagcugguucaccgcccucacccagcacggcaaggaggaccugaaguucccgcgcgggcagggcgugcccaucaacaccaacuccagccccgacgaccagaucggguacuaccggcgcgccacgcggcgcauccggggcggggacggcaagaugaaggaccugagcccccgcugguacuucuacuaccucggcaccgggccggaggccggccugcccuacggggccaacaaggacggcaucaucugggucgcgaccgagggcgcccugaacacccccaaggaccacaucgggacgcggaaccccgccaacaacgccgcgaucgugcuccagcugccgcagggcaccacccugagcaagggguucuacgccgagggcucccgcgggggcagccaggccuccagccgguccagcucccgcagccggaacuccagccgcaacagcacccccggcuccagccgggggacgucccccgcccgcauggccggcaacgggggcgacgcggcccucgcccugcugcuccuggaccggcugaaccagcucgagagcaagauguccgggaagggccagcagcagcagggccagaccgugaccaagaaguccgccgccgaggcguccaagaagccccgccagaagcgcaccgccacgaaggccuacaacgucacccaggccuucgggcggcgcggcccggagcagacccaggggaacuucggcgaccaggagcugauccggcaggggaccgacuacaagcacuggccccagaucgcccaguucgcgcccagcgccuccgccuucuucggcaugagccgcaucggcauggaggugacgcccuccgggaccuggcugaccuacaccggcgccaucaagcucgacgacaaggacccgaacuucaaggaccaggugauccugcugaacaagcacaucgacgccuacaagacguucccgcccaccgagcccaagaaggacaagaagaagaaggcggacgagacccaggcccucccccagcggcagaagaagcagcagaccgucacgcugcugcccgccgccgaccucgacgacuucagcaagcagcugcagcaguccaugagcuccgcggacagcacccaggccugaggacuagucccuguucccagagcccacuuuuuuuucuuuuuuugaaauaaaauagccugucuuucagaucucaaaggcucuuuucagagccaccaaaaaaaaaaaaaaaaaaaaaaaaaaaaaaaaaaaaaaaaaaaaaaaaaaaaaaaaaaaaaaaaaaaaaaaaaaaaaaaaaaaaaaaaaaaaaaaaaaaaa

SEQ ID NO: 19221 - RNA, 1532 nt, Artificial Sequence
  SARS-CoV-2__MT811330.1__nucleocapsid protein (N) mRNA gc
aggagagucccgcagucggcguccagcggcucugcuuguucgugugugugucguugcaggccuuauucaagcuuaccaugagcgacaacggcccccagaaccagcgcaacgccccgcggaucaccuucgggggccccuccgacagcaccggguccaaccagaacggcgagcgcagcggggcccgguccaagcagcgccggccccagggccugcccaacaacacggcgagcugguucaccgcccucacccagcacggcaaggaggaccugaaguucccgcgcgggcagggcgugcccaucaacaccaacuccagccccgacgaccagaucggguacuaccggcgcgccacgcggcgcauccggggcggggacggcaagaugaaggaccugagcccccgcugguacuucuacuaccucggcaccgggccggaggccggccugcccuacggggccaacaaggacggcaucaucugggucgcgaccgagggcgcccugaacacccccaaggaccacaucgggacgcggaaccccgccaacaacgccgcgaucgugcuccagcugccgcagggcaccacccugcccaagggguucuacgccgagggcucccgcgggggcucccaggccagcucccggagcuccagccgcucccggaacagcucccgcaacagcacccccggcagcucccgggggacgagccccgcccgcauggccggcaacgggggcgacgcggcccucgcccugcugcuccuggaccggcugaaccagcucgaguccaagaugagcgggaagggccagcagcagcagggccagaccgugaccaagaaguccgccgccgaggcgagcaagaagccgcgccagaagcgcaccgccacgaaggccuacaacgucacccaggccuucgggcggcgcggccccgugcagacccaggggaacuucggcgaccaggagcugauccggcaggggaccgacuacaagcacuggccccagaucgcccaguucgcgcccuccgccagcgccuucuucggcaugucccgcaucggcauggaggugacgccgagcgggaccuggcugaccuacaccggcgccaucaagcucgacgacaaggaccccaacuucaaggaccaggucauccugcugaacaagcacaucgacgccuacaagacguucccgcccaccgagcccaagaaggacaagaagaagaaggcggacgagacccaggcccucccccagcggcagaagaagcagcagaccgugacgcugcugcccgccgccgaccucgacgacuucuccaagcagcugcagcagagcauguccagcgcggacuccacccaggccugaggacuagucccuguucccagagcccacuuuuuuuucuuuuuuugaaauaaaauagccugucuuucagaucucaaaggcucuuuucagagccaccaaaaaaaaaaaaaaaaaaaaaaaaaaaaaaaaaaaaaaaaaaaaaaaaaaaaaaaaaaaaaaaaaaaaaaaaaaaaaaaaaaaaaaaaaaaaaaaaaaaaa

SEQ ID NO: 19222 - RNA, 1532 nt, Artificial Sequence
  SARS-CoV-2__MT811407.1__nucleocapsid protein (N) mRNA gc
aggagagucccgcagucggcguccagcggcucugcuuguucgugugugugucguugcaggccuuauucaagcuuaccaugagcgacaacggcccccagaaccagcgcaacgccccgcggaucaccuucgggggccccuccgacagcaccggguccaaccagaacggcgagcgcagcggggcccgguccaagcagcgccggccccagggccugcccaacaacacggcgagcugguucaccgcccucacccagcacggcaaggaggaccugaaguucccgcgcgggcagggcgugcccaucaacaccaacuccagccccgacgaccagaucggguacuaccggcgcgccacgcggcgcauccggggcggggacggcaagaugaaggaccugagcccccgcugguacuucuacuaccucggcaccgggccggaggccggccugcccuacggggccaacaaggacggcaucaucugggucgcgaccgagggcgcccugaacacccccaaggaccacaucgggacgcggaaccccgccaacaacgccgcgaucgugcuccagcugccgcagggcaccacccugcccaagggguucuacaccgagggcagccgcgggggcucccaggccagcucccggagcuccagccgcucccggaacagccuccgcaacuccacgcccggcagcagccgggggaccucccccgcccgcauggccggcaacgggggcgacgccgcgcuggcccugcuccugcuggaccggcucaaccagcuggagagcaagauguccgggaagggccagcagcagcagggccagaccgugaccaagaaguccgccgccgaggccuccaagaagccgcgccagaagcgcacggcgaccaaggccuacaacgucacccaggccuucgggcggcgcggccccgagcagacccaggggaacuucggcgaccaggagcugauccggcaggggacggacuacaagcacuggccccagaucgcccaguucgcccccagcgcguccgccuucuucggcaugagccgcaucggcauggaggugaccccguccgggaccuggcucaccuacacgggcgccaucaagcuggacgacaaggaccccaacuucaaggaccaggugauccugcucaacaagcacaucgacgccuacaagaccuucccgcccaccgagcccaagaaggacaagaagaagaaggccgacgagacccaggcgcugccccagcggcagaagaagcagcagacggucacccugcuccccgccgccgaccuggacgacuucagcaagcagcugcagcaguccaugagcuccgccgacagcacccaggcgugaggacuagucccuguucccagagcccacuuuuuuuucuuuuuuugaaauaaaauagccugucuuucagaucucaaaggcucuuuucagagccaccaaaaaaaaaaaaaaaaaaaaaaaaaaaaaaaaaaaaaaaaaaaaaaaaaaaaaaaaaaaaaaaaaaaaaaaaaaaaaaaaaaaaaaaaaaaaaaaaaaaaa

SEQ ID NO: 19223 - RNA, 1532 nt, Artificial Sequence
  SARS-CoV-2__MT811416.1__nucleocapsid protein (N) mRNA gc
aggagagucccgcagucggcguccagcggcucugcuuguucgugugugugucguugcaggccuuauucaagcuuaccaugagcgacaacggcccccagaaccagcgcaacgccccgcggaucaccuucgggggccccuccgacagcaccggguccaaccagaacggcgagcgcagcggggcccgguccaagcagcgccggccccagggccugcccaacaacacggcgagcugguucaccgcccucacccagcacggcaaggaggaccugaaguucccgcgcgggcagggcgugcccaucaacaccaacuccagccccgacgaccagaucggguacuaccggcgcgccacgcggcgcauccggggcggggacggcaagaugaaggaccugagcccccgcugguacuucuacuaccucggcaccgggccggaggccggccugcccuacggggccaacaaggacggcaucaucugggucgcgaccgagggcgcccugaacacccccaaggaccacaucgggacgcggaaccccgccaacaacgccgcgaucgugcuccagcugccgcagggcaccacccugcccaagggguucuacgccgagggcagccgcgggggcucccaggccagcucccggagcuccagccgcucccggaacagccuccgcaacuccacccccggcagcagccgggggacgucccccgcccgcauggccggcaacgggggcgacgcggcccuggcccugcuccugcuggaccggcucaaccagcuggagagcaagauguccgggaagggccagcagcagcagggccagaccgugaccaagaaguccgccgccgaggcguccaagaagccgcgccagaagcgcaccgccacgaaggccuacaacgucacccaggccuucgggcggcgcggccccgagcagacccaggggaacuucggcgaccaggagcugauccggcaggggaccgacuacaagcacuggccccagaucgcccaguucgcgcccagcgccuccgccuucuucggcaugagccgcaucggcauggaggugacgccguccgggaccuggcucaccuacaccggcgccaucaagcuggacgacaaguaccccaacuucaaggaccaggugauccugcucaacaagcacaucgacgccuacaagacguucccgcccaccgagcccaagaaggacaagaagaagaaggcggacgagacccaggcccugccccagcggcagaagaagcagcagaccgucacgcugcuccccgccgccgaccuggacgacuucagcaagcagcugcagcaguccaugagcuccgcggacagcacccaggccugaggacuagucccuguucccagagcccacuuuuuuuucuuuuuuugaaauaaaauagccugucuuucagaucucaaaggcucuuuucagagccaccaaaaaaaaaaaaaaaaaaaaaaaaaaaaaaaaaaaaaaaaaaaaaaaaaaaaaaaaaaaaaaaaaaaaaaaaaaaaaaaaaaaaaaaaaaaaaaaaaaaaa

SEQ ID NO: 19224 - RNA, 1532 nt, Artificial Sequence
  SARS-CoV-2__MT811458.1__nucleocapsid protein (N) mRNA gc
aggagagucccgcagucggcguccagcggcucugcuuguucgugugugugucguugcaggccuuauucaagcuuaccaugagcgacaacggcccccagaaccagcgcaacgccccgcggaucaccuucgggggccccuccgacagcaccggguccaaccagaacggcgagcgcagcggggcccgguccaagcagcgccggccccagggccugcccaacaacacggcgagcugguucaccgcccucacccagcacggcaaggaggaccugaaguucccgcgcgggcagggcgugcccaucaacaccaacuccagccccgacgaccagaucggguacuaccggcgcgccacgcggcgcauccggggcggggacggcaagaugaaggaccugagcccccgcugguacuucuacuaccucggcaccgggccggaggccggccugcccuacggggccaacaaggacggcaucaucugggucgcgaccgagggcgcccugaacacccccaaggaccacaucgggacgcggaaccccgccaacaacgccgcgaucgugcuccagcugccgcagggcaccacccugcccaagggguucuacgccgagggcagccgcgggggcucccaggccagcucccggagcuccagccgcucccggaacagccuccgcaacuccacccccggcagcagccgggggacgucccccgcccgcauggccggcaacgggggcgacgcggcccuggcccugcuccugcuggaccggcucaaccagcuggagagcaagauguccgggaagggccagcagcagcagggccagaccgugaccaagaaguccgccgccgaggcguccaagaagccgcgccagaagcgcaccgccacgaaggccuacaacgucacccaggccuucgggcggcgcggccccgagcagacccaggggaacuucggcgaccaggagcugauccggcaggggaccgacuacaagcacuggccccagaucgcccaguucgcgcccagcgccuccgccuucuucggcaugagccgcaucggcauggaggugacgccguccgggaccuggcucaccuacaccggcgccaucaagcuggacgacaaggaccccaacuucaaggaccaggugauccugcucaacaagcacaucgacgccuacaagacguucccgcccaccgagcccaagaaggacaagaagaagaaggcggacgagacccaggcccugccccagcggcagaagcgccagcagaccgucacgcugcuccccgccgccgaccuggacgacuucagcaagcagcugcagcaguccaugagcuccgcggacagcacccaggccugaggacuagucccuguucccagagcccacuuuuuuuucuuuuuuugaaauaaaauagccugucuuucagaucucaaaggcucuuuucagagccaccaaaaaaaaaaaaaaaaaaaaaaaaaaaaaaaaaaaaaaaaaaaaaaaaaaaaaaaaaaaaaaaaaaaaaaaaaaaaaaaaaaaaaaaaaaaaaaaaaaaaa

SEQ ID NO: 19225 - RNA, 1532 nt, Artificial Sequence
  SARS-CoV-2__MT811483.1__nucleocapsid protein (N) mRNA gc
aggagagucccgcagucggcguccagcggcucugcuuguucgugugugugucguugcaggccuuauucaagcuuaccaugagcgacaacggcccccagaaccagcgcaacgccccgcggaucaccuucgggggccccuccgacagcaccggguccaaccagaacggcgagcgcagcggggcccgguccaagcagcgccggccccagggccugcccaacaacacggcgagcugguucaccgcccucacccagcacggcaaggaggaccugaaguucccgcgcgggcagggcgugcccaucaacaccaacuccagccccgacgaccagaucggguacuaccggcgcgccacgcggcgcauccggggcggggacggcaagaugaaggaccugagcccccgcugguacuucuacuaccucggcaccgggccggaggccggccugcccuacggggccaacaaggacggcaucaucugggucgcgaccgagggcgcccugaacacccccaaggaccacaucgggacgcggaaccccgccaacaacgccgcgaucgugcuccagcugccgcagggcaccacccugcccaagggguucuacgccgagggcagccgcgggggcucccaggccagcucccggagcuccagccgcucccggaacagccuccgcaacuccacccccggcagcagccgggggacgucccccgcccgcauggccggcaacgggggcgacgcggcccuggcccugcuccugcuggaccggcucaaccagcuggagagcaagauguccgggaagggccagcagcagcagggccagaccgugaccaagaaguccgccgccgaggcguccaagaagccgcgccagaagcgcaccgccacgaaggccuacaacgucacccaggccuucgggcggcgcggccccgagcagacccaggggaacuucggcgaccaggagcugauccggcaggggaccgacuacaagcacuggccccagaucgcccaguucgcgcccagcgccuccgccuucuucggcaugagccgcaucggcauggaggugacgccguccgggaccuggcucaccuacaccggcgccaucaagcuggacgacaaggaccccaacuucaaggaccaggugauccugcucaacaagcacaucgacgccuacaagacguucccgcccaccgagcccaagaaggacaagaagaagaaggcggacgagacccaggcccugccccagcggcagaagaagcagcagaccgucacgcugcuccccgccgccaaccuggacgacuucagcaagcagcugcagcaguccaugagcuccgcggacagcacccaggccugaggacuagucccuguucccagagcccacuuuuuuuucuuuuuuugaaauaaaauagccugucuuucagaucucaaaggcucuuuucagagccaccaaaaaaaaaaaaaaaaaaaaaaaaaaaaaaaaaaaaaaaaaaaaaaaaaaaaaaaaaaaaaaaaaaaaaaaaaaaaaaaaaaaaaaaaaaaaaaaaaaaaa

SEQ ID NO: 19226 - RNA, 1532 nt, Artificial Sequence
  SARS-CoV-2__MT811485.1__nucleocapsid protein (N) mRNA gc
aggagagucccgcagucggcguccagcggcucugcuuguucgugugugugucguugcaggccuuauucaagcuuaccaugagcgacaacggcccccagaaccagcgcaacgccccgcggaucaccuucgggggccccuccgacagcaccggguccaaccagaacggcgagcgcagcggggcccgguccaagcagcgccggccccagggccugcccaacaacacggcgagcugguucaccgcccucacccagcacggcaaggaggaccugaaguucucccgcgggcagggcgugccgaucaacaccaacagcucccccgacgaccagaucggguacuaccggcgcgccacgcggcgcauccggggcggggacggcaagaugaaggaccugagcccccgcugguacuucuacuaccucggcaccgggcccgaggccggccugccguacggggccaacaaggacggcaucaucugggucgcgaccgagggcgcccugaacacccccaaggaccacaucgggacgcggaaccccgccaacaacgccgcgaucgugcuccagcugccccagggcaccacccugccgaagggguucuacgccgagggcucccgcgggggcagccaggccuccagccgguccagcucccgcagccggaacuccagccgcaacagcacccucggcuccagccgggggacgucccccgcccgcauggccggcaacgggggcgacgcggcccuggcccugcuccugcuggaccggcucaaccagcuggagagcaagauguccgggaagggccagcagcagcagggccagaccgugaccaagaaguccgccgccgaggcgagcaagaagccccgccagaagcgcaccgccacgaaggccuacaacgucacccaggccuucgggcggcgcggccccgagcagacccaggggaacuucggcgaccaggagcugauccggcaggggaccgacuacaagcacuggccgcagaucgcccaguucgcgcccagcgccuccgccuucuucggcaugagccgcaucggcauggaggugacgcccuccgggaccuggcucaccuacaccggcgccaucaagcuggacgacaaggaccccaacuucaaggaccaggugauccugcucaacaagcacaucgacgccuacaagacguucccgcccaccgagcccaagaaggacaagaagaagaaggcggacgagacccaggcccugccccagcggcagaagaagcagcagaccgucacgcugcucccggccgccgaccuggacgacuucagcaagcagcugcagcaguccaugagcuccgcggacagcacccaggccugaggacuagucccuguucccagagcccacuuuuuuuucuuuuuuugaaauaaaauagccugucuuucagaucucaaaggcucuuuucagagccaccaaaaaaaaaaaaaaaaaaaaaaaaaaaaaaaaaaaaaaaaaaaaaaaaaaaaaaaaaaaaaaaaaaaaaaaaaaaaaaaaaaaaaaaaaaaaaaaaaaaaa

SEQ ID NO: 19227 - RNA, 1532 nt, Artificial Sequence
  SARS-CoV-2__MT811488.1__nucleocapsid protein (N) mRNA gc
aggagagucccgcagucggcguccagcggcucugcuuguucgugugugugucguugcaggccuuauucaagcuuaccaugagcgacaacggcccccagaaccagcgcaacgccccgcggaucaccuucgggggccccuccgacagcaccggguccaaccagaacggcgagcgcagcggggcccgguccaagcagcgccggccccagggccugcccaacaacacggcgagcugguucaccgcccucacccagcacggcaaggaggaccugaaguucccgcgcgggcagggcgugcccaucaacaccaacuccagccccgacgaccagaucggguacuaccggcgcgccacgcggcgcauccggggcggggacggcaagaugaaggaccugagcccccgcugguacuucuacuaccucggcaccgggccggaggccggccugcccuacggggccaacaaggacggcaucaucugggucgcgaccgagggcgcccugaacacccccaaggaccacaucgggacgcggaaccccgccaacaacgccgcgaucgugcuccagcugccgcagggcaccacccugcccaagggguucuacgccgagggcagccgcgggggcucccaggccagcucccggagcuccagccgcucccggaacagccuccgcaacuccacccccggcagcagccgggggacgucccccgcccgcauggccggcaacgggggcgacgcggcccuggcccugcuccugcuggaccggcucaaccagcuggagagcaagauguccgggaagggccagcagcagcagggccagaccgugaccaagaaguccgccgccgaggcguccaagaagccgcgccagaagcgcaccgccacgaaggccuacaacgucacccaggccuucgggcggcgcggccccgagcagacccaggggaacuucggcgaccaggagcugauccggcaggggaccgacuacaagcacuggccccagaucgcccaguucgcgcccagcgccuccgccuucuucggcaugagccgcaucggcauggaggugacgccguccgggaccuggcucaccuacaccggcgccaucaagcuggacgacaaggaccccaacuucaaggaccaggugauccugcucaacaagcacaucgacgccuacaagacguucccgcccaccgaccccaagaaggacaagaagaagaaggcggacgagacccaggcccugccccagcggcagaagaagcagcagaccgucacgcugcuccccgccgccgaccuggacgacuucagcaagcagcugcagcaguccaugagcuccgcggacagcacccaggccugaggacuagucccuguucccagagcccacuuuuuuuucuuuuuuugaaauaaaauagccugucuuucagaucucaaaggcucuuuucagagccaccaaaaaaaaaaaaaaaaaaaaaaaaaaaaaaaaaaaaaaaaaaaaaaaaaaaaaaaaaaaaaaaaaaaaaaaaaaaaaaaaaaaaaaaaaaaaaaaaaaaaa

SEQ ID NO: 19228 - RNA, 1532 nt, Artificial Sequence
  SARS-CoV-2__MT811490.1__nucleocapsid protein (N) mRNA gc
aggagagucccgcagucggcguccagcggcucugcuuguucgugugugugucguugcaggccuuauucaagcuuaccaugagcgacaacggcccccagaaccagcgcaacgccccgcggaucaccuucgggggccccuccgacagcaucggguccaaccagaacggcgagcgcagcggggcccgguccaagcagcgccggccccagggccugcccaacaacaccgcgagcugguucacggcccucacccagcacggcaaggaggaccugaaguucccgcgcgggcagggcgugcccaucaacaccaacuccagccccgacgaccagaucggguacuaccggcgcgccacccggcgcauccggggcggggacggcaagaugaaggaccugagcccccgcugguacuucuacuaccucggcacggggccggaggccggccugcccuacggggccaacaaggacggcaucaucugggucgcgaccgagggcgcccugaacacccccaaggaccacaucgggacccggaaccccgccaacaacgccgcgaucgugcuccagcugccgcagggcacgacccugcccaagggguucuacgccgagggcucccgcgggggcucccaggccagcucccggagcuccagccgcucccggaacagcucccgcaacagcacccccggcagcuccaagcggaccagccccgcccgcauggccgggaacggcggggacgcggcccucgcccugcugcuccuggaccggcugaaccagcucgaguccaagaugagcggcaaggggcagcagcagcagggccagacggugaccaagaaguccgccgccgaggcgagcaagaagccgcgccagaagcgcaccgccaccaaggccuacaacgucacgcaggccuucggccggcgcgggcccgagcagacccagggcaacuucggggaccaggagcugauccggcagggcaccgacuacaagcacuggccccagaucgcccaguucgcgcccuccgccagcgccuucuucgggaugucccgcaucggcauggaggugaccccgagcggcacguggcugaccuacaccggggccaucaagcucgacgacaaggaccccaacuucaaggaccaggugauccugcugaacaagcacaucgacgccuacaagaccuucccgcccacggagcccaagaaggacaagaagaagaaggcggacgagacccaggcccucccccagcggcagaagaagcagcagaccgucacccugcugcccgccgccgaccucgacgacuucuccaagcagcugcagcagagcauguccagcgcggacuccacgcaggccugaggacuagucccuguucccagagcccacuuuuuuuucuuuuuuugaaauaaaauagccugucuuucagaucucaaaggcucuuuucagagccaccaaaaaaaaaaaaaaaaaaaaaaaaaaaaaaaaaaaaaaaaaaaaaaaaaaaaaaaaaaaaaaaaaaaaaaaaaaaaaaaaaaaaaaaaaaaaaaaaaaaaa

SEQ ID NO: 19229 - RNA, 1532 nt, Artificial Sequence
  SARS-CoV-2__MT811492.1__nucleocapsid protein (N) mRNA gc
aggagagucccgcagucggcguccagcggcucugcuuguucgugugugugucguugcaggccuuauucaagcuuaccaugagcgacaacggcccccagaaccagcgcaacgccccgcggaucaccuucgggggccccuccgacagcaccggguccaaccagaacggcgagcgcagcggggcccgguccaagcagcgccggccccugggccuccccaacaacacggcgagcugguucaccgcccugacccagcacggcaaggaggaccugaaguucccgcgcgggcagggcgugcccaucaacaccaacuccagccccgacgaccagaucggguacuaccggcgcgccacgcggcgcauccggggcggggacggcaagaugaaggaccucagcccccgcugguacuucuacuaccugggcaccgggccggaggccggccugcccuacggggccaacaaggacggcaucaucugggucgcgaccgagggcgcccucaacacccccaaggaccacaucgggacgcggaaccccgccaacaacgccgcgaucgugcugcagcugccgcagggcaccacccuccccaagggguucuacgccgagggcagccgcgggggcucccaggccagcucccggagcuccagccgcucccggaacagccugcgcaacuccacccccggcagcagccgggggacgucccccgcccgcauggccggcaacgggggcgacgcggcccuggcccuccugcugcucgaccggcugaaccagcuggagagcaagauguccgggaagggccagcagcagcagggccagaccgugaccaagaaguccgccgccgaggcguccaagaagccgcgccagaagcgcaccgccacgaaggccuacaacgucacccaggccuucgggcggcgcggccccgagcagacccaggggaacuucggcgaccaggagcucauccggcaggggaccgacuacaagcacuggccccagaucgcccaguucgcgcccagcgccuccgccuucuucggcaugagccgcaucggcauggaggugacgccguccgggaccuggcugaccuacaccggcgccaucaagcuggacgacaaggaccccaacuucaaggaccaggugauccuccugaacaagcacaucgacgccuacaagacguucccgcccaccgagcccaagaaggacaagaagaagaaggcggacgagacccaggcccugccccagcggcagaagaagcagcagaccgucacgcuccugcccgccgccgaccuggacgacuucagcaagcagcuccagcaguccaugagcuccgcggacagcacccaggccugaggacuagucccuguucccagagcccacuuuuuuuucuuuuuuugaaauaaaauagccugucuuucagaucucaaaggcucuuuucagagccaccaaaaaaaaaaaaaaaaaaaaaaaaaaaaaaaaaaaaaaaaaaaaaaaaaaaaaaaaaaaaaaaaaaaaaaaaaaaaaaaaaaaaaaaaaaaaaaaaaaaaa

SEQ ID NO: 19230 - RNA, 1532 nt, Artificial Sequence
  SARS-CoV-2__MT811500.1__nucleocapsid protein (N) mRNA gc
aggagagucccgcagucggcguccagcggcucugcuuguucgugugugugucguugcaggccuuauucaagcuuaccaugagcgacaacggcccccagaaccagcgcaacgccccgcggaucaccuucgggggccccuccgacagcaccggguccaaccagaacggcgagcgcagcggggcccgguccaagcagcgccggccccagggccugcccaacaacacggcgagcugguucaccgcccucacccagcacggcaaggaggaccugaaguucccgcgcgggcagggcgugcccaucaacaccaacuccagccccgacgaccagaucggguacuaccggcgcgccacgcggcgcauccggggcggggacggcaagaugaaggaccugagcccccgcugguacuucuacuaccucggcaccgggccggaggccggccugcccuacggggccaacaaggacggcaucaucugggucgcgaccgagggcgcccugaacacccccaaggaccacaucgggacgcggaaccccgccaacaacgccgcgaucgugcuccagcugccgcagggcaccacccugcccaagggguucuacgccgagggcagccgcgggggcucccaggccagcucccggagcuccagccgcucccggaacagccuccgcaacuccacccccggcagcagccgggggacgucccccgcccgcauggccggcaacgggggcgacgcggcccuggcccugcuccugcuggaccggcucaaccagcuggagagcaagauguccgggaagggccagcagcagcagggccagaccgugaccaagaaguccgccgccgaggcguccaagaagccgcgccagaagcgcaccgccacgaaggccuacaacgucacccaggccuucgggcggcgcggccccgagcagacccaggggaacuucggcgaccaggagcugauccggcaggggaccgacuacaagcacuggccccagaucgcccaguucgcgcccagcgccuccgccuucuucggcaugagccgcaucggcauggaggugacgccguccgggaccuggcucaccuacaccggcgccaucaagcuggacgacaaggaccccaacuucaaggaccaggugauccugcucaacaagcacaucgacgccuacaagacguucccgcccaccgagcccaagaaggacaagaagaagaaggcggacgagacccaggcccugccccagcggcagaagauccagcagaccgucacgcugcuccccgccgccgaccuggacgacuucagcaagcagcugcagcaguccaugagcuccgcggacagcacccaggccugaggacuagucccuguucccagagcccacuuuuuuuucuuuuuuugaaauaaaauagccugucuuucagaucucaaaggcucuuuucagagccaccaaaaaaaaaaaaaaaaaaaaaaaaaaaaaaaaaaaaaaaaaaaaaaaaaaaaaaaaaaaaaaaaaaaaaaaaaaaaaaaaaaaaaaaaaaaaaaaaaaaaa

SEQ ID NO: 19231 - RNA, 1532 nt, Artificial Sequence
  SARS-CoV-2__MT811507.1__nucleocapsid protein (N) mRNA gc
aggagagucccgcagucggcguccagcggcucugcuuguucgugugugugucguugcaggccuuauucaagcuuaccaugagcgacaacggcccccagaaccagcgcaacgccccgcggaucaccuucgggggccccuccgacagcaccggguccaaccagaacggcgagcgcagcggggcccgguccaagcagcgccggccccagggccugcccaacaacacggcgagcugguucaccgcccucacccagcacggcaaggaggaccugaaguucccgcgcgggcagggcgugcccaucaacaccaacuccagccccgacgaccagaucggguacuaccggcgcgccacgcggcgcauccggggcggggacggcaagaugaaggaccugagcccccgcugguacuucuacuaccucggcaccgggccggaggccggccugcccuacggggccaacaaggacggcaucaucugggucgcgaccgagggcgcccugaacacccccaaggaccacaucgggacgcggaaccccgccaacaacgccgcgaucgugcuccagcugccgcagggcaccacccugcccaagggguucuacgccgagggcucccgcgggggcucccaggccagcucccggagcuccagccgcucccggaacagcucccgcaacagcacccccggcagcucccgggggacgagccccgcccgcauggccggcaacgggggcgacgcggcccucgcccugcugcuccuggaccggcugaaccaguucgaguccaagaugagcgggaagggccagcagcagcagggccagaccgugaccaagaaguccgccgccgaggcgagcaagaagccgcgccagaagcgcaccgccacgaaggccuacaacgucacccaggccuucgggcggcgcggccccgagcagacccaggggaacuucggcgaccaggagcucauccggcaggggaccgacuacaagcacuggccccagaucgcccaguucgcgcccuccgccagcgccuucuucggcaugucccgcaucggcauggaggugacgccgagcgggaccuggcugaccuacaccggcgccaucaagcuggacgacaaggaccccaacuucaaggaccaggugauccuccugaacaagcacaucgacgccuacaagacguucccgcccaccgagcccaagaaggacaagaagaagaaggcggacgagacccaggcccugccccagcggcagaagaagcagcagaccgucacgcuccugcccgccgccgaccuggacgacuucuccaagcagcuccagcagagcauguccaacgcggacagcacccaggccugaggacuagucccuguucccagagcccacuuuuuuuucuuuuuuugaaauaaaauagccugucuuucagaucucaaaggcucuuuucagagccaccaaaaaaaaaaaaaaaaaaaaaaaaaaaaaaaaaaaaaaaaaaaaaaaaaaaaaaaaaaaaaaaaaaaaaaaaaaaaaaaaaaaaaaaaaaaaaaaaaaaaa

SEQ ID NO: 19232 - RNA, 1532 nt, Artificial Sequence
  SARS-CoV-2__MT811511.1__nucleocapsid protein (N) mRNA gc
aggagagucccgcagucggcguccagcggcucugcuuguucgugugugugucguugcaggccuuauucaagcuuaccaugagcgacaacggcccccagaaccagcgcaacgccccgcggaucaccuucgggggccccuccgacagcaccggguccaaccagaacggcgagcgcagcggggcccgguccaagcagcgccggccccagggccugcccaacaacacggcgagcugguucaccgcccucacccagcacggcaaggaggaccugaaguucccgcgcgggcagggcgugcccaucaacaccaacuccagccccgacgaccagaucggguacuaccggcgcgccacgcggcgcauccggggcggggacggcaagaugaaggaccugagcccccgcugguacuucuacuaccucggcaccgggccggaggccggccugcccuacggggccaacaaggacggcaucaucugggucgcgaccgagggcgcccugaacacccccaaggaccacaucgggacgcggaaccccgccaacaacgccgcgaucgugcuccagcugccgcagggcaccacccugcccaagggguucuacgccgagggcucccgcgggggcucccaggccagcucccggagcuccagccgcucccggaacagcucccgcaacagcacccccggcagcucccgggggacgagccccgcccgcauggccggcaacgggggcgacgcggcccucgcccugcugcuccuggaccggcugaaccagcucgaguccaagaugagcgggaagggccagcagcagcagggccagaccgugaccaagaaguccgccgccgaggcgagcaagaagccgcgccagaagcgcaccgccacgaaggccuacaacgucacccaggccuucgggcggcgcggccccgagcagacccaggggaacuucggcgaccaggagcugauccggcaggggaccgacuacaagcacuggccccagaucgcccaguucgcgcccuccgccagcgccuucuucggcaugucccgcaucggcauggaggugacgccgagcgggaccuggcugaccuacaccggcgccaucaagcucgacgacaaggaccccaacuucaaggaccaggugauccugcugaacaagcacaucgacgccuacaagacguucccgcccaccgagcccaagaaggacaagaagaagaaggcggacgagacccaggcccuccugcagcggcagaagaagcagcagaccgucacgcugcuccccgccgccgaccuggacgacuucuccaagcagcugcagcagagcauguccagcgcggacuccacccaggccugaggacuagucccuguucccagagcccacuuuuuuuucuuuuuuugaaauaaaauagccugucuuucagaucucaaaggcucuuuucagagccaccaaaaaaaaaaaaaaaaaaaaaaaaaaaaaaaaaaaaaaaaaaaaaaaaaaaaaaaaaaaaaaaaaaaaaaaaaaaaaaaaaaaaaaaaaaaaaaaaaaaaa

SEQ ID NO: 19233 - RNA, 1532 nt, Artificial Sequence
  SARS-CoV-2__MT811513.1__nucleocapsid protein (N) mRNA gc
aggagagucccgcagucggcguccagcggcucugcuuguucgugugugugucguugcaggccuuauucaagcuuaccaugagcgacaacggcccccagaaccagcgcaacgccccgcggaucaccuucgggggccccuccgacagcaccggguccaaccagaacggcgagcgcagcggggcccgguccaagcagcgccggccccagggccugcccaacaacacggcgagcugguucaccgcccucacccagcacggcaaggaggaccugaaguucccgcgcgggcagggcgugcccaucaacaccaacuccagccccgacgaccagaucggguacuaccggcgcgccacgcggcgcauccggggcggggacggcaagaugaaggaccugagcccccgcugguacuucuacuaccucggcaccgggccggaggccggccugcccuacggggccaacaaggacggcaucaucugggucgcgaccgagggcgcccugaacacccccaaggaccacaucgggacgcggaaccccgccaacaacgccgcgaucgugcuccagcugccgcagggcaccacccugcccaagggguucuacgccgagggcagccgcgggggcucccaggccagcucccggagcuccagccgcucccggaacagccuccgcaacuccacccccggcagcagccgggggacgucccccgcccgcauggccggcaacgggggcgacgcggcccuggcccugcuccugcuggaccggcucaaccagcuggagagcaagauguccgggaagggccagcagcagcagggccagaccgugaccaagaaguccgccgccgaggcguccaagaagccgcgccagaagcgcaccgccacgaaggccuacaacgucacccaggccuucgggcggcgcggccccgagcagauccaggggaacuucggcgaccaggagcugauccggcaggggaccgacuacaagcacuggccccagaucgcccaguucgcgcccagcgccuccgccuucuucggcaugagccgcaucggcauggaggugaccccguccgggacguggcucaccuacaccggcgccaucaagcuggacgacaaggaccccaacuucaaggaccaggugauccugcucaacaagcacaucgacgccuacaagaccuucccgcccacggagcccaagaaggacaagaagaagaaggcggacgagacccaggcccugagccagcggcagaagaagcagcagaccgucacccugcuccccgccgccgaccuggacgacuucuccaagcagcugcagcagagcauguccagcgcggacuccacgcaggccugaggacuagucccuguucccagagcccacuuuuuuuucuuuuuuugaaauaaaauagccugucuuucagaucucaaaggcucuuuucagagccaccaaaaaaaaaaaaaaaaaaaaaaaaaaaaaaaaaaaaaaaaaaaaaaaaaaaaaaaaaaaaaaaaaaaaaaaaaaaaaaaaaaaaaaaaaaaaaaaaaaaaa

SEQ ID NO: 19234 - RNA, 1532 nt, Artificial Sequence
  SARS-CoV-2__MT811515.1__nucleocapsid protein (N) mRNA gc
aggagagucccgcagucggcguccagcggcucugcuuguucgugugugugucguugcaggccuuauucaagcuuaccaugagcgacaacggcccccagaaccagcgcaacgccccgcggaucaccuucgggggccuguccgacagcaccggguccaaccagaacggcgagcgcagcggggcccgguccaagcagcgccggccccagggccuccccaacaacacggcgagcugguucaccgcccugacccagcacggcaaggaggaccugaaguucccccgcgggcagggcgugccgaucaacaccaacuccagccccgacgaccagaucggguacuaccggcgcgccacgcggcgcauccggggcggggacggcaagaugaaggaccucagcccccgcugguacuucuacuaccugggcaccgggcccgaggccggccugccguacggggccaacaaggacggcaucaucugggucgcgaccgagggcgcccucaacacccccaaggaccacaucgggacgcggaaccccgccaacaacgccgcgaucgugcugcagcugccccagggcaccacccucccgaagggguucuacgccgagggcagccgcgggggcucccaggccagcucccggagcuccagccgcucccggaacagccugcgcaacuccacccccggcagcagccgggggacgucccccgcccgcauggccggcaacgggggcgacgcggcccuggcccuccugcugcucgaccggcugaaccagcuggagagcaagauguccgggaagggccagcagcagcagggccagaccgugaccaagaaguccgccgccgaggcguccaagaagccccgccagaagcgcaccgccacgaaggccuacaacgucacccaggccuucgggcggcgcggcccggagcagacccaggggaacuucggcgaccaggagcucauccggcaggggaccgacuacaagcacuggccccagaucgcccaguucgcgcccagcgccuccgccuucuucggcaugagccgcaucggcauggaggugacgcccuccgggaccuggcugaccuacaccggcgccaucaagcuggacgacaaggacccgaacuucaaggaccaggugauccuccugaacaagcacaucgacgccuacaagacguucccgcccaccgagcccaagaaggacaagaagaagaaggcggacgagacccaggcccugccccagcggcagaagaagcagcagaccgucacgcuccugcccgccgccgaccuggacgacuucagcaagcagcuccagcaguccaugagcuccgcggacagcacccaggccugaggacuagucccuguucccagagcccacuuuuuuuucuuuuuuugaaauaaaauagccugucuuucagaucucaaaggcucuuuucagagccaccaaaaaaaaaaaaaaaaaaaaaaaaaaaaaaaaaaaaaaaaaaaaaaaaaaaaaaaaaaaaaaaaaaaaaaaaaaaaaaaaaaaaaaaaaaaaaaaaaaaaa

SEQ ID NO: 19235 - RNA, 1532 nt, Artificial Sequence
  SARS-CoV-2__MT811521.1__nucleocapsid protein (N) mRNA gc
aggagagucccgcagucggcguccagcggcucugcuuguucgugugugugucguugcaggccuuauucaagcuuaccaugagcgacaacggcccccagaaccagcgcaacgccccgcggaucaccuucgggggccccuccgacagcaccggguccaaccagaacggcgagcgcagcggggcccgguccaagcagcgccggccccagggccugcccaacaacacggcgagcugguucaccgcccucacccagcacggcaaggaggaccugaaguucccgcgcgggcagggcgugcccaucaacaccaacuccagccccgacgaccagaucggguacuaccggcgcgccacgcggcgcauccggggcggggacggcaagaugaaggaccugagcccccgcugguacuucuacuaccucggcaccgggccggaggccggccugcccuacggggccaacaaggacggcaucaucugggucgcgaccgagggcgcccugaacacccccaaggaccacaucgggacgcggaaccccgccaacaacgccgcgaucgugcuccagcugccgcagggcaccacccugcccaagggguucuacgccgagggcucccgcgggggcucccaggccagcucccggagcuccagccgcucccggaacagcucccgcaacagcacccccggcagcucccgggggacgagccccgcccgcauggccggcaacgggggcgacgcggcccucacccugcugcuccuggaccggcugaaccagcucgaguccaagaugagcgggaagggccagcagcagcagggccagaccgugaccaagaaguccgccgccgaggccagcaagaagccgcgccagaagcgcacggcgaccaaggccuacaacgucacccaggccuucgggcggcgcggccccgagcagacccaggggaacuucggcgaccaggagcugauccggcaggggacggacuacaagcacuggccccagaucgcccaguucgcccccuccgcgagcgccuucuucggcaugucccgcaucggcauggaggugaccccgagcgggaccuggcugaccuacacgggcgccaucaagcucgacgacaaggaccccaacuucaaggaccaggugauccugcugaacaagcacaucgacgccuacaagaccuucccgcccaccgagcccaagaaggacaagaagaagaaggccgacgagacccaggcgcucccccagcggcagaagaagcagcagacggucacccugcugcccgccgccgaccucgacgacuucuccaagcagcugcagcagagcauguccagcgccgacuccacccaggcgugaggacuagucccuguucccagagcccacuuuuuuuucuuuuuuugaaauaaaauagccugucuuucagaucucaaaggcucuuuucagagccaccaaaaaaaaaaaaaaaaaaaaaaaaaaaaaaaaaaaaaaaaaaaaaaaaaaaaaaaaaaaaaaaaaaaaaaaaaaaaaaaaaaaaaaaaaaaaaaaaaaaaa

SEQ ID NO: 19236 - RNA, 1532 nt, Artificial Sequence
  SARS-CoV-2__MT811726.1__nucleocapsid protein (N) mRNA gc
aggagagucccgcagucggcguccagcggcucugcuuguucgugugugugucguugcaggccuuauucaagcuuaccaugagcgacaacggcccccagaaccagcgcaacgccccgcggaucaccuucgggggccccuccgacagcaccggguccaaccagaacggcgagcgcagcggggcccgguccaagcagcgccggccccagggccugcccaacaacacggcgagcugguucaccgcccucacccagcacggcaaggaggaccugaaguucccgcgcgggcagggcgugcccaucaacaccaacuccagccccgacgaccagaucggguacuaccggcgcgccacgcggcgcauccggggcggggacggcaagaugaaggaccugagcccccgcugguacuucuacuaccucggcaccgggccggaggccggccugcccuacggggccaacaaggacggcaucaucugggucgcgaccgagggcgcccugaacaccagcaaggaccacaucgggacgcggaaccccgccaacaacgccgcgaucgugcuccagcugccccagggcaccacccugccgaagggguucuacgccgagggcucccgcgggggcagccaggccuccagccgguccagcucccgcagccggaacuccagccgcaacagcacccccggcuccagccgggggacgucccccgcccgcauggccggcaacgggggcgacgcggcccucgcccugcugcuccuggaccggcugaaccagcucgagagcaagauguccgggaagggccagcagcagcagggccagaccgugaccaagaaguccgccgccgaggcguccaagaagccccgccagaagcgcaccgccacgaaggccuacaacgucacccaggccuucgggcggcgcggcccggagcagacccaggggaacuucggcgaccaggagcugauccggcaggggaccgacuacaagcacuggccccagaucgcccaguucgcgcccagcgccuccgccuucuucggcaugagccgcaucggcauggaggugacgcccuccgggaccuggcugaccuacaccggcgccaucaagcucgacgacaaggacccgaacuucaaggaccaggugauccugcugaacaagcacaucgacgccuacaagacguucccgcccaccgagcccaagaaggacaagaagaagaaggcggacgagacccaggcccucccccagcggcagaagaagcagcagaccgucacgcugcugcccgccgccgaccucgacgacuucagcaagcagcugcagcaguccaugagcuccgcggacagcacccaggccugaggacuagucccuguucccagagcccacuuuuuuuucuuuuuuugaaauaaaauagccugucuuucagaucucaaaggcucuuuucagagccaccaaaaaaaaaaaaaaaaaaaaaaaaaaaaaaaaaaaaaaaaaaaaaaaaaaaaaaaaaaaaaaaaaaaaaaaaaaaaaaaaaaaaaaaaaaaaaaaaaaaaa

SEQ ID NO: 19237 - RNA, 1532 nt, Artificial Sequence
  SARS-CoV-2__MT806773.1__nucleocapsid protein (N) mRNA gc
aggagagucccgcagucggcguccagcggcucugcuuguucgugugugugucguugcaggccuuauucaagcuuaccaugagcgacaacggcccccagaaccagcgcaacgccccgcggaucaccuucgggggccccuccgacagcaccggguccaaccagaacggcgagcgcagcggggcccgguccaagcagcgccggccccagggccugcccaacaacacggcgagcugguucaccgcccucacccagcacggcaaggaggaccugaaguucccgcgcgggcagggcgugcccaucaacaccaacuccagccccgacgaccagaucggguacuaccggcgcgccacgcggcgcauccggggcggggacggcaagaugaaggaccugagcccccgcugguacuucuacuaccucggcaccgggccggaggccggccugcccuacggggccaacaaggacggcaucaucugggucgcgaccgagggcgcccugaacacccccaaggaccacaucgggacgcggaaccccgccaacaacgccgcgaucgugcuccagcugccgcagggcaccacccugcccaagggguucuacgccgagggcagccgcgggggcucccaggccagcucccggagcuccagccgcucccggaacagcucccgcaacagcacccccggcagcauccgggggacgucccccgcccgcauggccggcaacgggggcgacgcggcccucgcccugcugcuccuggaccggcugaaccagcucgagagcaagauguccgggaagggccagcagcagcagggccagaccgugaccaagaaguccgccgccgaggcguccaagaagccgcgccagaagcgcaccgccacgaaggccuacaacgucacccaggccuucgggcggcgcggccccgagcagacccaggggaacuucggcgaccaggagcugauccggcaggggaccgacuacaagcacuggccccagaucgcccaguucgcgcccagcgccuccgccuucuucggcaugagccgcaucggcauggaggugacgccguccgggaccuggcugaccuacaccggcgccaucaagcucgacgacaaggaccccaacuucaaggaccaggugauccugcugaacaagcacaucgacgccuacaagacguucccgcccaccgagcccaagaaggacaagaagaagaaggcggacgagacccaggcccucccccagcggcagaagaagcagcagaccgucacgcugcugcccgccgccgaccucgacgacuucagcaagcagcugcagcaguccaugagcuccgcggacagcacccaggccugaggacuagucccuguucccagagcccacuuuuuuuucuuuuuuugaaauaaaauagccugucuuucagaucucaaaggcucuuuucagagccaccaaaaaaaaaaaaaaaaaaaaaaaaaaaaaaaaaaaaaaaaaaaaaaaaaaaaaaaaaaaaaaaaaaaaaaaaaaaaaaaaaaaaaaaaaaaaaaaaaaaaa

SEQ ID NO: 19238 - RNA, 1532 nt, Artificial Sequence
  SARS-CoV-2__MT806776.1__nucleocapsid protein (N) mRNA gc
aggagagucccgcagucggcguccagcggcucugcuuguucgugugugugucguugcaggccuuauucaagcuuaccaugagcgacaacggcccccagaaccagcgcaacgccccgcggaucaccuucgggggccccuccgacagcaccggguccaaccagaacggcgagcgcagcggggcccgguccaagcagcgccggccccagggccugcccaacaacacggcgagcugguucaccgcccucacccagcacggcaaggaggaccugaaguucccgcgcgggcagggcgugcccaucaacaccaacuccagccccgacgaccagaucggguacuaccggcgcgccacgcggcgcauccggggcggggacggcaagaugaaggaccugagcccccgcugguacuucuacuaccucggcaccgggccggaggccggccugcccuacggggccaacaaggacggcaucaucugggucgcgaccgagggcgcccugaacacccccaaggaccacaucgggacgcggaaccccgccaacaacgccgcgaucgugcuccagcugccgcagggcaccacccugcccaagggguucuacgccgagggcucccgcgggggcucccaggccagcucccggagcuccagccgcucccggaacagcucccgcaacagcacccccggcagcucccgggggacgagccccgcccgcauggccggcaacgggggcgacgcggcccucgcccugcugcuccuggaccggcugaaccagcucgaguccaagaugagcgggaagggccagcagcagcagggccagaccgugaccaagaaguccgccgccgaggcgagcaagaagccgcgccagaagcgcaccgccacgaaggccuacaacgucacccaggccuucgggcggcgcggccccgagcagacccaggggaacuucggcgaccaggagcugauccggcaggggaccgacuacaagcacuggccccagaucgcccaguucgcgcccuccgccagcgccuucuucggcaugucccgcaucggcauggaggugacgccgagcgggaccuggcugaccuacaccggcgccaucaagcucgacgacaaggaccccaacuucaaggaccaggugauccugcugaacaagcacaucgacgccuacaagacguucccgcccaucgagcccaagaaggacaagaagaagaaggcggacgagacccaggcccucccccagcggcagaagaagcagcagaccgucacccugcugcccgccgccgaccucgacgacuucuccaagcagcugcagcagagcauguccagcgcggacuccacgcaggccugaggacuagucccuguucccagagcccacuuuuuuuucuuuuuuugaaauaaaauagccugucuuucagaucucaaaggcucuuuucagagccaccaaaaaaaaaaaaaaaaaaaaaaaaaaaaaaaaaaaaaaaaaaaaaaaaaaaaaaaaaaaaaaaaaaaaaaaaaaaaaaaaaaaaaaaaaaaaaaaaaaaaa

SEQ ID NO: 19239 - RNA, 1532 nt, Artificial Sequence
  SARS-CoV-2__MT806778.1__nucleocapsid protein (N) mRNA gc
aggagagucccgcagucggcguccagcggcucugcuuguucgugugugugucguugcaggccuuauucaagcuuaccaugagcgacaacggcccccagaaccagcgcaacgccccgcggaucaccuucgggggccccuccgacagcaccggguccaaccagaacggcgagcgcagcggggcccgguccaagcagcgccggccccagggccugcccaacaacacggcgagcugguucaccgcccucacccagcacggcaaggaggaccugaaguucccgcgcgggcagggcgugcccaucaacaccaacuccagccccgacgaccagaucggguacuaccggcgcgccacgcggcgcauccggggcggggacggcaagaugaaggaccugagcccccgcugguacuucuacuaccucggcaccgggccggaggccggccugcccuacggggccaacaaggacggcaucaucugggucgcgaccgagggcgcccugaacacccccaaggaccacaucgggacgcggaaccccgccaacaacgccgcgaucgugcuccagcugccgcagggcaccacccugcccaagggguucuacgccgagggcagccgcgggggcucccaggccagcucccggagcuccagccgcucccggaacagcucccgcaacagcacccccggcagcucccgggggacgagccccgcccgcauguccggcaacgggggcgacgccgcgcucgcccugcugcuccuggaccggcugaaccagcucgagagcaagauguccgggaagggccagcagcagcagggccagaccgugaccaagaaguccgccgccgaggccuccaagaagccgcgccagaagcgcaccgcgacgaaggccuacaacgucacccaggccuucgggcggcgcggccccgagcagacccaggggaacuucggcgaccaggagcugauccggcaggggaccgacuacaagcacuggccccagaucgcccaguucgcccccagcgcguccgccuucuucggcaugagccgcaucggcauggaggugacgccguccgggaccuggcugaccuacaccggcgccaucaagcucgacgacaaggaccccaacuucaaggaccaggugauccugcugaacaagcacaucgacgccuacaagacguucccgcccaccgagcccaagaaggacaagaagaagaaggccgacgagacccaggcgcucccccagcggcagaagaagcagcagaccgucacgcugcugcccgccgccgaccucgacgacuucagcaagcagcugcagcaguccaugagcuccgccgacagcacccaggcgugaggacuagucccuguucccagagcccacuuuuuuuucuuuuuuugaaauaaaauagccugucuuucagaucucaaaggcucuuuucagagccaccaaaaaaaaaaaaaaaaaaaaaaaaaaaaaaaaaaaaaaaaaaaaaaaaaaaaaaaaaaaaaaaaaaaaaaaaaaaaaaaaaaaaaaaaaaaaaaaaaaaaa

SEQ ID NO: 19240 - RNA, 1532 nt, Artificial Sequence
  SARS-CoV-2__MT806787.1__nucleocapsid protein (N) mRNA gc
aggagagucccgcagucggcguccagcggcucugcuuguucgugugugugucguugcaggccuuauucaagcuuaccaugagcgacaacggcccccagaaccagcgcaacgccccgcggaucaccuucgggggccccuccgacagcaccggguccaaccagaacggcgagcgcagcggggcccgguccaagcagcgccggccccagggccugcccaacaacacggcgagcugguucaccgcccucacccagcacggcaaggaggaccugaaguucccgcgcgggcagggcgugcccaucaacaccaacuccagccccgacgaccagaucggguacuaccggcgcgccacgcggcgcauccggggcggggacggcaagaugaaggaccugagcccccgcugguacuucuacuaccucggcaccgggccggaggccggccugcccuacggggccaacaaggacggcaucaucugggucgcgaccgagggcgcccugaacacccccaaggaccacaucgggacgcggaaccccgccaacaacgccgcgaucgugcuccagcugccgcagggcaccacccugcccaagggguucuacgccgagggcucccgcgggggcucccaggccagcucccggagcuccagccgcucccggaacagcucccgcaacagcacccccggcagcucccgggggacgagccccgcccgcauggccggcaacugcggggacgcggcccucgcccugcugcuccuggaccggcugaaccagcucgaguccaagaugagcggcaaggggcagcagcagcagggccagaccgugaccaagaaguccgccgccgaggcgagcaagaagccgcgccagaagcgcaccgccacgaaggccuacaacgucacccaggccuucggccggcgcgggcccgagcagacccagggcaacuucggggaccaggagcugauccggcagggcaccgacuacaagcacuggccccagaucgcccaguucgcgcccuccgccagcgccuucuucgggaugucccgcaucggcauggaggugacgccgagcggcaccuggcugaccuacaccggggccaucaagcucgacgacaaggaccccaacuucaaggaccaggugauccugcugaacaagcacaucgacgccuacaagacguucccgcccaccgagcccaagaaggacaagaagaagaaggcggacgagacccaggcccucccccagcggcagaagaagcagcagaccgucacgcugcugcccgccgccgaccucgacgacuucuccaagcagcugcagcagagcauguccagcgcggacuccacccaggccugaggacuagucccuguucccagagcccacuuuuuuuucuuuuuuugaaauaaaauagccugucuuucagaucucaaaggcucuuuucagagccaccaaaaaaaaaaaaaaaaaaaaaaaaaaaaaaaaaaaaaaaaaaaaaaaaaaaaaaaaaaaaaaaaaaaaaaaaaaaaaaaaaaaaaaaaaaaaaaaaaaaaa

SEQ ID NO: 19241 - RNA, 1532 nt, Artificial Sequence
  SARS-CoV-2__MT800928.1__nucleocapsid protein (N) mRNA gc
aggagagucccgcagucggcguccagcggcucugcuuguucgugugugugucguugcaggccuuauucaagcuuaccaugagcgacaacggcccccagaaccagcgcaacgccccgcggaucaccuucgggggccccuccgacagcaccggguccaaccagaacggcgagcgcagcggggcccgguccaagcagcgccggccccagggccugcccaacaacacggcgagcugguucaccgcccucacccagcacggcaaggaggaccugaaguucccgcgcgggcagggcgugcccaucaacaccaacuccagccccgacgaccagaucggguacuaccggcgcgccacgcggcgcauccggggcggggacggcaagaugaaggaccugagcccccgcugguacuucuacuaccucggcaccgggccggaggccggccugcccuacggggccaacaaggacggcaucaucugggucgcgaccgagggcgcccugaacacccccaaggaccacaucgggacgcggaaccccgccaacaacgccgcgaucgugcuccagcugccgcagggcaccacccugcccaagggguucuacgccgagggcagccgcgggggcucccaggccagcucccggagcuccagccgcucccggaacagccuccgcaacuccacccccggcagcagcaagacgaccucccccgcccggauggccgggaacggcggggacgcggcccuggcccugcuccugcuggaccgccucaaccagcuggagagcaagauguccggcaaggggcagcagcagcagggccagaccgugaccaagaaguccgccgccgaggcguccaagaagccgcggcagaagcgcacggccaccaaggccuacaacgucacccaggccuucggccgccgggggcccgagcagacccagggcaacuucggggaccaggagcugauccgccagggcacggacuacaagcacuggccccagaucgcccaguucgcgcccagcgccuccgccuucuucgggaugagccggaucggcauggaggugaccccguccggcaccuggcucaccuacacgggggccaucaagcuggacgacaaggaccccaacuucaaggaccaggugauccugcucaacaagcacaucgacgccuacaagaccuucccgcccaccgagcccaagaaggacaagaagaagaaggcggacgagacccaggcccugccccagcgccagaagaagcagcagacggucacccugcuccccgccgccgaccuggacgacuucagcaagcagcugcagcaguccaugagcuccgcggacagcacccaggccugaggacuagucccuguucccagagcccacuuuuuuuucuuuuuuugaaauaaaauagccugucuuucagaucucaaaggcucuuuucagagccaccaaaaaaaaaaaaaaaaaaaaaaaaaaaaaaaaaaaaaaaaaaaaaaaaaaaaaaaaaaaaaaaaaaaaaaaaaaaaaaaaaaaaaaaaaaaaaaaaaaaaa

SEQ ID NO: 19242 - RNA, 1532 nt, Artificial Sequence
  SARS-CoV-2__MT797771.1__nucleocapsid protein (N) mRNA gc
aggagagucccgcagucggcguccagcggcucugcuuguucgugugugugucguugcaggccuuauucaagcuuaccaugagcgacaacggcccccagaaccagcgcaacgccccgcggaucaccuucgggggccccuccgacagcaccggguccaaccagaacggcgagcgcagcggggcccgguccaagcagcgccggccccagggccugcccaacaacacggcgagcugguucaccgcccucacccagcacggcaaggaggaccugaaguucccgcgcgggcagggcgugcccaucaacaccaacuccagccccgacgaccagaucggguacuaccggcgcgccacgcggcgcauccggggcggggacggcaagaugaaggaccugagcccccgcugguacuucuacuaccucggcaccgggccggaggccggccugcccuacggggccaacaaggacggcaucaucugggucgcgaccgagggcgcccugaacacccccaaggaccacaucgggacgcggaaccccgccaacaacgccgcgaucgugcuccagcugccgcagggcaccacccugcccaagggguucuacgccgagggcagccgcgggggcucccaggccagcucccggagcuccagccgcggccggaacuccagccgcaacuccacccccgggagcagccggggcacgucccccgcccgcauggccgggaacggcggggacgcggcccucgcccugcugcuccuggaccggcugaaccagcucgagagcaagauguccggcaagggccagcagcagcaggggcagaccgugaccaagaaguccgccgccgaggcguccaagaagccgcgccagaagcgcaccgccacgaaggccuacaacgucacccaggccuucggccggcgcgggcccgagcagacccagggcaacuucggggaccaggagcugauccggcagggcaccgacuacaagcacuggccccagaucgcccaguucgcgcccagcgccuccgccuucuucggcaugagccgcaucgggauggaggugacgccguccggcaccuggcugaccuacaccggggccaucaagcucgacgacaaggaccccaacuucaaggaccaggugauccugcugaacaagcacaucgacgccuacaagacguucccgcccaccgagcccaagaaggacaagaagaagaaggcggacgagacccaggcccuccugcagcggcagaagaagcagcagaccgucacgcugcuccccgccgccgaccuggacgacuucagcaagcagcugcagcaguccaugagcuccgcggacagcacccaggccugaggacuagucccuguucccagagcccacuuuuuuuucuuuuuuugaaauaaaauagccugucuuucagaucucaaaggcucuuuucagagccaccaaaaaaaaaaaaaaaaaaaaaaaaaaaaaaaaaaaaaaaaaaaaaaaaaaaaaaaaaaaaaaaaaaaaaaaaaaaaaaaaaaaaaaaaaaaaaaaaaaaaa

SEQ ID NO: 19243 - RNA, 1532 nt, Artificial Sequence
  SARS-CoV-2__MT791844.1__nucleocapsid protein (N) mRNA gc
aggagagucccgcagucggcguccagcggcucugcuuguucgugugugugucguugcaggccuuauucaagcuuaccaugagcgacaacggcccccagaaccagcgcaacgccccgcggaucaccuucgggggccccuccgacagcaccggguccaaccagaacggcgagcgcagcggggcccgguccaagcagcgccggccccagggccugcccaacaacacggcgagcugguucaccgcccucacccagcacggcaaggaggaccugaaguucccgcgcgggcagggcgugcccaucaacaccaacuccagccccgacgaccagaucggguacuaccggcgcgccacgcggcgcauccggggcggggacggcaagaugaaggaccugagcccccgcugguacuucuacuaccucggcaccgggccggaggccggccugcccuacggggccaacaaggacggcaucaucugggucgcgaccgagggcgcccugaacauccccaaggaccacaucgggacccggaaccccgccaacaacgccgcgaucgugcuccagcugccgcagggcacgacccugcccaagggguucuacgccgagggcucccgcgggggcucccaggccagcucccggagcuccagccgcucccggaacagcucccgcaacagcacccccggcagcucccgggggaccagccccgcccgcauggccggcaacgggggcgacgcggcccucgcccugcugcuccuggaccggcugaaccagcucgaguccaagaugagcgggaagggccagcagcagcagggccagacggugaccaagaaguccgccgccgaggcgagcaagaagccgcgccagaagcgcaccgccaccaaggccuacaacgucacgcaggccuucgggcggcgcggccccgagcagacccaggggaacuucggcgaccaggagcugauccggcaggggaccgacuacaagcacuggccccagaucgcccaguucgcgcccuccgccagcgccuucuucggcaugucccgcaucggcauggaggugaccccgagcgggacguggcugaccuacaccggcgccaucaagcucgacgacaaggaccccaacuucaaggaccaggugauccugcugaacaagcacaucgacgccuacaagaccuucccgcccacggagcccaagaaggacaagaagaagaaggcggacgagacccaggcccucccccagcggcagaagaagcagcagaccgucacccugcugcccgccgccgaccucgacgacuucuccaagcagcugcagcagagcauguccagcgcggacuccacgcaggccugaggacuagucccuguucccagagcccacuuuuuuuucuuuuuuugaaauaaaauagccugucuuucagaucucaaaggcucuuuucagagccaccaaaaaaaaaaaaaaaaaaaaaaaaaaaaaaaaaaaaaaaaaaaaaaaaaaaaaaaaaaaaaaaaaaaaaaaaaaaaaaaaaaaaaaaaaaaaaaaaaaaaa

SEQ ID NO: 19244 - RNA, 1532 nt, Artificial Sequence
  SARS-CoV-2__MT791858.1__nucleocapsid protein (N) mRNA gc
aggagagucccgcagucggcguccagcggcucugcuuguucgugugugugucguugcaggccuuauucaagcuuaccaugagcgacaacggcccccagaaccagcgcaacgccccgcggaucaccuucgggggccccuccgggagcaccggcuccaaccagaacggggagcgcagcggcgcccgguccaagcagcgccggccccagggccugcccaacaacacggcgagcugguucaccgcccucacccagcacgggaaggaggaccugaaguucccgcgcggccagggggugcccaucaacaccaacuccagccccgacgaccagaucggcuacuaccggcgcgccacgcggcgcauccgcgggggcgacggcaagaugaaggaccugagcccccggugguacuucuacuaccucgggaccggcccggaggccgggcugcccuacggcgccaacaaggacggcaucaucugggucgcgaccgagggggcccugaacacccccaaggaccacaucggcacgcggaaccccgccaacaacgccgcgaucgugcuccagcugccgcaggggaccacccugcccaagggcuucuacgccgaggggucccgcggcggcucccaggccagcucccggagcuccagccgcucccggaacagcucccgcaacagcacccccgggagcucccggggcacgagccccgcccgcauggccgggaacggcggggacgcggcccucgcccugcugcuccuggaccggcugaaccagcucgaguccaagaugagcggcaagggccagcagcagcaggggcagaccgugaccaagaaguccgccgccgaggcgagcaagaagccgcgccagaagcgcaccgccacgaaggccuacaacgucacccaggccuucggccggcgcgggcccgagcagacccagggcaacuucggggaccaggagcugauccggcagggcaccgacuacaagcacuggccccagaucgcccaguucgcgcccuccgccagcgccuucuucggcaugucccgcaucgggauggaggugacgccgagcggcaccuggcugaccuacaccggggccaucaagcucgacgacaaggaccccaacuucaaggaccaggugauccugcugaacaagcacaucgacgccuacaagacguucccgcccaccgagcccaagaaggacaagaagaagaaggcggacgagacccaggcccucccccagcggcagaagaagcagcagaccgucacgcugcugcccgccgccgaccucgacgacuucuccaagcagcugcagcagagcauguccagcgcggacuccacccaggccugaggacuagucccuguucccagagcccacuuuuuuuucuuuuuuugaaauaaaauagccugucuuucagaucucaaaggcucuuuucagagccaccaaaaaaaaaaaaaaaaaaaaaaaaaaaaaaaaaaaaaaaaaaaaaaaaaaaaaaaaaaaaaaaaaaaaaaaaaaaaaaaaaaaaaaaaaaaaaaaaaaaaa

SEQ ID NO: 19245 - RNA, 1532 nt, Artificial Sequence
  SARS-CoV-2__MT791862.1__nucleocapsid protein (N) mRNA gc
aggagagucccgcagucggcguccagcggcucugcuuguucgugugugugucguugcaggccuuauucaagcuuaccaugagcgacaacggcccccagaaccagcgcaacgccccgcggaucaccuucgggggccccuccgacagcaccggguccaaccagaacggcgagcgcagcggggcccgguccaagcagcgccggccccagggccugcccaacaacacggcgagcugguucaccgcccucacccagcacggcaaggaggaccugaaguucccgcgcgggcagggcgugcccaucaacaccaacuccagccccgacgaccagaucggguacuaccggcgcgccacgcggcgcauccggggcggggacggcaagaugaaggaccugagcccccgcugguacuucuacuaccucggcaccgggccggaggccggccugcccuacggggccaacaaggacggcaucaucugggucgcgaccgagggcgcccugaacacccccaaggaccacaucgggacgcggaaccccgccaacaacgccgcgaucgugcuccagcugccgcagggcaccacccugcccaagggguucuacgccgagggcagccgcgggggcacccaggccuccagccgguccagcucccgcagccggaacuccagccgcaacuccacgcccggcagcagccgggggaccucccccgcccgcauggccggcaacgggggcgacgcggcccucgcccugcugcuccuggaccggcugaaccagcucgagagcaagauguccgggaagggccagcagcagcagggccagaccgugaccaagaaguccgccgccgaggcguccaagaagccgcgccagaagcgcacggccaccaaggccuacaacgucacccaggccuucgggcggcgcggccccgagcagacccaggggaacuucggcgaccaggagcugauccggcaggggacggacuacaagcacuggccccagaucgcccaguucgcgcccagcgccuccgccuucuucggcaugagccgcaucggcauggaggugaccccguccgggaccuggcugaccuacacgggcgccaucaagcucgacgacaaggaccccaacuucaaggaccaggugauccugcugaacaagcacaucgacgccuacaagaccuucccgcccaccgagcccaagaaggacaagaagaagaaggcggacgagacccaggcccucccccagcggcagaagaagcagcagacggucacccugcugcccgccgccgaccucgacgacuucagcaagcagcugcagcaguccaugagcuccgcggacagcacccaggccugaggacuagucccuguucccagagcccacuuuuuuuucuuuuuuugaaauaaaauagccugucuuucagaucucaaaggcucuuuucagagccaccaaaaaaaaaaaaaaaaaaaaaaaaaaaaaaaaaaaaaaaaaaaaaaaaaaaaaaaaaaaaaaaaaaaaaaaaaaaaaaaaaaaaaaaaaaaaaaaaaaaaa

SEQ ID NO: 19246 - RNA, 1532 nt, Artificial Sequence
  SARS-CoV-2__MT791896.1__nucleocapsid protein (N) mRNA gc
aggagagucccgcagucggcguccagcggcucugcuuguucgugugugugucguugcaggccuuauucaagcuuaccaugagcgacaacggcccccagaaccagcgcaacgugccgcggaucaccuucgggggccccuccgacagcaccggguccaaccagaacggcgagcgcagcggggcccgguccaagcagcgccggccccagggccugcccaacaacacggccagcugguucaccgcgcucacccagcacggcaaggaggaccugaaguucccgcgcgggcagggcguccccaucaacaccaacuccagccccgacgaccagaucggguacuaccggcgcgccacgcggcgcauccggggcggggacggcaagaugaaggaccugagcccccgcugguacuucuacuaccucggcaccgggccggaggccggccugcccuacggggccaacaaggacggcaucaucuggguggccaccgagggcgcgcugaacacccccaaggaccacaucgggacgcggaaccccgccaacaacgccgccaucgugcuccagcugccgcagggcaccacccugcccaagggguucuacgcggagggcucccgcgggggcucccaggccagcucccggagcuccagccgcucccggaacagcucccgcaacagcacccccggcagcucccgggggacgagccccgcccgcauggccggcaacgggggcgacgccgcgcucgcccugcugcuccuggaccggcugaaccagcucgaguccaagaugagcgggaagggccagcagcagcagggccagaccgucaccaagaaguccgccgccgaggccagcaagaagccgcgccagaagcgcaccgcgacgaaggccuacaacgugacccaggccuucgggcggcgcggccccgagcagacccaggggaacuucggcgaccaggagcugauccggcaggggaccgacuacaagcacuggccccagaucgcccaguucgcccccuccgcgagcgccuucuucggcaugucccgcaucggcauggaggugacgccgagcgggaccuggcugaccuacaccggcgccaucaagcucgacgacaaggaccccaacuucaaggaccaggucauccugcugaacaagcacaucgacgccuacaagacguucccgcccaccgagcccaagaaggacaagaagaagaaggccgacgagacccaggcgcucccccagcggcagaagaagcagcagaccgugacgcugcugcccgccgccgaccucgacgacuucuccaagcagcugcagcagagcauguccagcgccgacuccacccaggcgugaggacuagucccuguucccagagcccacuuuuuuuucuuuuuuugaaauaaaauagccugucuuucagaucucaaaggcucuuuucagagccaccaaaaaaaaaaaaaaaaaaaaaaaaaaaaaaaaaaaaaaaaaaaaaaaaaaaaaaaaaaaaaaaaaaaaaaaaaaaaaaaaaaaaaaaaaaaaaaaaaaaaa

SEQ ID NO: 19247 - RNA, 1532 nt, Artificial Sequence
  SARS-CoV-2__MT791938.1__nucleocapsid protein (N) mRNA gc
aggagagucccgcagucggcguccagcggcucugcuuguucgugugugugucguugcaggccuuauucaagcuuaccaugagcgacaacggcccccagaaccagcgcaacgccccgcggaucaccuucgggggccccuccgacagcaccggguccaaccagaacggcgagcgcagcggggcccgguccaagcagcgccggccccagggccugcccaacaacacggcgagcugguucaccgcccucacccagcacggcaaggaggaccugaaguucccgcgcgggcagggcgugcccaucaacaccaacuccagccccgacgaccagaucggguacuaccggcgcgccacgcggcgcauccggggcggggacggcaagaugaaggaccugagcccccgcugguacuucuacuaccucggcaccgggccggagagcggccugcccuacggggccaacaaggacggcaucaucugggucgccaccgagggcgcgcugaacacccccaaggaccacaucgggacgcggaaccccgccaacaacgccgccaucgugcuccagcugccgcagggcaccacccugcccaagggguucuacgcggagggcucccgcgggggcagccaggccuccagccgguccagcucccgcagccggaacuccagccgcaacagcacccccggcuccagccgggggacgucccccgcccgcauggccggcaacgggggcgacgccgcgcucgcccugcugcuccuggaccggcugaaccagcucgagagcaagauguccgggaagggccagcagcagcagggccagaccgugaccaagaaguccgccgccgaggccuccaagaagccgcgccagaagcgcaccgcgacgaaggccuacaacgucacccaggccuucgggcggcgcggccccgagcagacccaggggaacuucggcgaccaggagcugauccggcaggggaccgacuacaagcacuggccccagaucgcccaguucgcccccagcgcguccgccuucuucggcaugagccgcaucggcauggaggugacgccguccgggaccuggcugaccuacaccggcgccaucaagcucgacgacaaggaccccaacuucaaggaccaggugauccugcugaacaagcacaucgacgccuacaagacguucccgcccaccgagcccaagaaggacaagaagaagaaggccgacgagacccaggcgcucccccagcggcagaagaagcagcagaccgucacgcugcugcccgccgccgaccucgacgacuucagcaagcagcugcagcaguccaugagcuccgccgacagcacccaggcgugaggacuagucccuguucccagagcccacuuuuuuuucuuuuuuugaaauaaaauagccugucuuucagaucucaaaggcucuuuucagagccaccaaaaaaaaaaaaaaaaaaaaaaaaaaaaaaaaaaaaaaaaaaaaaaaaaaaaaaaaaaaaaaaaaaaaaaaaaaaaaaaaaaaaaaaaaaaaaaaaaaaaa

SEQ ID NO: 19248 - RNA, 1532 nt, Artificial Sequence
  SARS-CoV-2__MT791944.1__nucleocapsid protein (N) mRNA gc
aggagagucccgcagucggcguccagcggcucugcuuguucgugugugugucguugcaggccuuauucaagcuuaccaugagcgacaacggcccccagaaccagcgcaacgccccgcggaucaccuucgggggccccuccgacagcaccggguccaaccagaacggcgagcgcagcggggcccgguccaagcagcgccggccccagggccugcccaacaacacggcgagcugguucaccgcccucacccagcacggcaaggaggaccugaaguucccgcgcgggcagggcgugcccaucaacaccaacuccagccccgacgaccagaucggguacuaccggcgcgccacgcggcgcauccggggcggggacggcaagaugaaggaccugagcccccgcugguacuucuacuaccucggcaccgggccggaggccggccugcccuacggggccaacaaggacggcaucaucugggucgcgaccgagggcgcccugaacacccccaaggaccacaucgggacgcggaaccccgccaacaacgccgcgaucgugcuccagcugccgcagggcaccacccugcccaagggguucuacgccgagggcucccgcgggggcucccaggccagcucccggagcuccagccgcucccggaacagcucccgcaacagcacccccggcagcucccgggggacgagccccgcccgcauggccggcaacgggggcgacgcggcccucgcccugcugcuccuggaccggcugaaccagcucgaguccaagaugagcgggaagggccagcagcagcagggccagaccgugaccaagaaguccgccgccgaggcgagcaagaagccgcgccagaagcgcaccgccacgaaggccuacaacgucacccaggccuucgggcggcgcggccccgagcagacccaggggaacuucggcgaccaggagcugauccggcaggggaccgacuacaagcaguggccccagaucgcccaguucgcgcccuccgccagcgccuucuucggcaugucccgcaucggcauggaggugacgccgagcgggaccuggcugaccuacaccggcgccaucaagcucgacgacaaggaccccaacuucaaggaccaggugauccugcugaacaagcacaucgacgccuacaagacguucccgcccaccgagcccaagaaggacaagaagaagaaggcggacgagacccaggcccucccccagcggcagaagaagcagcagaccgucacgcugcugcccgccgccgaccucgacgacuucuccaagcagcugcagcagagcauguccagcgcggacuccacccaggccugaggacuagucccuguucccagagcccacuuuuuuuucuuuuuuugaaauaaaauagccugucuuucagaucucaaaggcucuuuucagagccaccaaaaaaaaaaaaaaaaaaaaaaaaaaaaaaaaaaaaaaaaaaaaaaaaaaaaaaaaaaaaaaaaaaaaaaaaaaaaaaaaaaaaaaaaaaaaaaaaaaaaa

SEQ ID NO: 19249 - RNA, 1532 nt, Artificial Sequence
  SARS-CoV-2__MT791948.1__nucleocapsid protein (N) mRNA gc
aggagagucccgcagucggcguccagcggcucugcuuguucgugugugugucguugcaggccuuauucaagcuuaccaugagcgacaacggcccccagaaccagcgcaacgccccgcggaucaccuucgggggccccuccgacagcaccggguccaaccagaacggcgagcgcagcggggcccgguccaagcagcgccggccccagggccugcccaacaacacggcgagcugguucaccgcccucacccagcacggcaaggaggaccugaaguucccgcgcgggcagggcgugcccaucaacaccaacuccagccccgacgaccagaucggguacuaccggcgcgccacgcggcgcauccggggcggggacggcaagaugaaggaccugagcccccgcugguacuucuacuaccucggcaccgggccggaggccggccugcccuacggggccaacaaggacggcaucaucugggucgcgaccgagggcgcccugaacacccccaaggaccacaucgggacgcggaaccccgccaacaacgccgcgaucgugcuccagcugccgcagggcaccacccugcccaagggguucuacgccgagggcucccgcgggggcucccaggccagcucccggagcuccagccgcucccggaacagcucccgcaacagcacccccggcagcucccgggggacgagccccgcccgcauggccggcaacgggggcgacgcggcccucgcccugcugcuccuggaccggcugaaccagcucgaguccaagaugagcgggaagggccagcagcagcagggccagaccgugaccaagaaguccgccgccgaggcgagcaagaagccgcgccagaagcgcaccgccacgaaggccuacaacgucacccaggccuucgggcggcgcggccccgagcagacccaggggaacuucggcgaccaggagcugauccggcaggggaccgacuacaagcacuggccccagaucgcccaguucgcgcccuccgccagcgccuucuucggcaugucccgcaucggcauggaggugacgccgagcgggaccuggcugaccuacaccggcgccaucaagcucgacgacaaggaccccaacuucaaggaccaggugauccugcugaacaagcacaucgacgccuacaagacguucccgcccaccgagcccaagaaggacaagaagaagaaggcggacgagacccaggcccucccccagcggcagaagaagcagcagaccgucacgcugcugcccgccgccgaccucgacgacuucuccaagcagcugcagcagagcauguccagcgcggacuccacccagagcugaggacuagucccuguucccagagcccacuuuuuuuucuuuuuuugaaauaaaauagccugucuuucagaucucaaaggcucuuuucagagccaccaaaaaaaaaaaaaaaaaaaaaaaaaaaaaaaaaaaaaaaaaaaaaaaaaaaaaaaaaaaaaaaaaaaaaaaaaaaaaaaaaaaaaaaaaaaaaaaaaaaaa

SEQ ID NO: 19250 - RNA, 1532 nt, Artificial Sequence
  SARS-CoV-2__MT786836.1__nucleocapsid protein (N) mRNA gc
aggagagucccgcagucggcguccagcggcucugcuuguucgugugugugucguugcaggccuuauucaagcuuaccaugagcgacaacggcccccagaaccagcgcaacgccccgcggaucaccuucgggggccccuccgacagcaccggguccaaccagaacggcgagcgcagcggggcccgguccaagcagcgccggccccagggccugcccaacaacacggcgagcugguucaccgcccucacccagcacggcaaggaggaccugaaguucccgcgcgggcagggcgugcccaucaacaccaacuccagccccgacgaccagaucggguacuaccggcgcgccacgcggcgcauccggggcggggacggcaagaugaaggaccugagcccccgcugguacuucuacuaccucggcaccgggccggaggccggccugcccuacggggccaacaaggacggcaucaucugggucgcgaccgagggcgcccugaacacccccaaggaccacaucgggacgcggaaccccgccaacaacgccgcgaucgugcuccagcugccgcagggcaccacccugcccaagggguucuacgccgagggcucccgcgggggcucccaggccagcucccggagcuccagccgcucccggaacagcuccaagaacagcacccccggcagcucccgcgggacgagccccgcccggauggccggcaacgggggcgacgcggcccucgcccugcugcuccuggaccgccugaaccagcucgaguccaagaugagcgggaagggccagcagcagcagggccagaccgugaccaagaaguccgccgccgaggcgagcaagaagccgcggcagaagcgcaccgccacgaaggccuacaacgucacccaggccuucgggcgccggggccccgagcagacccaggggaacuucggcgaccaggagcugauccgccaggggaccgacuacaagcacuggccccagaucgcccaguucgcgcccuccgccagcgccuucuucggcaugucccggaucggcauggaggugacgccgagcgggaccuggcugaccuacaccggcgccaucaagcucgacgacaaggaccccaacuucaaggaccaggugauccugcugaacaagcacaucgacgccuacaagacguucccgcccaccgagcccaagaaggacaagaagaagaaggcggacgagacccaggcccucccccagcgccagaagaagcagcagaccgucacgcugcugcccgccgccgaccucgacgacuucuccaagcagcugcagcagagcauguccagcgcggacuccacccaggccugaggacuagucccuguucccagagcccacuuuuuuuucuuuuuuugaaauaaaauagccugucuuucagaucucaaaggcucuuuucagagccaccaaaaaaaaaaaaaaaaaaaaaaaaaaaaaaaaaaaaaaaaaaaaaaaaaaaaaaaaaaaaaaaaaaaaaaaaaaaaaaaaaaaaaaaaaaaaaaaaaaaaa

SEQ ID NO: 19251 - RNA, 1532 nt, Artificial Sequence
  SARS-CoV-2__MT786839.1__nucleocapsid protein (N) mRNA gc
aggagagucccgcagucggcguccagcggcucugcuuguucgugugugugucguugcaggccuuauucaagcuuaccaugagcgacaacggcccccagaaccagcgcaacgccccgcggaucaccuucgggggccccuccgacagcaccggguccaaccagaacggcgagcgcagcggggcccgguccaagcagcgccggccccagggccugcccaacaacacggcgagcugguucaccgcccucacccagcacggcaaggaggaccugaaguucccgcgcgggcagggcgugcccaucaacaccaacuccagccccgacgaccagaucggguacuaccggcgcgccacgcggcgcauccggggcggggacggcaagaugaaggaccugagcccccgcugguacuucuacuaccucggcaccgggccggaggccggccugcccuacggggccaacaaggacggcaucaucugggucgcgaccgagggcgcccugaacacccccaaggaccacaucgggacgcggaaccccgccaacaacgccgcgaucgugcuccagcugccgcagggcaccacccugcccaagggguucuacgccgagggcucccgcgggggcucccaggccagcucccggagcuccagccgcucccggaacagcucccgcaacagcacccccggcagcucccgggggaucagccccggccgcauggccgggaacggcggggacgccgcgcucgcccugcugcuccuggaccggcugaaccagcucgaguccaagaugagcggcaagggccagcagcagcaggggcagacggugaccaagaaguccgccgccgaggccagcaagaagccgcgccagaagcgcaccgcgaccaaggccuacaacgucacgcaggccuucggccggcgcgggcccgagcagacccagggcaacuucggggaccaggagcugauccggcagggcaccgacuacaagcacuggccccagaucgcccaguucgcccccuccgcgagcgccuucuucggcaugucccgcaucgggauggaggugaccccgagcggcacguggcugaccuacaccggggccaucaagcucgacgacaaggaccccaacuucaaggaccaggugauccugcugaacaagcacaucgacgccuacaagaccuucccgcccacggagcccaagaaggacaagaagaagaaggccgacgagacccaggcgcucccccagcggcagaagaagcagcagaccgucacccugcugcccgccgccgaccucgacgacuucuccaagcagcugcagcagagcauguccagcgccgacuccacgcaggcgugaggacuagucccuguucccagagcccacuuuuuuuucuuuuuuugaaauaaaauagccugucuuucagaucucaaaggcucuuuucagagccaccaaaaaaaaaaaaaaaaaaaaaaaaaaaaaaaaaaaaaaaaaaaaaaaaaaaaaaaaaaaaaaaaaaaaaaaaaaaaaaaaaaaaaaaaaaaaaaaaaaaaa

SEQ ID NO: 19252 - RNA, 1532 nt, Artificial Sequence
  SARS-CoV-2__MT787500.1__nucleocapsid protein (N) mRNA gc
aggagagucccgcagucggcguccagcggcucugcuuguucgugugugugucguugcaggccuuauucaagcuuaccaugagcgacaacggcccccagaaccagcgcaacgccccgcggaucaccuucgggggccccuccgacagcaccggguccaaccagaacggcgagcgcagcggggcccgguccaagcagcgccggccccagggccugcccaacaacacggcgagcugguucaccgcccucacccagcacggcaaggaggaccugaaguucccgcgcgggcagggcgugcccaucaacaccaacuccagccccgacgaccagaucggguacuaccggcgcgccacgcggcgcauccggggcggggacggcaagaugaaggaccugagcccccgcugguacuucuacuaccucggcaccgggccggaggccggccugcccuacggggccaacaaggacggcaucaucugggucgcgaccgagggcgcccugaacacccccaaggaccacaucgggacgcggaaccccgccaacaacgccgcgaucgugcuccagcugccgcagggcaccacccugcccaagggguucuacgccgagggcucccgcgggggcucccaggccagcucccggagcuccagccgcucccggaacagcuccaucaacagcacccccggcagcucccgcgggacgagccccgcccggauggccggcaacgggggcgacgcggcccucgcccugcugcuccuggaccgccugaaccagcucgaguccaagaugagcgggaagggccagcagcagcagggccagaccgugaccaagaaguccgccgccgaggcgagcaagaagccgcggcagaagcgcaccgccacgaaggccuacaacgucacccaggccuucgggcgccggggccccgagcagacccaggggaacuucggcgaccaggagcugauccgccaggggaccgacuacaagcacuggccccagaucgcccaguucgcgcccuccgccagcgccuucuucggcaugucccggaucggcauggaggugacgccgagcgggaccuggcugaccuacaccggcgccaucaagcucgacgacaaggaccccaacuucaaggaccaggugauccugcugaacaagcacaucgacgccuacaagacguucccgcccaccgagcccaagaaggacaagaagaagaaggcggacgagacccaggcccucccccagcgccagaagaagcagcagaccgucacgcugcugcccgccgccgaccucgacgacuucuccaagcagcugcagcagagcauguccagcgcggacuccacccaggccugaggacuagucccuguucccagagcccacuuuuuuuucuuuuuuugaaauaaaauagccugucuuucagaucucaaaggcucuuuucagagccaccaaaaaaaaaaaaaaaaaaaaaaaaaaaaaaaaaaaaaaaaaaaaaaaaaaaaaaaaaaaaaaaaaaaaaaaaaaaaaaaaaaaaaaaaaaaaaaaaaaaaa

SEQ ID NO: 19253 - RNA, 1532 nt, Artificial Sequence
  SARS-CoV-2__MT787564.1__nucleocapsid protein (N) mRNA gc
aggagagucccgcagucggcguccagcggcucugcuuguucgugugugugucguugcaggccuuauucaagcuuaccaugagcgacaacggcccccagaaccagcgcaacgccccgcggaucaccuucgggggccccuccgacagcaccggguccaaccagaacggcgagcgcagcggggcccgguccaagcagcgccggccccagggccugcccaacaacacggcgagcugguucaccgcccucacccagcacggcaaggaggaccugaaguucccgcgcgggcagggcgugcccaucaacaccaacuccagccccgacgaccagaucggguacuaccggcgcgccacgcggcgcauccggggcggggacggcaagaugaaggaccugagcccccgcugguacuucuacuaccucggcaccgggccggaggccggccugcccuacggggccaacaaggacggcaucaucugggucgcgaccgagggcgcccugaacacccccaaggaccacaucgggacgcggaaccccgccaacaacgccgcgaucgugcuccagcugccgcagggcaccacccugcccaagggguucuacgccgagggcucccgcgggggcucccaggccagcucccggagcuccagccgcucccggaacagcucccgcaacagcacccccggcagcuccaagcggacgagccccgcccgcauggccgggaacggcggggacgcggcccucgcccugcugcuccuggaccggcugaaccagcucgaguccaagaugagcggcaaggggcagcagcagcagggccagaccgugaccaagaaguccgccgccgaggcgagcaagaagccgcgccagaagcgcaccgccacgaaggccuacaacgucacccaggccuucggccggcgcgggcccgagcagacccagggcaacuucggggaccaggagcugauccggcagggcaccgacuacaaguacuggccccagaucgcccaguucgcgcccuccgccagcgccuucuucgggaugucccgcaucggcauggaggugacgccgagcggcaccuggcugaccuacaccggggccaucaagcucgacgacaaggaccccaacuucaaggaccaggugauccugcugaacaagcacaucgacgccuacaagacguucccgcccaccgagcccaagaaggacaagaagaagaaggcggacgagacccaggcccucccccagcggcagaagaagcagcagaccgucacgcugcugcccgccgccgaccucgacgacuucuccaagcagcugcagcagagcauguccagcgcggacuccacccaggccugaggacuagucccuguucccagagcccacuuuuuuuucuuuuuuugaaauaaaauagccugucuuucagaucucaaaggcucuuuucagagccaccaaaaaaaaaaaaaaaaaaaaaaaaaaaaaaaaaaaaaaaaaaaaaaaaaaaaaaaaaaaaaaaaaaaaaaaaaaaaaaaaaaaaaaaaaaaaaaaaaaaaa

SEQ ID NO: 19254 - RNA, 1532 nt, Artificial Sequence
  SARS-CoV-2__MT789690.1__nucleocapsid protein (N) mRNA gc
aggagagucccgcagucggcguccagcggcucugcuuguucgugugugugucguugcaggccuuauucaagcuuaccaugagcgacaacggcccccagaaccagcgcaacgccccgcggaucaccuucgggggccccuccgacagcaccggguccaaccagaacggcgagcgcagcggggcccgguccaagcagcgccggccccagggccugcccaacaacacggcgagcugguucaccgcccucacccagcacggcaaggaggaccugaaguucccgcgcgggcagggcgugcccaucaacaccaacuccagccccgacgaccagaucggguacuaccggcgcgccacgcggcgcauccggggcggggacggcaagaugaaggaccugagcccccgcugguacuucuacuaccucggcaccgggccggaggccggccugcccuacggggccaacaaggacggcaucaucugggucgcgaccgagggcgccuucaacacccccaaggaccacaucgggacgcggaaccccgccaacaacgccgcgaucgugcugcagcucccgcagggcaccacccugcccaagggguucuacgccgagggcagccgcgggggcucccaggccagcucccggagcuccagccgcucccggaacagccugcgcaacuccacccccggcagcagccgggggacgucccccgcccgcauggccggcaacgggggcgacgcggcccucgcccugcugcuccuggaccggcugaaccagcucgagagcaagauguccgggaagggccagcagcagcagggccagaccgugaccaagaaguccgccgccgaggcguccaagaagccgcgccagaagcgcaccgccacgaaggccuacaacgucacccaggccuucgggcggcgcggccccgagcagacccaggggaacuucggcgaccaggagcugauccggcaggggaccgacuacaagcacuggccccagaucgcccaguucgcgcccagcgccuccgccuucuucggcaugagccgcaucggcauggaggugacgccguccgggaccuggcugaccuacaccggcgccaucaagcucgacgacaaggaccccaacuucaaggaccaggugauccugcugaacaagcacaucgacgccuacaagacguucccgcccaccgagcccaagaaggacaagaagaagaaggcggacgagacccaggcccucccccagcggcagaagaagcagcagaccgucacgcugcugcccgccgccgaccucgacgacuucagcaagcagcugcagcaguccaugagcuccgcggacagcacccaggccugaggacuagucccuguucccagagcccacuuuuuuuucuuuuuuugaaauaaaauagccugucuuucagaucucaaaggcucuuuucagagccaccaaaaaaaaaaaaaaaaaaaaaaaaaaaaaaaaaaaaaaaaaaaaaaaaaaaaaaaaaaaaaaaaaaaaaaaaaaaaaaaaaaaaaaaaaaaaaaaaaaaaa

SEQ ID NO: 19255 - RNA, 1532 nt, Artificial Sequence
  SARS-CoV-2__MT775831.1__nucleocapsid protein (N) mRNA gc
aggagagucccgcagucggcguccagcggcucugcuuguucgugugugugucguugcaggccuuauucaagcuuaccaugagcgacaacggcccccagaaccagcgcaacgccccgcggaucaccuucgggggccccuccgacagcaccggguccaaccagaacggcgagcgcagcggggcccgguccaagcagcgccggccccagggccugcccaacaacacggcgagcugguucaccgcccucacccagcacggcaaggaggaccugaaguucccgcgcgggcagggcgugcccaucaacaccaacuccagccccgacgaccagaucggguacuaccggcgcgccacgcggcgcauccggggcggggacggcaagaugaaggaccugagcccccgcugguacuucuacuaccucggcaccgggccggaggccggccugcccuacggggccaacaaggacggcaucaucugggucgcgaccgagggcgcccugaacacccccaaggaccacaucgggacgcggaaccccgccaacaacgccgcgaucgugcuccagcugccgcagggcaccacccugcccaagggguucuacgccgagggcagccgcgggggcucccaggccagcucccggagcuccagccgcucccggaacagcucccgcaacagcacccccggcaacagcaagcggacgucccccgcccgcauggccgggaacggcggggacgcggcccucgcccugcugcuccuggaccggcugaaccagcucgagagcaagauguccggcaaggggcagcagcagcagggccagaccgugaccaagaaguccgccgccgaggcguccaagaagccgcgccagaagcgcaccgccacgaaggccuacaacgucacccaggccuucggccggcgcgggcccgagcagacccagggcaacuucggggaccaggagcugauccggcagggcaccgacuacaagcacuggccccagaucgcccaguucgcgcccagcgccuccgccuucuucgggaugagccgcaucggcauggaggugacgccguccggcaccuggcugaccuacaccggggccaucaagcucgacgacaaggaccccaacuucaaggaccaggugauccugcugaacaagcacaucgacgccuacaagacguucccgcccaccgagcccaagaaggacaagaagaagaaggcggacgagacccaggcccucccccagcggcagaagaagcagcagaccgucacgcugcugcccgccgccgaccucgacgacuucagcaagcagcugcagcaguccaugagcuccgcggacagcacccaggccugaggacuagucccuguucccagagcccacuuuuuuuucuuuuuuugaaauaaaauagccugucuuucagaucucaaaggcucuuuucagagccaccaaaaaaaaaaaaaaaaaaaaaaaaaaaaaaaaaaaaaaaaaaaaaaaaaaaaaaaaaaaaaaaaaaaaaaaaaaaaaaaaaaaaaaaaaaaaaaaaaaaaa

SEQ ID NO: 19256 - RNA, 1532 nt, Artificial Sequence
  SARS-CoV-2__MT772427.1__nucleocapsid protein (N) mRNA gc
aggagagucccgcagucggcguccagcggcucugcuuguucgugugugugucguugcaggccuuauucaagcuuaccaugagcgacaacggcccccagaaccagcgcaacgccccgcggaucaccuucgggggccccuccgacagcaccggguccaaccagaacggcgagcgcagcggggcccgguccaagcagcgccggccccagggccugcccaacaacacggcgagcugguucaccgcccucacccagcacggcaaggaggaccugaaguucccgcgcgggcagggcgugcccaucaacaccaacuccagccccgacgaccagaucggguacuaccggcgcgccacgcggcgcauccggggcggggacggcaagaugaaggaccugagcccccgcugguacuucuacuaccucggcaccgggccggaggccggccugcccuacggggccaacaaggacggcaucaucugggucgcgaccgagggcgcccugaacacccccaaggaccacaucgggacgcggaaccccgccaacaacgccgcgaucgugcuccagcugccgcagggcaccacccugcccaagggguucuacgccgagggcucccgcgggggcucccaggccagcucccggagcuccagccgcucccggaacagcucccgcaacagcacccccggcagcuccauggggacgagccccgcccggauggccggcaacgggggcgacgcggcccucgcccugcugcuccuggaccgccugaaccagcucgaguccaagaugagcgggaagggccagcagcagcagggccagaccgugaccaagaaguccgccgccgaggcgagcaagaagccgcggcagaagcgcaccgccacgaaggccuacaacgucacccaggccuucgggcgccggggccccgagcagacccaggggaacuucggcgaccaggagcugauccgccaggggaccgacuacaagcacuggccccagaucgcccaguucgcgcccuccgccagcgccuucuucggcaugucccggaucggcauggaggugacgccgagcgggaccuggcugaccuacaccggcgccaucaagcucgacgacaaggaccccaacuucaaggaccaggugauccugcugaacaagcacaucgacgccuacaagacguucccgcccaccgagcccaagaaggacaagaagaagaaggcggacgccacccaggcccucccccagcgccagaagaagcagcagaccgucacgcugcugcccgccgcggaccucgacgacuucuccaagcagcugcagcagagcauguccagcgccgacuccacccaggccugaggacuagucccuguucccagagcccacuuuuuuuucuuuuuuugaaauaaaauagccugucuuucagaucucaaaggcucuuuucagagccaccaaaaaaaaaaaaaaaaaaaaaaaaaaaaaaaaaaaaaaaaaaaaaaaaaaaaaaaaaaaaaaaaaaaaaaaaaaaaaaaaaaaaaaaaaaaaaaaaaaaaa

SEQ ID NO: 19257 - RNA, 1532 nt, Artificial Sequence
  SARS-CoV-2__MT772433.1__nucleocapsid protein (N) mRNA gc
aggagagucccgcagucggcguccagcggcucugcuuguucgugugugugucguugcaggccuuauucaagcuuaccaugagcgacaacggcccccagaaccagcgcaacgccccgcggaucaccuucgggggccccuccgacagcaccggguccaaccagaacguggagcgcagcggcgcccgguccaagcagcgccggccccaggggcugcccaacaacacggcgagcugguucaccgcccucacccagcacggcaaggaggaccugaaguucccgcgcggccaggggguccccaucaacaccaacuccagccccgacgaccagaucggcuacuaccggcgcgccacgcggcgcauccgcgggggcgacgggaagaugaaggaccugagcccccggugguacuucuacuaccucggcaccggcccggaggccgggcugcccuacggcgccaacaaggacgggaucaucuggguggcgaccgagggcgcccugaacacccccaaggaccacaucggcacgcggaaccccgccaacaacgccgcgaucgugcuccagcugccgcaggggaccacccugcccaagggcuucuacgccgaggggucccgcggcgggucccaggccagcucccggagcuccagccgcucccggaacagcucccgcaacagcacccccggcagcucccggggcacgagccccgcccgcauggccgggaacggcggggacgcggcccucgcccugcugcuccuggaccggcugaaccagcucgaguccaagaugagcggcaaggggcagcagcagcagggccagaccgucaccaagaaguccgccgccgaggcgagcaagaagccgcgccagaagcgcaccgccacgaaggccuacaacgugacccaggccuucggccggcgcgggcccgagcagacccagggcaacuucggggaccaggagcugauccggcagggcaccgacuacaagcacuggccccagaucgcccaguucgcgcccuccgccagcgccuucuucgggaugucccgcaucggcauggaggugacgccgagcggcaccuggcugaccuacaccggggccaucaagcucgacgacaaggaccccaacuucaaggaccaggucauccugcugaacaagcacaucgacgccuacaagacguucccgcccaccgagcccaagaaggacaagaagaagaaggcggacgagacccaggcccucccccagcggcagaagaagcagcagaccgugacgcugcugcccgccgccgaccucgacgacuucuccaagcagcugcagcagagcauguccagcgcggacuccacccaggccugaggacuagucccuguucccagagcccacuuuuuuuucuuuuuuugaaauaaaauagccugucuuucagaucucaaaggcucuuuucagagccaccaaaaaaaaaaaaaaaaaaaaaaaaaaaaaaaaaaaaaaaaaaaaaaaaaaaaaaaaaaaaaaaaaaaaaaaaaaaaaaaaaaaaaaaaaaaaaaaaaaaaa

SEQ ID NO: 19258 - RNA, 1532 nt, Artificial Sequence
  SARS-CoV-2__MT766907.1__nucleocapsid protein (N) mRNA gc
aggagagucccgcagucggcguccagcggcucugcuuguucgugugugugucguugcaggccuuauucaagcuuaccaugagcgacaacggcccccagaaccagcgcaacgccccgcggaucaccuucgggggccccuccgacagcaccggguccaaccagaacggcgagcgcagcggggcccgguccaagcagcgccggccccagggccugcccaacaacacggcgagcugguucaccgcccucacccagcacggcaaggaggaccugaaguucccgcgcgggcagggcgugcccaucaacaccaacuccagccccgacgaccagaucggguacuaccggcgcgccacgcggcgcauccggggcggggacggcaagaugaaggaccugagcccccgcugguacuucuacuaccucggcaccgggccggaggccggccugcccuacggggccaacaaggacggcaucaucugggucgcgaccgagggcgcccugaacacccccaaggaccacaucgggacgcggaaccccgccaacaacgccgcgaucgugcuccagcugccgcagggcaccacccugcccaagggguucuacgccgagggcagccgcgggggcucccaggccagcucccggagcuccagccgcucccggaacagcucccgcaacagcacccccggcgggagccggggcacgucccccgcccgcauggccgggaacggcggggacgcggcccucgcccugcugcuccuggaccggcugaaccagcucgagagcaagauguccggcaagggccagcagcagcaggggcagaccgugaccaagaaguccgccgccgaggcguccaagaagccgcgccagaagcgcaccgccacgaaggccuacaacgucacccaggccuucggccggcgcgggcccgagcagacccagggcaacuucggggaccaggagcugauccggcagggcaccgacuacaagcacuggccccagaucgcccaguucgcgcccagcgccuccgccuucuucggcaugagccgcaucgggauggaggugacgccguccggcaccuggcugaccuacaccggggccaucaagcucgacgacaaggaccccaacuucaaggaccaggugauccugcugaacaagcacaucgacgccuacaagacguucccgcccaccgagcccaagaaggacaagaagaagaaggcggacgagacccaggcccucccccagcggcagaagaagcagcagaccgucacgcugcugcccgccgccgaccucgacgacuucagcaagcagcugcagcaguccaugagcuccgcggacagcacccaggccugaggacuagucccuguucccagagcccacuuuuuuuucuuuuuuugaaauaaaauagccugucuuucagaucucaaaggcucuuuucagagccaccaaaaaaaaaaaaaaaaaaaaaaaaaaaaaaaaaaaaaaaaaaaaaaaaaaaaaaaaaaaaaaaaaaaaaaaaaaaaaaaaaaaaaaaaaaaaaaaaaaaaa

SEQ ID NO: 19259 - RNA, 1532 nt, Artificial Sequence
  SARS-CoV-2__MT772085.1__nucleocapsid protein (N) mRNA gc
aggagagucccgcagucggcguccagcggcucugcuuguucgugugugugucguugcaggccuuauucaagcuuaccaugagcgacaacggcccccagaaccagcgcaacgccccgcggaucaccuucgggggccccuccgacagcaccggguccaaccagaacggcgagcgcagcggggcccgguccaagcagcgccggccccagggccugcccaacaacacggcgagcugguucaccgcccucacccagcacggcaaggaggaccugaaguucccgcgcgggcagggcgugcccaucaacaccaacuccagccccgacgaccagaucggguacuaccggcgcgccacgcggcgcauccggggcggggacggcaagaugaaggaccugagcccccgcugguacuucuacuaccucggcaccgggccggaggccggccugcuguacggggccaacaaggacggcaucaucugggucgcgaccgagggcgcccucaacacccccaaggaccacaucgggacgcggaaccccgccaacaacgccgcgaucgugcugcagcugccccagggcaccacccucccgaagggguucuacgccgagggcucccgcgggggcucccaggccagcucccggagcuccagccgcucccggaacagcucccgcaacagcacccccggcagcucccgggggacgagccccgcccgcauggccggcaacgggggcgacgcggcccuggcccugcuccugcuggaccggcucaaccagcuggaguccaagaugagcgggaagggccagcagcagcagggccagaccgugaccaagaaguccgccgccgaggcgagcaagaagccccgccagaagcgcaccgccacgaaggccuacaacgucacccaggccuucgggcggcgcggcccggagcagacccaggggaacuucggcgaccaggagcugauccggcaggggaccgacuacaagcacuggccccagaucgcccaguucgcgcccuccgccagcgccuucuucggcaugucccgcaucggcauggaggugacgcccagcgggaccuggcucaccuacaccggcgccaucaagcuggacgacaaggacccgaacuucaaggaccaggugauccugcucaacaagcacaucgacgccuacaagacguucccgcccaccgagcccaagaaggacaagaagaagaaggcggacgagacccaggcccugccccagcggcagaagaagcagcagaccgucacgcugcuccccgccgccgaccuggacgacuucuccaagcagcugcagcagagcauguccagcgcggacuccacccaggccugaggacuagucccuguucccagagcccacuuuuuuuucuuuuuuugaaauaaaauagccugucuuucagaucucaaaggcucuuuucagagccaccaaaaaaaaaaaaaaaaaaaaaaaaaaaaaaaaaaaaaaaaaaaaaaaaaaaaaaaaaaaaaaaaaaaaaaaaaaaaaaaaaaaaaaaaaaaaaaaaaaaaa

SEQ ID NO: 19260 - RNA, 1532 nt, Artificial Sequence
  SARS-CoV-2__MT758213.1__nucleocapsid protein (N) mRNA gc
aggagagucccgcagucggcguccagcggcucugcuuguucgugugugugucguugcaggccuuauucaagcuuaccaugagcgacaacggcccccagaaccagcgcaacgccccgcggaucaccuucgggggccccuccgacagcaccggguccaaccagaacggcgagcgcagcggggcccgguccaagcagcgccggccccagggccugcccaacaacacggcgagcugguucaccgcccucacccagcacggcaaggaggaccugaaguucccgcgcgggcagggcgugcccaucaacaccaacuccagccccgacgaccagaucggguacuaccggcgcgccacgcggcgcauccggggcuccgacgggaagaugaaggaccugagcccccgcugguacuucuacuaccucggcaccggcccggaggccgggcugcccuacggcgccaacaaggacgggaucaucugggucgcgaccgagggcgcccugaacacccccaaggaccacaucggcacgcggaaccccgccaacaacgccgcgaucgugcuccagcugccgcaggggaccacccugcccaagggcuucuacgccgaggggucccgcggcgggagccaggccuccagccgguccagcucccgcagccggaacucccuccgcaacagcacccccggcagcucccggggcacgagccccgcccgcauggccgggaacggcggggacgcggcccuggcccugcuccugcuggaccggcucaaccagcuggaguccaagaugagcggcaaggggcagcagcagcagggccagaccgugaccaagaaguccgccgccgaggcgagcaagaagccgcgccagaagcgcaccgccacgaaggccuacaacgucacccaggccuucggccggcgcgggcccgagcagacccagggcaacuucggggaccaggagcugauccggcagggcaccgacuacaagcacuggccccagaucgcccaguucgcgcccuccgccagcgccuucuucgggaugucccgcaucggcauggaggugacgccgagcggcaccuggcucaccuacaccggggccaucaagcuggacgacaaggaccccaacuucaaggaccaggugauccugcucaacaagcacaucgacgccuacaagacguucccgcccaccgagcccaagaaggacaagaagaagaaggcggacgagacccaggcccugccccagcggcagaagaagcagcagaccgucacgcugcuccccgccgccgaccuggacgacuucuccaagcagcugcagcagagcauguccagcgcggacuccacccaggccugaggacuagucccuguucccagagcccacuuuuuuuucuuuuuuugaaauaaaauagccugucuuucagaucucaaaggcucuuuucagagccaccaaaaaaaaaaaaaaaaaaaaaaaaaaaaaaaaaaaaaaaaaaaaaaaaaaaaaaaaaaaaaaaaaaaaaaaaaaaaaaaaaaaaaaaaaaaaaaaaaaaaa

SEQ ID NO: 19261 - RNA, 1532 nt, Artificial Sequence
  SARS-CoV-2__MT758471.1__nucleocapsid protein (N) mRNA gc
aggagagucccgcagucggcguccagcggcucugcuuguucgugugugugucguugcaggccuuauucaagcuuaccaugagcgacaacggcccccagaaccagcgcaacgccccgcggaucaccuucgggggccccuccgacagcaccggguccaaccagaacggcgagcgcagcggggcccgguccaagcagcgccggccccagggccugcccaacaacacggcgagcugguucaccgcccucacccagcacggcaaggaggaccugaaguucccgcgcgggcagggcgugcccaucaacaccaacuccagccccgacgaccagaucggguacuaccggcgcgccacgcggcgcauccggggcggggacggcaagaugaaggaccugagcccccgcugguacuucuacuaccucggcaccgggccggaggccggccugcccuacggggccaacaaggacggcaucaucugggucgcgaccgagggcgcccugaacacccccaaggaccacaucgggacgcggaaccccgccaacaacgccgcgaucgugcuccagcugccgcagggcaccacccugcccaagggguucuacgccgagggcucccgcgggggcucccaggccagcucccggagcuccagccgcucccggaacagccuccgcaacuccacccccggcagcaaccgggggacgagccccgcccgcauggccggcaacgggggcgacgcggcccuggcccugcuccugcuggaccggcucaaccagcuggaguccaagaugagcgggaagggccagcagcagcagggccagaccgugaccaagaaguccgccgccgaggcgagcaagaagccgcgccagaagcgcaccgccacgaaggccuacaacgucacccaggccuucgggcggcgcggccccgagcagacccaggggaacuucggcgaccaggagcugauccggcaggggaccgacuacaagcacuggccccagaucgcccaguucgcgcccuccgccagcgccuucuucggcaugucccgcaucggcauggaggugacgccgagcgggaccuggcucaccuacaccggcgccaucaagcuggacgacaaggaccccaacuucaaggaccaggugauccugcucaacaagcacaucgacgccuacaagacguucccgcccaccgagcccaagaaggacaagaagaagaaggcggacgagacccaggcccugccccagcggcagaagaagcagcagaccgucacgcugcuccccgccgccgaccuggacgacuucuccaagcagcugcagcagagcauguccagcgcggacuccacccaggccugaggacuagucccuguucccagagcccacuuuuuuuucuuuuuuugaaauaaaauagccugucuuucagaucucaaaggcucuuuucagagccaccaaaaaaaaaaaaaaaaaaaaaaaaaaaaaaaaaaaaaaaaaaaaaaaaaaaaaaaaaaaaaaaaaaaaaaaaaaaaaaaaaaaaaaaaaaaaaaaaaaaaa

SEQ ID NO: 19262 - RNA, 1532 nt, Artificial Sequence
  SARS-CoV-2__MT759844.1__nucleocapsid protein (N) mRNA gc
aggagagucccgcagucggcguccagcggcucugcuuguucgugugugugucguugcaggccuuauucaagcuuaccaugagcgacaacggcccccagaaccagcgcaacgccccgcggaucaccuucgggggccccuccgacagcaccggguccaaccagaacggccagcgcagcggggcccgguccaagcagcgccggccccagggccugcccaacaacacggcgagcugguucaccgcccucacccagcacggcaaggaggaccugaaguucccgcgcgggcagggcgugcccaucaacaccaacuccagccccgacgaccagaucggguacuaccggcgcgccacgcggcgcauccggggcggggacggcaagaugaaggaccugagcccccgcugguacuucuacuaccucggcaccgggccggaggccggccugcccuacggggccaacaaggacggcaucaucugggucgcgaccgagggcgcccugaacacccccaaggaccacaucgggacgcggaaccccgccaacaacgccgcgaucgugcuccagcugccgcagggcaccacccugcccaagggguucuacgccgagggcucccgcgggggcucccaggccagcucccggagcuccagccgcucccggaacagcucccgcaacagcacccccggcagcucccgggggacgagccccgcccgcauggccggcaacgggggcgacgcggcccucgcccugcugcuccuggaccggcugaaccagcucgaguccaagaugagcgggaagggccagcagcagcagggccagaccgugaccaagaaguccgccgccgaggcgagcaagaagccgcgccagaagcgcaccgccacgaaggccuacaacgucacccaggccuucgggcggcgcggccccgagcagacccaggggaacuucggcgaccaggagcugauccggcaggggaccgacuacaagcacuggccccagaucgcccaguucgcgcccuccgccagcgccuucuucggcaugucccgcaucggcauggaggugacgccgagcgggaccuggcugaccuacaccggcgccaucaagcucgacgacaaggaccccaacuucaaggaccaggugauccugcugaacaagcacaucgacgccuacaagacguucccgcccaccgagcccaagaaggacaagaagaagaaggcggacgagacccaggcccucccccagcggcagaagaagcagcagaccgucacgcugcugcccgccgccgaccucgacgacuucuccaagcagcugcagcagagcauguccagcgcggacuccacccaggccugaggacuagucccuguucccagagcccacuuuuuuuucuuuuuuugaaauaaaauagccugucuuucagaucucaaaggcucuuuucagagccaccaaaaaaaaaaaaaaaaaaaaaaaaaaaaaaaaaaaaaaaaaaaaaaaaaaaaaaaaaaaaaaaaaaaaaaaaaaaaaaaaaaaaaaaaaaaaaaaaaaaaa

SEQ ID NO: 19263 - RNA, 1532 nt, Artificial Sequence
  SARS-CoV-2__MT764180.1__nucleocapsid protein (N) mRNA gc
aggagagucccgcagucggcguccagcggcucugcuuguucgugugugugucguugcaggccuuauucaagcuuaccaugagcgacaacggcccccagaaccagcgcaacgccccgcggaucaccuucgggggccccuccgacagcaccggguccaaccagaacggcgagcgcagcggggcccgguccaagcagcgccggccccagggccugcccaacaacacggcgagcugguucaccgcccucacccagcacggcaaggaggaccugaaguucccgcgcgggcagggcgugcccaucaacaccaacuccagccccgacgaccagaucggguacuaccggcgcgccacgcggcgcauccggggcggggacggcaagaugaaggaccugagcccccgcugguacuucuacuaccucggcaccgggccggaggccggccugcccuacggggccaacaaggacggcaucaucugggucgcgaccgagggcgcccugaacacccccaaggaccacaucgggacgcggaaccccgccaacaacgccgcgaucgugcuccagcugccgcagggcaccacccugcccaagggguucuacgccgagggcagccgcgggggcucccaggccagcucccggagcuccagccgcggccggaacuccagccgcaacuccacccccgggagcagccggggcacgucccccgcccgcauggccgggaacggcggggacgcggcccucgcccugcugcuccuggaccggcugaaccagcucgagagcaagauguccggcaagggccagcagcagcaggggcagaccgugaccaagaaguccgccgccgaggcguccaagaagccgcgccagaagcgcaccgccacgaaggccuacaacgucacccaggccuucggccggcgcgggcccgagcagacccagggcaacuucggggaccaggagcugauccggcagggcaccgacuacaagcacuggccccagaucgcccaguucgcgcccagcgccuccgccuucuucggcaugagccgcaucgggauggaggugacgccguccggcaccuggcugaccuacaccggggccaucaagcucgacgacaaggaccccaacuucaaggaccaggugauccugcugaacaagcacaucgacgccuacaagacguucccgcccaccgagcccaagaaggacaagaagaagaaggcggacgagacccaggcccucccccagcggcagaagaagcagcagaccgucacgcugcugcccgccgccgaccucgacgacuucagcaagcagcugcagcaguccaugagcuccgcggacagcacccaggccugaggacuagucccuguucccagagcccacuuuuuuuucuuuuuuugaaauaaaauagccugucuuucagaucucaaaggcucuuuucagagccaccaaaaaaaaaaaaaaaaaaaaaaaaaaaaaaaaaaaaaaaaaaaaaaaaaaaaaaaaaaaaaaaaaaaaaaaaaaaaaaaaaaaaaaaaaaaaaaaaaaaaa

SEQ ID NO: 19264 - RNA, 1532 nt, Artificial Sequence
  SARS-CoV-2__MT755891.1__nucleocapsid protein (N) mRNA gc
aggagagucccgcagucggcguccagcggcucugcuuguucgugugugugucguugcaggccuuauucaagcuuaccaugagcgacaacggcccccagaaccagcgcaacgccccgcggaucaccuucgggggccccuccgacagcaccggguccaaccagaacggcgagcgcagcggggcccgguccaagcagcgccggccccagggccugcccaacaacacggcgagcugguucaccgcccucacccagcacggcaaggaggaccugaaguucccgcgcgggcagggcgugcccaucaacaccaacuccagccccgacgaccagaucggguacuaccggcgcgccacgcggcgcauccggggcggggacggcaagaugaaggaccugagcccccgcugguacuucuacuaccucggcaccgggccggaggccggccugcccuacggggccaacaaggacggcaucaucugggucgcgaccgagggcgcccugaacacccccaaggaccacaucgggacgcggaaccccgccaacaacgccgcgaucgugcuccagcugccgcagggcaccacccugcccaagggguucuacgccgagggcagccgcgggggcucccaggccagcucccggagcuccagccgcucccggaacagccuccgcaacuccacccccggcagcagccgggggacgucccccgcccgcauggccggcaacgggggcgacgcggcccuggcccugcuccugcuggaccggcucaaccagcuggagagcaagauguccgggaagggccagcagcagcagggccagaccgugaccaagaaguccgccgccgaggcguccaagaagccgcgccagaagcgcaccgccacgaaggccuacaacgucacccaggccuucgggcggcgcggccccgagcagacccaggggaacuucggcgaccaggagcugauccggcaggggaccgacuacaagcacuggccccagaucgcccaguucgcgcccagcgccuccgccuucuucggcaugagccgcaucggcauggaggugacgccguccgggaccuggcucaccuacaccggcgccaucaagcuggacgacaaggaccccaacuucaaggaccaggugauccugcucaacaagcacaucgacgccuacaagacguucccgcccaccgagcccaagaaggacaagaagaagaaggcggacgagacccaggcccugcugcagcggcagaagaagcagcagaccgucacgcuccugcccgccgccgaccuggacgacuucagcaagcagcuccagcaguccaugagcuccgcggacagcacccaggccugaggacuagucccuguucccagagcccacuuuuuuuucuuuuuuugaaauaaaauagccugucuuucagaucucaaaggcucuuuucagagccaccaaaaaaaaaaaaaaaaaaaaaaaaaaaaaaaaaaaaaaaaaaaaaaaaaaaaaaaaaaaaaaaaaaaaaaaaaaaaaaaaaaaaaaaaaaaaaaaaaaaaa

SEQ ID NO: 19265 - RNA, 1532 nt, Artificial Sequence
  SARS-CoV-2__MT757020.1__nucleocapsid protein (N) mRNA gc
aggagagucccgcagucggcguccagcggcucugcuuguucgugugugugucguugcaggccuuauucaagcuuaccaugagcgacaacggcccccagaaccagcgcaacgccccgcggaucaccuucgggggccccuccgacagcaccggguccaaccagaacggcgagcgcagcggggcccgguccaagcagcgccggccccagggccugcccaacaacacggcgagcugguucaccgcccucacccagcacggcaaggaggaccugaaguucccgcgcgggcagggcgugcccaucaacaccaacuccagccccgacgaccagaucggguacuaccggcgcgccacgcggcgcauccggggcggggacggcaagaugaaggaccugagcccccgcugguacuucuacuaccucggcaccgggccggaggccggccugcccuacggggccaacaaggacggcaucaucugggucgcgaccgagggcgcccugaacacccccaaggaccacaucgggacgcggaaccccgccaacaacgccgcgaucgugcuccagcugccgcagggcaccacccugcccaagggguucuacgccgagggcucccgcgggggcucccaggccagcucccggagcuccagccgcucccggaacagcucccgcaacagcacccccggcagcucccgggggacgagccccgcccgcauggccggcaacgggggcgacgcggcccucgcccugcugcuccuggaccggcugaaccagcucgaguccaagaugagcgggaagggccagcagcagcagggccagaccgugaccaagaaguccgccgccgaggcgagcaagaagccgcgccagaagcgcaccgccacgaaggccuacaacgucacccaggccuucgggcggcgcggccccgagcagacccaggggaacuucggcgaccaggagcugauccggcaggggaccgacuacaagcacuggccccagaucgcccaguucgcgcccuccgccagcgccuucuucggcaugucccgcaucggcauggaggugacgccgagcgggaccuggcugaccuacaccggcgccaucaagcucgacgacaaggaccccaacuucaaggaccaggugauccugcugaacaagcacaucgacgccuacaagacguucccgcccaccgagcccaagaaggacaagaagaagaaggcggacgagacccaggcccucccccaccggcagaagaagcagcagaccgucacgcugcugcccgccgccgaccucgacgacuucuccaagcagcugcagcagagcauguccagcgcggacuccacccaggccugaggacuagucccuguucccagagcccacuuuuuuuucuuuuuuugaaauaaaauagccugucuuucagaucucaaaggcucuuuucagagccaccaaaaaaaaaaaaaaaaaaaaaaaaaaaaaaaaaaaaaaaaaaaaaaaaaaaaaaaaaaaaaaaaaaaaaaaaaaaaaaaaaaaaaaaaaaaaaaaaaaaaa

SEQ ID NO: 19266 - RNA, 1532 nt, Artificial Sequence
  SARS-CoV-2__MT757085.1__nucleocapsid protein (N) mRNA gc
aggagagucccgcagucggcguccagcggcucugcuuguucgugugugugucguugcaggccuuauucaagcuuaccaugagcgacaacggcccccagaaccagcgcaacgccccgcggaucaccuucgggggccccuccgacagcaccggguccaaccagaacggcgagcgcagcggggcccgguccaagcagcgccggccccagggccugcccaacaacacggcgagcugguucaccgcccucacccagcacggcaaggaggaccugaaguucccgcgcgggcagggcgugcccaucaacaccaacuccagccccgacgaccagaucggguacuaccggcgcgccacgcggcgcauccggggcggggacggcaagaugaaggaccugagcccccgcugguacuucuacuaccucggcaccgggccggaggccggccugcccuacggggccaacaaggacggcaucaucugggucgcgaccgagggcgcccugaacacccccaaggaccacaucgggacgcggaaccccgccaacaacgccgcgaucgugcuccagcugccgcagggcaccacccugcccaagggguucuacgccgagggcucccgcgggggcucccaggccagcucccggagcuccagccgcucccggaacagcucccgcaacagcacccccggcagcucccgggggacgagccccgcccgcauggccggcaacgggggcgacgcggcccucgcccugcugcuccuggaccggcugaaccagcucgaguccaagaugagcgggaagggccagcagcagcagggccagaccgugaccaagaaguccgccgccgaggcgagcaagaagccgcgccagaagcgcaccgccacgaaggccuacaacgucacccaggccuucgggcggcgcggccccgagcagacccaggggaacuucggcgaccaggagcugauccggcaggggaccgacuacaagcacuggccccagaucgcccaguucgcgcccuccgccagcgccuucuucggcaugucccgcaucggcauggaggugacgccgagcgggaccuggcugaccuacaccggcgccaucaagcucgacgacaaggaccccaacuucaaggaccaggugauccugcugaacaagcacaucgacgccuacaagacguucccgcccaccgagcccaagaaggacaagaagaagaaggcggacgagacccaggcccucccccagcggcagaagaagcagcagaccgucacgcugcugcccgccgccgaccucgacgacuucuccaagcagcugcagcagagcauguccagcgcggaccugacccaggccugaggacuagucccuguucccagagcccacuuuuuuuucuuuuuuugaaauaaaauagccugucuuucagaucucaaaggcucuuuucagagccaccaaaaaaaaaaaaaaaaaaaaaaaaaaaaaaaaaaaaaaaaaaaaaaaaaaaaaaaaaaaaaaaaaaaaaaaaaaaaaaaaaaaaaaaaaaaaaaaaaaaaa

SEQ ID NO: 19267 - RNA, 1532 nt, Artificial Sequence
  SARS-CoV-2__MT757121.1__nucleocapsid protein (N) mRNA gc
aggagagucccgcagucggcguccagcggcucugcuuguucgugugugugucguugcaggccuuauucaagcuuaccaugagcgacaacggcccccagaaccagcgcaacgccccgcggaucaccuucgggggccccuccgacagcaccggguccaaccagaacggcgagcgcagcggggcccgguccaagcagcgccggccccagggccugcccaacaacacggcgagcugguucaccgcccucacccagcacggcaaggaggaccugaaguucccgcgcgggcagggcgugcccaucaacaccaacuccagccccgacgaccagaucggguacuaccggcgcgccacgcggcgcauccggggcggggacggcaagaugaaggaccugagcccccgcugguacuucuacuaccucggcaccgggccggaggccggccugcccuacggggccaacaaggacggcaucaucugggucgcgaccgagggcgcccugaacacccccaaggaccacaucgggacgcggaaccccgccaacaacgccgcgaucgugcuccagcugccgcagggcaccacccugcccaagggguucuacgccgagggcucccgcgggggcucccaggccagcucccggagcuccagccgcucccggaacagcucccgcaacagcacccccggcagcuccaagcggacgagccccgcccgcauggccgggaacggcggggacgcggcccucgcccugcugcuccuggaccggcugaaccagcucgaguccaagaugagcggcaaggggcagcagcagcagggccagaccgugaccaagaaguccgccgccgaggcgagcaagaagccgcgccagaagcgcaccgccacgaaggccuacaacgucacccaggccuucggccggcgcgggcccgagcagacccagggcaacuucggggaccaggagcugacccggcagggcacggacuacaagcacuggccccagaucgcccaguucgcgcccuccgccagcgccuucuucgggaugucccgcaucggcauggaggugaccccgagcggcaccuggcugaccuacacgggggccaucaagcucgacgacaaggaccccaacuucaaggaccaggugauccugcugaacaagcacaucgacgccuacaagaccuucccgcccaccgagcccaagaaggacaagaagaagaaggcggacgagacccaggcccucccccagauccagaagaagcagcagacggucacccugcugcccgccgccgaccucgacgacuucuccaagcagcugcagcagagcauguccagcgcggacuccacccaggccugaggacuagucccuguucccagagcccacuuuuuuuucuuuuuuugaaauaaaauagccugucuuucagaucucaaaggcucuuuucagagccaccaaaaaaaaaaaaaaaaaaaaaaaaaaaaaaaaaaaaaaaaaaaaaaaaaaaaaaaaaaaaaaaaaaaaaaaaaaaaaaaaaaaaaaaaaaaaaaaaaaaaa

SEQ ID NO: 19268 - RNA, 1532 nt, Artificial Sequence
  SARS-CoV-2__MT745605.1__nucleocapsid protein (N) mRNA gc
aggagagucccgcagucggcguccagcggcucugcuuguucgugugugugucguugcaggccuuauucaagcuuaccaugagcgacaacggcccccagaaccagcgcaacgccccgcggaucaccuucgggggccccuccgacagcaccggguccaaccagaacggcgagcgcagcggggcccgguccaagcagcgccggccccagggccugcccaacaacacggcgagcugguucaccgcccucacccagcacggcaaggaggaccugaaguucccgcgcgggcagggcgugcccaucaacaccaacuccagccccgacgaccagaucggguacuaccggcgcgccacgcggcgcauccggggcggggacggcaagaugaaggaccugagcccccgcugguacuucuacuaccucggcaccgggccggaggccggccugcccuacggggccaacaaggacggcaucaucugggucgcgaccgagggcgcccugaacacccccaaggaccacaucgggacgcggaaccccgccaacaacgccgcgaucgugcuccagcugccgcagggcaccacccugcccaagggguucuacgccgagggcucccgcgggggcucccaggccagcucccggagcuccagccgcucccggaacagcucccgcaacagcacccccggcagcucccgggggacgagccccgcccgcauggccggcaacgggggcgacgcggcccucgcccugcugcuccuggaccggcugaaccagcucgaguccaagaugagcgggaagggccagcagcagcagggccagaccgugaccaagaaguccgccgccgaggcgagcaagaagccgcgccagaagcgcaccgccacgaaggccuacaacgucacccaggccuucgggcggcgcggccccgagcagacccaggggaacuucggcgaccaggagcugauccggcaggggaccgacuacaagcacuggccccagaucgcccaguucgcgcccuccgccagcgccuucuucggcaugucccgcaucggcauggaggugacgagcuccgggaccuggcugaccuacaccggcgccaucaagcucgacgacaaggacccgaacuucaaggaccaggugauccugcugaacaagcacaucgacgccuacaagacguucccgcccaccgagcccaagaaggacaagaagaagaaggcggacgagacccaggcccucccccagcggcagaagaagcagcagaccgucacgcugcugcccgccgccgaccucgacgacuucagcaagcagcugcagcaguccaugagcuccgcggacagcacccaggccugaggacuagucccuguucccagagcccacuuuuuuuucuuuuuuugaaauaaaauagccugucuuucagaucucaaaggcucuuuucagagccaccaaaaaaaaaaaaaaaaaaaaaaaaaaaaaaaaaaaaaaaaaaaaaaaaaaaaaaaaaaaaaaaaaaaaaaaaaaaaaaaaaaaaaaaaaaaaaaaaaaaaa

SEQ ID NO: 19269 - RNA, 1532 nt, Artificial Sequence
  SARS-CoV-2__MT745658.1__nucleocapsid protein (N) mRNA gc
aggagagucccgcagucggcguccagcggcucugcuuguucgugugugugucguugcaggccuuauucaagcuuaccaugagcgacaacggcccccagaaccagcgcaacgccccgcggaucaccuucgggggccccuccgacagcaccggguccaaccagaacggcgagcgcagcggggcccgguccaagcagcgccggccccagggccugcccaacaacacggcgagcugguucaccgcccucacccagcacggcaaggaggaccugaaguucccgcgcgggcagggcgugcccaucaacaccaacuccagccccgacgaccagaucggguacuaccggcgcgccacgcggcgcauccggggcggggacggcaagaugaaggaccugagcccccgcugguacuucuacuaccucggcaccgggccggaggccggccugcccuacggggccaacaaggacggcaucaucugggucgcgaccgagggcgcccugaacacccccaaggaccacaucgggacgcggaaccccgccaacaacgccgcgaucgugcuccagcugccgcagggcaccacccugcccaagggguucuacgccgagggcucccgcgggggcucccaggccagcucccggagcuccagccgcucccggaacagcucccgcaacagcacccccggcagcucccgggggacgagccccgcccgcauggccggcaacgggggcgacgcggcccucgcccugcugcuccuggaccggcugaaccagcucgaguccaagaucagcgggaagggccagcagcagcagggccagaccgugaccaagaaguccgccgccgaggcgagcaagaagccgcgccagaagcgcaccgccacgaaggccuacaacgucacccaggccuucgggcggcgcggccccgagcagacccaggggaacuucggcgaccaggagcugauccggcaggggaccgacuacaagcacuggccccagaucgcccaguucgcgcccuccgccagcgccuucuucggcaugucccgcaucggcauggaggugacgccgagcgggaccuggcugaccuacaucggcgccaucaagcucgacgacaaggaccccaacuucaaggaccaggugauccugcugaacaagcacaucgacgccuacaagaccuucccgcccacggagcccaagaaggacaagaagaagaaggcggacgagacccaggcccucccccagcggcagaagaagcagcagaccgucacccugcugcccgccgccgaccucgacgacuucuccaagcagcugcagcagagcauguccagcgcggacuccacgcaggccugaggacuagucccuguucccagagcccacuuuuuuuucuuuuuuugaaauaaaauagccugucuuucagaucucaaaggcucuuuucagagccaccaaaaaaaaaaaaaaaaaaaaaaaaaaaaaaaaaaaaaaaaaaaaaaaaaaaaaaaaaaaaaaaaaaaaaaaaaaaaaaaaaaaaaaaaaaaaaaaaaaaaa

SEQ ID NO: 19270 - RNA, 1532 nt, Artificial Sequence
  SARS-CoV-2__MT745664.1__nucleocapsid protein (N) mRNA gc
aggagagucccgcagucggcguccagcggcucugcuuguucgugugugugucguugcaggccuuauucaagcuuaccaugagcgacaacggcccccagaaccagcgcaacgccccgcggaucaccuucgggggccccuccgacagcaccggguccaaccagaacggcgagcgcagcggggcccgguccaagcagcgccggccccagggccugcccaacaacacggcgagcugguucaccgcccucacccagcacggcaaggaggaccugaaguucccgcgcgggcagggcgugcccaucaacaccaacuccagccccgacgaccagaucggguacuaccggcgcgccacgcggcgcauccggggcggggacggcaagaugaaggaccugagcccccgcugguacuucuacuaccucggcaccgggccggaggccggccugcccuacggggccaacaaggacggcaucaucugggucgcgaccgagggcgcccugaacacccccaaggaccacaucgggacgcggaaccccgccaacaacgccgcgaucgugcuccagcugccgcagggcaccacccugcccaagggguucuacgccgagggcucccgcgggggcucccaggccagcucccggagcuccagccgcucccggaacagcucccgcaacagcacccccggcagcuccaagcggacgagccccgcccgcauggccgggaacggcggggacgcggcccucgcccugcugcuccuggaccggcugaaccagcucgaguccaagaugagcggcaaggggcagcagcagcagggccagaccgugaccaagaaguccgccgccgaggcgagcaagaagccgcgccagaagcgcaccgccacgaaggccuacaacgucacccaggccuucggccggcgcgggcccgagcagacccagggcaacuucggggaccaggagcugauccggcagggcaccgacuacaagcacuggccccagaucgcccaguucgcgcccuccgccagcgccuucuucgggaugucccgcaucggcguggaggugacgccgagcggcaccuggcugaccuacaccggggccaucaagcucgacgacaaggaccccaacuucaaggaccaggucauccugcugaacaagcacaucgacgccuacaagacguucccgcccaccgagcccaagaaggacaagaagaagaaggcggacgagacccaggcccucccccagcggcagaagaagcagcagaccgugacgcugcugcccgccgccgaccucgacgacuucuccaagcagcugcagcagagcauguccagcgcggacuccacccaggccugaggacuagucccuguucccagagcccacuuuuuuuucuuuuuuugaaauaaaauagccugucuuucagaucucaaaggcucuuuucagagccaccaaaaaaaaaaaaaaaaaaaaaaaaaaaaaaaaaaaaaaaaaaaaaaaaaaaaaaaaaaaaaaaaaaaaaaaaaaaaaaaaaaaaaaaaaaaaaaaaaaaaa

SEQ ID NO: 19271 - RNA, 1532 nt, Artificial Sequence
  SARS-CoV-2__MT745668.1__nucleocapsid protein (N) mRNA gc
aggagagucccgcagucggcguccagcggcucugcuuguucgugugugugucguugcaggccuuauucaagcuuaccaugagcgacaacggcccccagaaccagcgcaacgcccugcggaucaccuucgggggcccguccgacagcaccggguccaaccagaacggcgagcgcagcggggcccgguccaagcagcgccggccccagggccuccccaacaacacggcgagcugguucaccgcccugacccagcacggcaaggaggaccugaaguucccccgcgggcagggcgugccgaucaacaccaacuccagccccgacgaccagaucggguacuaccggcgcgccacgcggcgcauccggggcggggacggcaagaugaaggaccucagcccccgcugguacuucuacuaccugggcaccgggcccgaggccggccugccguacggggccaacaaggacggcaucaucugggucgcgaccgagggcgcccucaacacccccaaggaccacaucgggacgcggaaccccgccaacaacgccgcgaucgugcugcagcugccccagggcaccacccucccgaagggguucuacgccgagggcagccgcgggggcucccaggccagcucccggagcuccagccgcucccggaacagcucccgcaaccugacccccggcagcagccgggggacgucccccgcccgcauggccggcaacgggggcgacgcggcccuggcccuccugcugcucgaccggcugaaccagcuggagagcaagauguccgggaagggccagcagcagcagggccagaccgugaccaagaaguccgccgccgaggcguccaagaagccccgccagaagcgcaccgccacgaaggccuacaacgucacccaggccuucgggcggcgcggcccggagcagacccaggggaacuucggcgaccaggagcucauccggcaggggaccgacuacaagcacuggccccagaucgcccaguucgcgcccagcgccuccgccuucuucggcaugagccgcaucggcauggaggugacgcccuccgggaccuggcugaccuacaccggcgccaucaagcuggacgacaaggacccgaacuucaaggaccaggugauccuccugaacaagcacaucgacgccuacaagacguucccgcccaccgagcccaagaaggacaagaagaagaaggcggacgagacccaggcccugccccagcggcagaagaagcagcagaccgucacgcuccugcccgccgccgaccuggacgacuucagcaagcagcuccagcaguccaugagcuccgcggacagcacccaggccugaggacuagucccuguucccagagcccacuuuuuuuucuuuuuuugaaauaaaauagccugucuuucagaucucaaaggcucuuuucagagccaccaaaaaaaaaaaaaaaaaaaaaaaaaaaaaaaaaaaaaaaaaaaaaaaaaaaaaaaaaaaaaaaaaaaaaaaaaaaaaaaaaaaaaaaaaaaaaaaaaaaaa

SEQ ID NO: 19272 - RNA, 1532 nt, Artificial Sequence
  SARS-CoV-2__MT745678.1__nucleocapsid protein (N) mRNA gc
aggagagucccgcagucggcguccagcggcucugcuuguucgugugugugucguugcaggccuuauucaagcuuaccaugagcgacaacggccugcagaaccagcgcaacgcgccccggaucaccuucgggggcccguccgacagcaccggguccaaccagaacggcgagcgcagcggggcccgguccaagcagcgccggccccagggccuccccaacaacacggccagcugguucaccgcccugacccagcacggcaaggaggaccugaaguucccccgcgggcagggcgugccgaucaacaccaacuccagccccgacgaccagaucggguacuaccggcgcgccacgcggcgcauccggggcggggacggcaagaugaaggaccucagcccccgcugguacuucuacuaccugggcaccgggcccgaggccggccugccguacggggccaacaaggacggcaucaucugggucgcgaccgagggcgcccucaacacccccaaggaccacaucgggacgcggaaccccgccaacaacgccgcgaucgugcugcagcugccccagggcaccacccucccgaagggguucuacgccgagggcagccgcgggggcucccaggccagcucccggagcuccagccgcucccggaacagcucccgcaacagcacccccggcagcucccgggggacgagccccgcccgcauggccggcaacgggggcgacgcggcccuggcccugcuccugcuggaccggcucaaccagcuggagcgcaagauguccgggaagggccagcagcagcagggccagaccgugaccaagaaguccgccgccgaggcguccaagaagccccgccagaagcggaccgccacgaaggccuacaacgucacccaggccuucgggcgccggggcccggagcagacccaggggaacuucggcgaccaggagcugauccgccaggggaccgacuacaagcacuggccccagaucgcccaguucgcgcccagcgccuccgccuucuucggcaugagccggaucggcauggaggugacgcccuccgggaccuggcucaccuacaccggcgccaucaagcuggacgacaaggacccgaacuucaaggaccaggugauccugcucaacaagcacaucgacgccuacaagacguucccgcccaccgagcccaagaaggacaagaagaagaaggcggacgagacccaggcccugccccagcgccagaagaagcagcagaccgucacgcugcuccccgccgccgaccuggacgacuucagcaagcagcugcagcaguccaugagcuccgcggacagcacccaggccugaggacuagucccuguucccagagcccacuuuuuuuucuuuuuuugaaauaaaauagccugucuuucagaucucaaaggcucuuuucagagccaccaaaaaaaaaaaaaaaaaaaaaaaaaaaaaaaaaaaaaaaaaaaaaaaaaaaaaaaaaaaaaaaaaaaaaaaaaaaaaaaaaaaaaaaaaaaaaaaaaaaaa

SEQ ID NO: 19273 - RNA, 1532 nt, Artificial Sequence
  SARS-CoV-2__MT745697.1__nucleocapsid protein (N) mRNA gc
aggagagucccgcagucggcguccagcggcucugcuuguucgugugugugucguugcaggccuuauucaagcuuaccaugagcgacaacggcccccagaaccagcgcaacgccccgcggaucaccuucgggggccccuccgacagcaccggguccaaccagaacggcgagcgcagcggggcccgguccaagcagcgccggccccagggccugcccaacaacacggcgagcugguucaccgcccucacccagcacggcaaggaggaccugaaguucccgcgcgggcacggcgugcccaucaacaccaacuccagccccgacgaccagaucggguacuaccggcgcgccacgcggcgcauccggggcggggacggcaagaugaaggaccugagcccccgcugguacuucuacuaccucggcaccgggccggaggccggccugcccuacggggccaacaaggacggcaucaucugggucgcgaccgagggcgcccugaacacccccaaggaccacaucgggacgcggaaccccgccaacaacgccgcgaucgugcuccagcugccgcagggcaccacccugcccaagggguucuacgccgagggcucccgcgggggcucccaggccagcucccggagcuccagccgcucccggaacagcucccgcaacagcacccccggcagcuccaagcggacgagccccgcccgcauggccgggaacggcggggacgcggcccucgcccugcugcuccuggaccggcugaaccagcucgaguccaagaugagcggcaaggggcagcagcagcagggccagaccgugaccaagaaguccgccgccgaggcgagcaagaagccgcgccagaagcgcaccgccacgaaggccuacaacgucacccaggccuucggccggcgcgggcccgagcagacccagggcaacuucggggaccaggagcugauccggcagggcaccgacuacaagcacuggccccagaucgcccaguucgcgcccuccgccagcgccuucuucgggaugucccgcaucggcauggaggugacgccgagcggcaccuggcugaccuacaccggggccaucaagcucgacgacaaggaccccaacuucaaggaccaggugauccugcugaacaagcacaucgacgccuacaagacguucccgcccaccgagcccaagaaggacaagaagaagaaggcggacgagacccaggcccucccccagcggcagaagaagcagcagaccgucacgcugcugcccgccgccgaccucgacgacuucuccaagcagcugcagcagagcauguccagcgcggacuccacccaggccugaggacuagucccuguucccagagcccacuuuuuuuucuuuuuuugaaauaaaauagccugucuuucagaucucaaaggcucuuuucagagccaccaaaaaaaaaaaaaaaaaaaaaaaaaaaaaaaaaaaaaaaaaaaaaaaaaaaaaaaaaaaaaaaaaaaaaaaaaaaaaaaaaaaaaaaaaaaaaaaaaaaaa

SEQ ID NO: 19274 - RNA, 1532 nt, Artificial Sequence
  SARS-CoV-2__MT745698.1__nucleocapsid protein (N) mRNA gc
aggagagucccgcagucggcguccagcggcucugcuuguucgugugugugucguugcaggccuuauucaagcuuaccaugagcgacaacggcccccagaaccagcgcaacgccccgcggaucaccuucgggggccccuccgacagcaccggguccaaccagaacggcgagcgcagcggggcccgguccaagcagcgccggccccagggccugcccaacaacacggcgagcugguucaccgcccucacccagcacggcaaggaggaccugaaguucccgcgcgggcagggcgugcccaucaacaccaacuccagccccgacgaccagaucggguacuaccggcgcgccacgcggcgcauccggggcggggacggcaagaugaaggaccugagcccccgcugguacuucuacuaccucggcaccgggccggaggccggccugcccuacggggccaacaaggacggcaucaucugggucgcgaccgagggcgcccugaacacccccaaggaccacaucgggacgcggaaccccgccaacaacgccgcgaucgugcuccagcugccgcagggcaccacccugcccaagggguucuacgccgagggcagccgcgggggcucccaggccagcucccgguucagcucccgcagccggaacuccagccgcaacuccacccccggcagcagccgggggacgucccccgcccgcauggccggcaacgggggcgacgcggcccucgcccugcugcuccuggaccggcugaaccagcucgagagcaagauguccgggaagggccagcagcagcagggccagaccgugaccaagaaguccgccgccgaggcguccaagaagccgcgccagaagcgcaccgccacgaaggccuacaacgucacccaggccuucgggcggcgcggccccgagcagacccaggggaacuucggcgaccaggagcugauccggcaggggaccgacuacaagcacuggccccagaucgcccaguucgcgcccagcgccuccgccuucuucggcaugagccgcaucggcauggaggugacgccguccgggaccuggcugaccuacaccggcgccaucaagcucgacgacaaggaccccaacuucaaggaccaggugauccugcugaacaagcacaucgacgccuacaagacguucccgcccaccgagcccaagaaggacaagaagaagaaggcggacgagacccaggcccucccccagcggcagaagaagcagcagaccgucacgcugcugcccgccgccgaccucgacgacuucagcaagcagcugcagcaguccaugagcuccgcggacagcacccaggccugaggacuagucccuguucccagagcccacuuuuuuuucuuuuuuugaaauaaaauagccugucuuucagaucucaaaggcucuuuucagagccaccaaaaaaaaaaaaaaaaaaaaaaaaaaaaaaaaaaaaaaaaaaaaaaaaaaaaaaaaaaaaaaaaaaaaaaaaaaaaaaaaaaaaaaaaaaaaaaaaaaaaa

SEQ ID NO: 19275 - RNA, 1532 nt, Artificial Sequence
  SARS-CoV-2__MT750025.1__nucleocapsid protein (N) mRNA gc
aggagagucccgcagucggcguccagcggcucugcuuguucgugugugugucguugcaggccuuauucaagcuuaccaugagcgacaacggcccccagaaccagcgcaacgccccgcggaucaccuucgggggccccuccgacagcaccggguccaaccagaacggcgagcgcagcggggcccgguccaagcagcgccggccccagggccugcccaacaacacggcgagcugguucaccgcccucacccagcacggcaaggaggaccugaaguucccgcgcgggcagggcgugcccaucaacaccaacuccagccccgacgaccagaucggguacuaccggcgcgccacgcggcgcauccggggcggggacggcaagaugaaggaccugagcccccgcugguacuucuacuaccucggcaccgggccggaggccggccugcccuacggggccaacaaggacggcaucaucugggucgcgaccgagggcgcccugaacacccccaaggaccacaucgggacgcggaaccccgccaacaacguggccaucgugcuccagcugccgcagggcaccacccugcccaagggguucuacgcggagggcucccgcgggggcucccaggccagcucccggagcuccagccgcucccggaacagcucccgcaacagcacccccggcagcucccgggggacgagccccgcccgcauggccggcaacgggggcgacgccgcgcucgcccugcugcuccuggaccggcugaaccagcucgaguccaagaugagcgggaagggccagcagcagcagggccagaccgucaccaagaaguccgccgccgaggccagcaagaagccgcgccagaagcgcaccgcgacgaaggccuacaacgugacccaggccuucgggcggcgcggccccgagcagacccaggggaacuucggcgaccaggagcugauccggcaggggaccgacuacaagcacuggccccagaucgcccaguucgcccccuccgcgagcgccuucuucggcaugucccgcaucggcauggaggugacgccgagcgggaccuggcugaccuacaccggcgccaucaagcucgacgacaaggaccccaacuucaaggaccaggucauccugcugaacaagcacaucgacgccuacaagacguucccgcccaccgagcccaagaaggacaagaagaagaaggccgacgagacccaggcgcucccccagcggcagaagaagcagcagaccgugacgcugcugcccgccgccgaccucgacgacuucuccaagcagcugcagcagagcauguccagcgccgacuccacccaggcgugaggacuagucccuguucccagagcccacuuuuuuuucuuuuuuugaaauaaaauagccugucuuucagaucucaaaggcucuuuucagagccaccaaaaaaaaaaaaaaaaaaaaaaaaaaaaaaaaaaaaaaaaaaaaaaaaaaaaaaaaaaaaaaaaaaaaaaaaaaaaaaaaaaaaaaaaaaaaaaaaaaaaa

SEQ ID NO: 19276 - RNA, 1532 nt, Artificial Sequence
  SARS-CoV-2__MT750335.1__nucleocapsid protein (N) mRNA gc
aggagagucccgcagucggcguccagcggcucugcuuguucgugugugugucguugcaggccuuauucaagcuuaccaugagcgacaacggcccccagaaccagcgcaacgccccgcggaucaccuucgggggccccuccgacagcaccggguccaaccagaacggcgagcgcagcggggcccgguccaagcagcgccggccccagggccugcccaacaacacggcgagcugguucaccgcccucacccagcacggcaaggaggaccugaaguucccgcgcgggcagggcgugcccaucaacaccaacuccagccccgacgaccagaucggguacuaccggcgcgccacgcggcgcauccggggcggggacggcaagaugaaggaccugagcccccgcugguacuucuacuaccucggcaccgggccggaggccggccugcccuacggggccaacaaggacggcaucaucugggucgcgaccgagggcgcccugaacacccccaaggaccacaucgggacgcggaaccccgccaacaacgccgcgaucgugcuccagcugccgcagggcaccacccugcccaagggguucuacgccgagggcucccgcgggggcucccaggccagcucccggagcuccagccgcucccggaacagcucccgcaacagcacccccggcagcuccaagcggacgagccccgggcgcauggccggcaacgggggcgacgccgcgcucgcccugcugcuccuggaccggcugaaccagcucgaguccaagaugagcgggaagggccagcagcagcagggccagaccgugaccaagaaguccgccgccgaggccagcaagaagccgcgccagaagcgcaccgcgacgaaggccuacaacgucacccaggccuucgggcggcgcggccccgagcagacccaggggaacuucggcgaccaggagcugauccggcaggggaccgacuacaagcacuggccccagaucgcccaguucgcccccuccgcgagcgccuucuucggcaugucccgcaucggcauggaggugacgccgagcgggaccuggcugaccuacaccggcgccaucaagcucgacgacaaggaccccaacuucaaggaccaggugauccugcugaacaagcacaucgacgccuacaagacguucccgcccaccgagcccaagaaggacaagaagaagaaggccgacgagacccaggcgcucccccagcggcagaagaagcagcagaccgucacgcugcugcccgccgccgaccucgacgacuucuccaagcagcugcagcagagcauguccagcgccgacuccacccaggcgugaggacuagucccuguucccagagcccacuuuuuuuucuuuuuuugaaauaaaauagccugucuuucagaucucaaaggcucuuuucagagccaccaaaaaaaaaaaaaaaaaaaaaaaaaaaaaaaaaaaaaaaaaaaaaaaaaaaaaaaaaaaaaaaaaaaaaaaaaaaaaaaaaaaaaaaaaaaaaaaaaaaaa

SEQ ID NO: 19277 - RNA, 1532 nt, Artificial Sequence
  SARS-CoV-2__MT750358.1__nucleocapsid protein (N) mRNA gc
aggagagucccgcagucggcguccagcggcucugcuuguucgugugugugucguugcaggccuuauucaagcuuaccaugagcgacaacggcccccagaaccagcgcaacgccccgcggaucaccuucgggggccccuccgacagcaccggguccaaccagaacggcgagcgcagcggggcccgguccaagcagcgccggccccagggccugcccaacaacacggcgagcugguucaccgcccucacccagcacggcaaggaggaccugaaguucccgcgcgggcagggcgugcccaucaacaccaacuccagccccgacgaccagaucggguacuaccggcgcgccacgcggcgcauccggggcggggacggcaagaugaaggaccugagcccccgcugguacuucuacuaccucggcaccgggccggaggccggccugcccuacggggccaacaaggacggcaucaucugggucgcgaccgagggcgcccugaacacccccaaguaccacaucgggacgcggaaccccgccaacaacgccgcgaucgugcuccagcugccgcagggcaccacccugcccaagggguucuacgccgagggcucccgcgggggcucccaggccagcucccggagcuccagccgcucccggaacagcucccgcaacagcacccccggcagcucccgggggacgagccccgcccgcauggccggcaacgggggcgacgcggcccucgcccugcugcuccuggaccggcugaaccagcucgaguccaagaugagcgggaagggccagcagcagcagggccagaccgugaccaagaaguccgccgccgaggcgagcaagaagccgcgccagaagcgcaccgccacgaaggccuacaacgucacccaggccuucgggcggcgcggccccgagcagacccaggggaacuucggcgaccaggagcugauccggcaggggaccgacuacaagcacuggccccagaucgcccaguucgcgcccuccgccagcgccuucuucggcaugucccgcaucggcauggaggugacgccgagcgggaccuggcugaccuacaccggcgccaucaagcucgacgacaaggaccccaacuucaaggaccaggugauccugcugaacaagcacaucgacgccuacaagacguucccgcccaccgagcccaagaaggacaagaagaagaaggcggacgagacccaggcccucccccagcggcagaagaagcagcagaccgucacgcugcugcccgccgccgaccucgacgacuucuccaagcagcugcagcagagcauguccagcgcggacuccacccaggccugaggacuagucccuguucccagagcccacuuuuuuuucuuuuuuugaaauaaaauagccugucuuucagaucucaaaggcucuuuucagagccaccaaaaaaaaaaaaaaaaaaaaaaaaaaaaaaaaaaaaaaaaaaaaaaaaaaaaaaaaaaaaaaaaaaaaaaaaaaaaaaaaaaaaaaaaaaaaaaaaaaaaa

SEQ ID NO: 19278 - RNA, 1532 nt, Artificial Sequence
  SARS-CoV-2__MT750385.1__nucleocapsid protein (N) mRNA gc
aggagagucccgcagucggcguccagcggcucugcuuguucgugugugugucguugcaggccuuauucaagcuuaccaugagcgacaacggcccccagaaccagcgcaacgccccgcggaucaccuucgggggccccuccgacagcaccggguccaaccagaacggcgagcgcagcggggcccgguccaagcagcgccggccccagggccugcccaacaacacggcgagcugguucaccgcccucacccagcacggcaaggaggaccugaaguucccgcgcgggcagggcgugcccaucaacaccaacuccagccccgacgaccagaucggguacuaccggcgcgccacgcggcgcauccggggcggggacggcaagaugaaggaccugagcccccgcugguacuucuacuaccucggcaccgggccggaggccggccugcccuacggggccaacaaggacggcaucaucugggucgcgaccgagggcgcccugaacacccccaaggaccacaucgggacgcggaaccccgccaacaacgccgcgaucgugcuccagcugccgcagggcaccacccugcccaagggguucuacgccgagggcucccgcgggggcucccaggccagcucccggagcuccagccgcucccggaacagcucccgcaacagcacccccggcagcucccgggggacgagccccgcccgcauggccggcaacgggggcgacgcggcccucgcccugcugcuccuggaccggcugaaccagcucgaguccaagaugagcgggaagggccagcagcagcagggccagaccgugaccaagaaguccgccgccgaggcgagcaagaagccgcgccagaagcgcaccgccacgaaggccuacaacgucacccaggccuucgggcggcgcggccccgagcagacccaggggaacuucggcgaccaggagcugauccggcaggggaccgacuacaagcacuggccccagaucgcccaguucgcgcccuccgccagcgccuucuucggcaugucccgcaucggcauggaggugacgccgagcgggaccuggcugaccuacaccggcgccaucaagcucgacgacaaggaccccaacuucaaggaccaggugauccugcugaacaagcacaucgacgccuacaagacguucccgcccaccgagcccaagaaguacaagaagaagaaggcggacgagacccaggcccucccccagcggcagaagaagcagcagaccgucacgcugcugcccgccgccgaccucgacgacuucuccaagcagcugcagcagagcauguccagcgcggacuccacccaggccugaggacuagucccuguucccagagcccacuuuuuuuucuuuuuuugaaauaaaauagccugucuuucagaucucaaaggcucuuuucagagccaccaaaaaaaaaaaaaaaaaaaaaaaaaaaaaaaaaaaaaaaaaaaaaaaaaaaaaaaaaaaaaaaaaaaaaaaaaaaaaaaaaaaaaaaaaaaaaaaaaaaaa

SEQ ID NO: 19279 - RNA, 1532 nt, Artificial Sequence
  SARS-CoV-2__MT750413.1__nucleocapsid protein (N) mRNA gc
aggagagucccgcagucggcguccagcggcucugcuuguucgugugugugucguugcaggccuuauucaagcuuaccaugagcgacaacggcccccagaaccagcgcaacgccccgcggaucaccuucgggggccccuccgacagcaccggguccaaccagaacggcgagcgcagcggggcccgguccaagcagcgccggccccagggccugcccaacaacacggcgagcugguucaccgcccucacccagcacggcaaggaggaccugaaguucccgcgcgggcagggcgugcccaucaacaccaacuccagccccgacgaccagaucggguacuaccggcgcgccacgcggcgcauccggggcggggacggcaagaugaaggaccugagcccccgcugguacuucuacuaccucggcaccgggccggaggccggccugcccuacggggccaacaaggacggcaucaucugggucgcgaccgagggcgcccugaacacccccaaggaccacaucgggacgcggaaccccgccaacaacgccagcaucgugcuccagcugccgcagggcaccacccugcccaagggguucuacgcggagggcucccgcgggggcagccaggccuccagccgguccagcucccgcagccggaacuccagccgcaacagcacccccggcuccagcaagcggacgucccccgcccgcauggccgggaacggcggggacgccgcgcucgcccugcugcuccuggaccggcugaaccagcucgagagcaagauguccggcaaggggcagcagcagcagggccagaccgugaccaagaaguccgccgccgaggccuccaagaagccgcgccagaagcgcaccgcgacgaaggccuacaacgucacccaggccuucggccggcgcgggcccgagcagacccagggcaacuucggggaccaggagcugauccggcagggcaccgacuacaagcacuggccccagaucgcccaguucgcccccagcgcguccgccuucuucgggaugagccgcaucggcauggaggugacgccguccggcaccuggcugaccuacaccggggccaucaagcucgacgacaaggaccccaacuucaaggaccaggugauccugcugaacaagcacaucgacgccuacaagacguucccgcccaccgagcccaagaaggacaagaagaagaaggccgacgagacccaggcgcucccccagcggcagaagaagcagcagaccgucacgcugcugcccgccgccgaccucgacgacuucagcaagcagcugcagcaguccaugagcuccgccgacagcacccaggcgugaggacuagucccuguucccagagcccacuuuuuuuucuuuuuuugaaauaaaauagccugucuuucagaucucaaaggcucuuuucagagccaccaaaaaaaaaaaaaaaaaaaaaaaaaaaaaaaaaaaaaaaaaaaaaaaaaaaaaaaaaaaaaaaaaaaaaaaaaaaaaaaaaaaaaaaaaaaaaaaaaaaaa

SEQ ID NO: 19280 - RNA, 1532 nt, Artificial Sequence
  SARS-CoV-2__MT750418.1__nucleocapsid protein (N) mRNA gc
aggagagucccgcagucggcguccagcggcucugcuuguucgugugugugucguugcaggccuuauucaagcuuaccaugagcgacaacggcccccagaaccagcgcaacgccccgcggaucaccuucgggggccccuccgacagcaccggguccaaccagaacggcgagcgcagcggggcccgguccaagcagcgccggccccagggccugcccaacaacacggcgagcugguucaccgcccucacccagcacggcaaggagaaccugaaguucccgcgcgggcagggcgugcccaucaacaccaacuccagccccgacgaccagaucggguacuaccggcgcgccacgcggcgcauccggggcggggacggcaagaugaaggaccugagcccccgcugguacuucuacuaccucggcaccgggccggaggccggccugcccuacggggccaacaaggacggcaucaucugggucgcgaccgagggcgcccugaacacccccaaggaccacaucgggacgcggaaccccgccaacaacgccgcgaucgugcuccagcugccgcagggcaccacccugcccaagggguucuacgccgagggcagccgcgggggcucccaggccagcucccggagcuccagccgcucccggaacagcucccgcagcagcacccccggcuccagccgggggacgucccccgcccgcauggccggcaacgggggcgacgcggcccucgcccugcugcuccuggaccggcugaaccagcucgagagcaagauguccgggaagggccagcagcagcagggccagaccgugaccaagaaguccgccgccgaggcguccaagaagccgcgccagaagcgcaccgccacgaaggccuacaacgucacccaggccuucgggcggcgcggccccgagcagacccaggggaacuucggcgaccaggagcugauccggcaggggaccgacuacaagcacuggccccagaucgcccaguucgcgcccagcgccuccgccuucuucggcaugagccgcaucggcauggaggugacgccguccgggaccuggcugaccuacaccggcgccaucaagcucgacgacaaggaccccaacuucaaggaccaggugauccugcugaacaagcacaucgacgccuacaagacguucccgcccaccgagcccaagaaguacaagaagaagaaggcggacgagacccaggcccucccccagcggcagaagaagcagcagaccgucacgcugcugcccgccgccgaccucgacgacuucagcaagcagcugcagcaguccaugagcuccgcggacagcacccaggccugaggacuagucccuguucccagagcccacuuuuuuuucuuuuuuugaaauaaaauagccugucuuucagaucucaaaggcucuuuucagagccaccaaaaaaaaaaaaaaaaaaaaaaaaaaaaaaaaaaaaaaaaaaaaaaaaaaaaaaaaaaaaaaaaaaaaaaaaaaaaaaaaaaaaaaaaaaaaaaaaaaaaa

SEQ ID NO: 19281 - RNA, 1532 nt, Artificial Sequence
  SARS-CoV-2__MT740401.1__nucleocapsid protein (N) mRNA gc
aggagagucccgcagucggcguccagcggcucugcuuguucgugugugugucguugcaggccuuauucaagcuuaccaugagcgacaacggcccccagaaccagcgcuccgccccgcggaucaccuucgggggccccagcgacuccaccgggagcaaccagaacggcgagcgcuccggggcccggagcaagcagcgccggccccagggccugcccaacaacacggcguccugguucaccgcccucacccagcacggcaaggaggaccugaaguucccgcgcgggcagggcgugcccaucaacaccaacagcucccccgacgaccagaucggguacuaccggcgcgccacgcggcgcauccggggcggggacggcaagaugaaggaccugagcccccgcugguacuucuacuaccucggcaccgggccggaggccggccugcccuacggggccaacaaggacggcaucaucugggucgcgaccgagggcgcccugaacacccccaaggaccacaucgggacgcggaaccccgccaacaacgccgcgaucgugcuccagcugccgcagggcaccacccugcccaagggguucuacgccgagggcucccgcgggggcagccaggccuccagccgguccagcucccgcagccggaacuccagccgcaacagcacccccggcuccagcaagcggacgucccccgcccgcauggccgggaacggcggggacgcggcccucgcccugcugcuccuggaccggcugaaccagcucgagagcaagauguccggcaaggggcagcagcagcagggccagaccgugaccaagaaguccgccgccgaggcgagcaagaagccgcgccagaagcgcaccgccacgaaggccuacaacgucacccaggccuucggccggcgcgggcccgagcagacccagggcaacuucggggaccaggagcugauccggcagggcaccgacuacaagcacuggccccagaucgcccaguucgcgcccagcgccuccgccuucuucgggaugagccgcaucggcauggaggugacgccguccggcaccuggcugaccuacaccggggccaucaagcucgacgacaaggaccccaacuucaaggaccaggugauccugcugaacaagcacaucgacgccuacaagacguucccgcccaccgagcccaagaaggacaagaagaagaaggcggacgagacccaggcccucccccagcggcagaagaagcagcagaccgucacgcugcugcccgccgccgaccucgacgacuucagcaagcagcugcagcaguccaugagcuccgcggacagcacccaggccugaggacuagucccuguucccagagcccacuuuuuuuucuuuuuuugaaauaaaauagccugucuuucagaucucaaaggcucuuuucagagccaccaaaaaaaaaaaaaaaaaaaaaaaaaaaaaaaaaaaaaaaaaaaaaaaaaaaaaaaaaaaaaaaaaaaaaaaaaaaaaaaaaaaaaaaaaaaaaaaaaaaaa

SEQ ID NO: 19282 - RNA, 1532 nt, Artificial Sequence
  SARS-CoV-2__MT740431.1__nucleocapsid protein (N) mRNA gc
aggagagucccgcagucggcguccagcggcucugcuuguucgugugugugucguugcaggccuuauucaagcuuaccaugagcuacaacggcccccagaaccagcgcaacgccccgcggaucaccuucgggggccccuccgacagcaccggguccaaccagaacggcgagcgcagcggggcccgguccaagcagcgccggccccagggccugcccaacaacacggcgagcugguucaccgcccucacccagcacggcaaggaggaccugaaguucccgcgcgggcagggcgugcccaucaacaccaacuccagccccgacgaccagaucggguacuaccggcgcgccacgcggcgcauccggggcggggacggcaagaugaaggaccugagcccccgcugguacuucuacuaccucggcaccgggccggaggccggccugcccuacggggccaacaaggacggcaucaucugggucgcgaccgagggcgcccugaacacccccaaggaccacaucgggacgcggaaccccgccaacaacgccgcgaucgugcuccagcugccgcagggcaccacccugcccaagggguucuacgccgagggcucccgcgggggcucccaggccagcucccggagcuccagccgcucccggaacagcucccgcaacagcacccccggcagcuccaagcggacgagccccgcccgcauggccgggaacggcggggacgcggcccucgcccugcugcuccuggaccggcugaaccagcucgaguccaagaugagcggcaaggggcagcagcagcagggccagaccgugaccaagaaguccgccgccgaggcgagcaagaagccgcgccagaagcgcaccgccacgaaggccuacaacgucacccaggccuucggccggcgcgggcccgagcagacccagggcaacuucggggaccaggagcugauccggcagggcaccgacuacaagcacuggccccagaucgcccaguucgcgcccuccgccagcgccuucuucgggaugucccgcaucggcauggaggugacgccgagcggcaccuggcugaccuacaccggggccaucaagcucgacgacaaggaccccaacuucaaggaccaggugauccugcugaacaagcacaucgacgccuacaagacguucccgcccaccgagcccaagaaggacaagaagaagaaggcggacgagacccaggcccucccccagcggcagaagaagcagcagaccgucacgcugcugcccgccgccgaccucgacgacuucuccaagcagcugcagcagagcauguccagcgcggacuccacccaggccugaggacuagucccuguucccagagcccacuuuuuuuucuuuuuuugaaauaaaauagccugucuuucagaucucaaaggcucuuuucagagccaccaaaaaaaaaaaaaaaaaaaaaaaaaaaaaaaaaaaaaaaaaaaaaaaaaaaaaaaaaaaaaaaaaaaaaaaaaaaaaaaaaaaaaaaaaaaaaaaaaaaaa

SEQ ID NO: 19283 - RNA, 1532 nt, Artificial Sequence
  SARS-CoV-2__MT740438.1__nucleocapsid protein (N) mRNA gc
aggagagucccgcagucggcguccagcggcucugcuuguucgugugugugucguugcaggccuuauucaagcuuaccaugagcgacaacggcccccagaaccagcgcaacgccccgcggaucaccuucgggggccccuccgacagcaccggguccaaccagaacggcgagcgcagcugggcccgguccaagcagcgccggccccaggggcugcccaacaacacggcgagcugguucaccgcccucacccagcacggcaaggaggaccugaaguucccgcgcggccagggggugcccaucaacaccaacuccagccccgacgaccagaucggcuacuaccggcgcgccacgcggcgcauccgcgggggcgacgggaagaugaaggaccugagcccccggugguacuucuacuaccucggcaccggcccggaggccgggcugcccuacggcgccaacaaggacgggaucaucugggucgcgaccgagggcgcccugaacacccccaaggaccacaucggcacgcggaaccccgccaacaacgccgcgaucgugcuccagcugccgcaggggaccacccugcccaagggcuucuacgccgaggggucccgcggcgggucccaggccagcucccggagcuccagccgcucccggaacagcucccgcaacagcacccccggcagcucccggggcacgagccccgcccgcauggccgggaacggcggggacgcggcccucgcccugcugcuccuggaccggcugaaccagcucgaguccaagaugagcggcaaggggcagcagcagcagggccagaccgugaccaagaaguccgccgccgaggcgagcaagaagccgcgccagaagcgcaccgccacgaaggccuacaacgucacccaggccuucggccggcgcgggcccgagcagacccagggcaacuucggggaccaggagcugauccggcagggcaccgacuacaagcacuggccccagaucgcccaguucgcgcccuccgccagcgccuucuucgggaugucccgcaucggcauggaggugacgccgagcggcaccuggcugaccuacaccggggccaucaagcucgacgacaaggaccccaacuucaaggaccaggugauccugcugaacaagcacaucgacgccuacaagacguucccgcccaccgagcccaagaaggacaagaagaagaaggcggacgagacccaggcccucccccagcggcagaagaagcagcagaccgucacgcugcugcccgccgccgaccucgacgacuucuccaagcagcugcagcagagcauguccagcgcggacuccacccaggccugaggacuagucccuguucccagagcccacuuuuuuuucuuuuuuugaaauaaaauagccugucuuucagaucucaaaggcucuuuucagagccaccaaaaaaaaaaaaaaaaaaaaaaaaaaaaaaaaaaaaaaaaaaaaaaaaaaaaaaaaaaaaaaaaaaaaaaaaaaaaaaaaaaaaaaaaaaaaaaaaaaaaa

SEQ ID NO: 19284 - RNA, 1532 nt, Artificial Sequence
  SARS-CoV-2__MT740444.1__nucleocapsid protein (N) mRNA gc
aggagagucccgcagucggcguccagcggcucugcuuguucgugugugugucguugcaggccuuauucaagcuuaccaugagcgacaacggcccccagaaccagcgcaacgccccgcggaucaccuucgggggccccuccgacagcaccggguccaaccagaacggcgagcgcagcggggcccgguccaagcagcgccggccccagggccugcccaacaacacggcgagcugguucaccgcccucacccagcacggcaaggaggaccugaaguucccgcgcgggcagggcgugcccaucaacaccaacuccagccccgacgaccagaucggguacuaccggcgcgccacgcggcgcauccggggcggggacggcaagaugaaggaccugagcccccgcugguacuucuacuaccucggcaccgggccggaggccggccugcccuacggggccaacaaggacggcaucaucugggucgcgaccgagggcgcccugaacacccccaaggaccacaucgggacgcggaaccccgccaacaacgccuccaucgugcuccagcugccgcagggcaccacccugcccaagggguucuacgcggagggcucccgcgggggcagccaggccuccagccgguccagcucccgcagccggaacucccuccgcaacagcacccccggcagcucccgggggacgagccccgcccgcauggccggcaacgggggcgacgccgcgcuggcccugcuccugcuggaccggcucaaccagcuggaguccaagaugagcgggaagggccagcagcagcagggccagaccgugaccaagaaguccgccgccgaggccagcaagaagccgcgccagaagcgcaccgcgacgaaggccuacaacgucacccaggccuucgggcggcgcggccccgagcagacccaggggaacuucggcgaccaggagcugauccggcaggggaccgacuacaagcacuggccccagaucgcccaguucgcccccuccgcgagcgccuucuucggcaugucccgcaucggcauggaggugacgccgagcgggaccuggcucaccuacaccggcgccaucaagcuggacgacaaggaccccaacuucaaggaccaggugauccugcucaacaagcacaucgacgccuacaagacguucccgcccaccgagcccaagaaggacaagaagaagaaggccgacgagacccaggcgcugccccagcggcagaagaagcagcagaccgucacgcugcuccccgccgccgaccuggacgacuucuccaagcagcugcagcagagcauguccagcgccgacuccacccaggcgugaggacuagucccuguucccagagcccacuuuuuuuucuuuuuuugaaauaaaauagccugucuuucagaucucaaaggcucuuuucagagccaccaaaaaaaaaaaaaaaaaaaaaaaaaaaaaaaaaaaaaaaaaaaaaaaaaaaaaaaaaaaaaaaaaaaaaaaaaaaaaaaaaaaaaaaaaaaaaaaaaaaaa

SEQ ID NO: 19285 - RNA, 1532 nt, Artificial Sequence
  SARS-CoV-2__MT731669.1__nucleocapsid protein (N) mRNA gc
aggagagucccgcagucggcguccagcggcucugcuuguucgugugugugucguugcaggccuuauucaagcuuaccaugagcgacaacggcccccagaaccagcgcaacgccccgcggaucaccuucgggggccccuccgacagcaccggguccaaccagaacggcgagcgcagcggggcccgguccaagcagcgccggccccagggccugcccaacaacacggcgagcugguucaccgcccucacccagcacggcaaggaggaccugaaguucccgcgcgggcagggcgugcccaucaacaccaacuccagccccgacgaccagaucggguacuaccggcgcgccacgcggcgcauccggggcggggacggcaagaugaaggaccugagcccccgcugguacuucuacuaccucggcaccgggccggaggccggccugcccuacggggccaacaaggacggcaucaucugggucgcgaccgagggcgcccugaacacccccaaggaccacaucgggacgcggaaccccuccaacaacgccgccaucgugcuccagcugccgcagggcaccacccugcccaagggguucuacgcggagggcucccgcgggggcagccaggccuccagccgguccagcucccgcagccggaacucccuccgcaacagcacccccggcagcucccgggggacgagccccgcccgcauggccggcaacgggggcgacgccgcgcuggcccugcuccugcuggaccggcucaaccagcuggaguccaagaugagcgggaagggccagcagcagcagggccagaccgugaccaagaaguccgccgccgaggccagcaagaagccgcgccagaagcgcaccgcgacgaaggccuacaacgucacccaggccuucgggcggcgcggccccgagcagacccaggggaacuucggcgaccaggagcugauccggcaggggaccgacuacaagcacuggccccagaucgcccaguucgcccccuccgcgagcgccuucuucggcaugucccgcaucggcauggaggugacgccgagcgggaccuggcucaccuacaccggcgccaucaagcuggacgacaaggaccccaacuucaaggaccaggugauccugcucaacaagcacaucgacgccuacaagacguucccgcccaccgagcccaagaaggacaagaagaagaaggccgacgagacccaggcgcugccccagcggcagaagaagcagcagaccgucacgcugcuccccgccgccgaccuggacgacuucuccaagcagcugcagcagagcauguccagcgccgacuccacccaggcgugaggacuagucccuguucccagagcccacuuuuuuuucuuuuuuugaaauaaaauagccugucuuucagaucucaaaggcucuuuucagagccaccaaaaaaaaaaaaaaaaaaaaaaaaaaaaaaaaaaaaaaaaaaaaaaaaaaaaaaaaaaaaaaaaaaaaaaaaaaaaaaaaaaaaaaaaaaaaaaaaaaaaa

SEQ ID NO: 19286 - RNA, 1532 nt, Artificial Sequence
  SARS-CoV-2__MT712859.1__nucleocapsid protein (N) mRNA gc
aggagagucccgcagucggcguccagcggcucugcuuguucgugugugugucguugcaggccuuauucaagcuuaccaugagcgacaacggcccccagaaccagcgcaacgccccgcggaucaccuucgggggccccuccgacagcaccggguccaaccagaacggcgagcgcagcggggcccgguccaagcagcgccggccccagggccugcccaacaacacggcgagcugguucaccgcccucacccagcacggcaaggaggaccugaaguucccgcgcgggcagggcgugcccaucaacaccaacuccagccccgacgaccagaucggguacuaccggcgcgccacgcggcgcauccggggcggggacggcaagaugaaggaccugagcccccgcugguacuucuacuaccucggcaccgggccggaggccggccugcccuacggggccaacaaggacggcaucaucugggucgcgaccgagggcgcccugaacacccccaaggaccacaucgggacgcggaaccccgccaacaacgccgcgaucgugcuccagcugccgcagggcaccacccugcccaagggguucuacgccgagggcucccgcgggggcucccaggccagcucccggagcuccagccgcucccggaacagcucccgcaacagcacccccggcagcucccgggggacgagccccgcccgcauggccggcaacgggggcgacgcggcccucgcccugcugcuccuggaccggcugaaccagcucgaguccaagaugagcgggaagggccagcagcagcagggccagaccgugaccaagaaguccgccgccgaggcgagcaagaagccgcgccagaagcgcaccgccacgaaggccuacaacgucacccaggccuucgggcggcgcggccccgagcagacccaggggaacuucggcgaccaggagcugauccggcaggggaccgacuacaagcacuggccccagaucgcccaguucgcgcccuccgccagcgccuucuucggcaugucccgcaucggcauggaggugacgccgagcgggaccuggcugaccuacaccggcgccaucaagcucgacgacaaggaccccaacuucaaggaccaggugauccugcugaacaagcacaucgacgccuacaagacguucccgcccaccgagcccaagaaggaccggaagaagaaggcggacgagacccaggcccucccccagcgccagaagaagcagcagaccgucacgcugcugcccgccgccgaccucgacgacuucuccaagcagcugcagcagagcauguccagcgcggacuccacccaggccugaggacuagucccuguucccagagcccacuuuuuuuucuuuuuuugaaauaaaauagccugucuuucagaucucaaaggcucuuuucagagccaccaaaaaaaaaaaaaaaaaaaaaaaaaaaaaaaaaaaaaaaaaaaaaaaaaaaaaaaaaaaaaaaaaaaaaaaaaaaaaaaaaaaaaaaaaaaaaaaaaaaaa

SEQ ID NO: 19287 - RNA, 1532 nt, Artificial Sequence
  SARS-CoV-2__MT706136.1__nucleocapsid protein (N) mRNA gc
aggagagucccgcagucggcguccagcggcucugcuuguucgugugugugucguugcaggccuuauucaagcuuaccaugagcgacaacggcccccagaaccagcgcaacgccccgcggaucaccuucgggggccccuccgacagcaccggguccaaccagaacggcgagcgcagcggggcccgguccaagcagcgccggccccagggccugcccaacaacacggcgagcugguucaccgcccucacccagcacggcaaggaggaccugaaguucccgcgcgggcagggcgugcccaucaacaccaacuccagccccgacgaccagaucggguacuaccggcgcgccacgcggcgcauccggggcggggacggcaagaugaaggaccugagcccccgcugguacuucuacuaccucggcaccgggccggaggccggccugcccuacggggccaacaaggacggcaucaucugggucgcgaccgagggcgcccugaacacccccaaggaccacaucgggacgcggaaccccgccaacaacgccgcgaucgugcuccagcugccgcagggcaccacccugcccaagggguucuacgccgagggcagccgcgggggcucccaggccagcucccggagcuccagccgcucccggaacagcucccgcaacagcacccccagcuccagccggggcacgucccccgcccgcauggccgggaacggcggggacgcggcccucgcccugcugcuccuggaccggcugaaccagcucgagagcaagauguccggcaaggggcagcagcagcagggccagaccgugaccaagaaguccgccgccgaggcguccaagaagccgcgccagaagcgcaccgccacgaaggccuacaacgucacccaggccuucggccggcgcgggcccgagcagacccagggcaacuucggggaccaggagcugauccggcagggcaccgacuacaagcacuggccccagaucgcccaguucgcgcccagcgccuccgccuucuucgggaugagccgcaucggcauggaggugacgccguccggcaccuggcugaccuacaccggggccaucaagcucgacgacaaggaccccaacuucaaggaccaggugauccugcugaacaagcacaucgacgccuacaagacguucccgcccaccgagcccaagaaggacaagaagaagaaggcggacgagacccaggcccucccccagcggcagaagaagcagcagaccgucacgcugcugcccgccgccgaccucgacgacuucagcaagcagcugcagcaguccaugagcuccgcggacagcacccaggccugaggacuagucccuguucccagagcccacuuuuuuuucuuuuuuugaaauaaaauagccugucuuucagaucucaaaggcucuuuucagagccaccaaaaaaaaaaaaaaaaaaaaaaaaaaaaaaaaaaaaaaaaaaaaaaaaaaaaaaaaaaaaaaaaaaaaaaaaaaaaaaaaaaaaaaaaaaaaaaaaaaaaa

SEQ ID NO: 19288 - RNA, 1532 nt, Artificial Sequence
  SARS-CoV-2__MT706164.1__nucleocapsid protein (N) mRNA gc
aggagagucccgcagucggcguccagcggcucugcuuguucgugugugugucguugcaggccuuauucaagcuuaccaugagcgacaacggcccccagaaccagcgcaacgccccgcggaucaccuucgggggccccuccgacagcaccggguccaaccagaacggcgagcgcagcggggcccgguccaagcagcgccggccccagggccugcccaacaacacggcgagcugguucaccgcccucacccagcacggcaaggaggaccugaaguucccgcgcgggcagggcgugcccaucaacaccaacuccagccccgacgaccagaucggguacuaccggcgcgccacgcggcgcauccggggcggggacggcaagaugaaggaccugagcccccgcugguacuucuacuaccucggcaccgggccggaggccggccugcccuacggggccaacaaggacggcaucaucugggucgcgaccgagggcgcccugaacacccccaaggaccacaucgggacgcggaaccccgccaacaacgccgcgaucgugcuccagcugccgcagggcaccacccugcccaagggguucuacgccgagggcucccgcgggggcucccaggccagcucccggagcuccagccgcucccggaacagcucccgcaacagcacccccggcagcucccgggggacgagccccgcccgcauggccggcaacgggggcgacgcggcccucgcccugcugcuccuggaccggcugaaccagcucgaguccaagaugagcgggaagggccagcagcagcagggccagaccgugaccaagaaguccgccgccgaggcgagcaagaagccgcgccagaagcgcaccgccacgaaggccuacaacgucacccaggccuucgggcggcgcggccccgagcagacccaggggaacuucggcgaccaggagcugauccggcaggggaccgacuacaagcacuggccccagaucgcccaguucgcgcccuccgccagcgccuucuucggcaugucccgcaucggcauggaggugacgccgagcgggacccugcucaccuacaccggcgccaucaagcuggacgacaaggaccccaacuucaaggaccaggugauccugcucaacaagcacaucgacgccuacaagacguucccgcccaccgagcccaagaaggacaagaagaagaaggcggacgagacccaggcccugccccagcggcagaagaagcagcagaccgucacgcugcuccccgccgccgaccuggacgacuucuccaagcagcugcagcagagcauguccagcgcggacuccacccaggccugaggacuagucccuguucccagagcccacuuuuuuuucuuuuuuugaaauaaaauagccugucuuucagaucucaaaggcucuuuucagagccaccaaaaaaaaaaaaaaaaaaaaaaaaaaaaaaaaaaaaaaaaaaaaaaaaaaaaaaaaaaaaaaaaaaaaaaaaaaaaaaaaaaaaaaaaaaaaaaaaaaaaa

SEQ ID NO: 19289 - RNA, 1532 nt, Artificial Sequence
  SARS-CoV-2__MT706232.1__nucleocapsid protein (N) mRNA gc
aggagagucccgcagucggcguccagcggcucugcuuguucgugugugugucguugcaggccuuauucaagcuuaccaugagcgacaacggcccccagaaccagcgcaacgccccgcggaucaccuucgggggccccuccgacagcaccggguccaaccagaacggcgagcgcagcggggcccgguccaagcagcgccggccccagggccugcccaacaacacggcgagcugguucaccgcccucacccagcacggcaaggaggaccugaaguucccgcgcgggcagggcgugcccaucaacaccaacuccagccccgacgaccagaucggguacuaccggaucgccacgcgccggauccgcggcggggacggcaagaugaaggaccugagcccccggugguacuucuacuaccucggcaccgggccggaggccggccugcccuacggggccaacaaggacggcaucaucugggucgcgaccgagggcgcccugaacacccccaaggaccacaucgggacgcgcaaccccgccaacaacgccgcgaucgugcuccagcugccgcagggcaccacccugcccaagggguucuacgccgagggcucccgcgggggcucccaggccagcucccggagcuccagccggucccgcaacagcucccggaacagcacccccggcagcucccgcgggacgagccccgcccggauggccggcaacgggggcgacgcggcccucgcccugcugcuccuggaccgccugaaccagcucgaguccaagaugagcgggaagggccagcagcagcagggccagaccgugaccaagaaguccgccgccgaggcgagcaagaagccgcggcagaagcgcaccgccacgaaggccuacaacgucacccaggccuucgggcgccggggccccgagcagacccaggggaacuucggcgaccaggagcugauccgccaggggaccgacuacaagcacuggccccagaucgcccaguucgcgcccuccgccagcgccuucuucggcaugucccggaucggcauggaggugacgccgagcgggaccuggcugaccuacaccggcgccaucaagcucgacgacaaggaccccaacuucaaggaccaggugauccugcugaacaagcacaucgacgccuacaagacguucccgcccaccgagcccaagaaggacaagaagaagaaggcggacgagacccaggcccucccccagcgccagaagaagcagcagaccgucacgcugcugcccgccgccgaccucgacgacuucuccaagcagcugcagcagagcauguccagcgcggacuccacccaggccugaggacuagucccuguucccagagcccacuuuuuuuucuuuuuuugaaauaaaauagccugucuuucagaucucaaaggcucuuuucagagccaccaaaaaaaaaaaaaaaaaaaaaaaaaaaaaaaaaaaaaaaaaaaaaaaaaaaaaaaaaaaaaaaaaaaaaaaaaaaaaaaaaaaaaaaaaaaaaaaaaaaaa

SEQ ID NO: 19290 - RNA, 1532 nt, Artificial Sequence
  SARS-CoV-2__MT706311.1__nucleocapsid protein (N) mRNA gc
aggagagucccgcagucggcguccagcggcucugcuuguucgugugugugucguugcaggccuuauucaagcuuaccaugagcgacaacggcccccagaaccagcgcaacgccacccggaucaccuucgggggcccguccgacagcacgggguccaaccagaacggcgagcgcagcggggcccgguccaagcagcgccggccccagggccugcccaacaacaccgcgagcugguucaccgcccucacccagcacggcaaggaggaccugaaguucccccgcgggcagggcgugccgaucaacacgaacuccagccccgacgaccagaucggguacuaccggcgcgccacccggcgcauccggggcggggacggcaagaugaaggaccugagcccccgcugguacuucuacuaccucggcaccgggcccgaggccggccugccguacggggccaacaaggacggcaucaucugggucgcgaccgagggcgcccugaacacgcccaaggaccacaucgggacccggaaccccgccaacaacgccgcgaucgugcuccagcugccccagggcaccacccugccgaagggguucuacgccgagggcucccgcgggggcucccaggccagcucccggagcuccagccgcucccggaacagcucccgcaacagcacgcccggcagcucccgggggaccagccccgcccgcauggccggcaacgggggcgacgcggcccucgcccugcugcuccuggaccggcugaaccagcucgaguccaagaugagcgggaagggccagcagcagcagggccagaccgugaccaagaaguccgccgccgaggcgagcaagaagccccgccagaagcgcacggccaccaaggccuacaacgucacccaggccuucgggcggcgcggcccggagcagacccaggggaacuucggcgaccaggagcugauccggcaggggacggacuacaagcacuggccccagaucgcccaguucgcgcccuccgccagcgccuucuucggcaugucccgcaucggcauggaggugacccccagcgggaccuggcugaccuacacgggcgccaucaagcucgacgacaaggacccgaacuucaaggaccaggugauccugcugaacaagcacaucgacgccuacaagaccuucccgcccaccgagcccaagaaggacaagaagaagaaggcggacgagacccaggcccucccccagcggcagaagaagcagcagacggucacccugcugcccgccgccgaccucgacgacuucuccaagcagcugcagcagagcauguccagcgcggacuccacccaggccugaggacuagucccuguucccagagcccacuuuuuuuucuuuuuuugaaauaaaauagccugucuuucagaucucaaaggcucuuuucagagccaccaaaaaaaaaaaaaaaaaaaaaaaaaaaaaaaaaaaaaaaaaaaaaaaaaaaaaaaaaaaaaaaaaaaaaaaaaaaaaaaaaaaaaaaaaaaaaaaaaaaaa

SEQ ID NO: 19291 - RNA, 1532 nt, Artificial Sequence
  SARS-CoV-2__MT706312.1__nucleocapsid protein (N) mRNA gc
aggagagucccgcagucggcguccagcggcucugcuuguucgugugugugucguugcaggccuuauucaagcuuaccaugagcgacaacggcccccagaaccagcgcaacgccccgcggaucaccuucgggggccccuccgacagcaccggguccaaccagaacggcgagcgcagcggggcccgguccaagcagcgccggccccagggccugcccaacaacacggcgagcugguucaccgcccucacccagcacggcaaggaggaccugaaguucccgcgcgggcagggcgugcccaucaacaccaacuccagccccgacgaccagaucggguacuaccggcgcgccacgcggcgcauccggggcggggacggcaagaugaaggaccugagcccccgcugguacuucuacuaccucggcaccgggccggaggccggccugcccuacggggccaacaaggacggcaucaucugggucgcgaccgagggcgcccugaacacccccaaggaccacaucgggacgcggaaccccgccaacaacgccgcgaucgugcuccagcugccgcagggcaccacccugcccaagggguucuacgccgagggcucccgcgggggcucccaggccagcucccggagcuccagccgcucccggaacagcucccgcaacagcacccccggcagcucccgggggacgagccccggccgcauggccgggaacggcggggacgccgcgcucgcccugcugcuccuggaccggcugaaccagcucgaguccaagaugagcggcaagggccagcagcagcaggggcagaccgugaccaagaaguccgccgccgaggccagcaagaagccgcgccagaagcgcaccgcgacgaaggccuacaacgucacccaggccuucggccggcgcgggcccgagcagacccagggcaacuucggggaccaggagcugauccggcagggcaccgacuacaagcacuggccccagaucgcccaguucgcccccuccgcgagcgccuucuucggcaugucccgcaucgggauggaggugacgccgagcggcaccuggcugaccuacaccggggccaucaagcucgacgacaaggaccccaacuucaaguaccaggugauccugcugaacaagcacaucgacgccuacaagacguucccgcccaccgagcccaagaaggacaagaagaagaaggccgacgagacccaggcgcucccccagcggcagaagaagcagcagaccgucacgcugcugcccgccgccgaccucgacgacuucuccaagcagcugcagcagagcauguccagcgccgacuccacccaggcgugaggacuagucccuguucccagagcccacuuuuuuuucuuuuuuugaaauaaaauagccugucuuucagaucucaaaggcucuuuucagagccaccaaaaaaaaaaaaaaaaaaaaaaaaaaaaaaaaaaaaaaaaaaaaaaaaaaaaaaaaaaaaaaaaaaaaaaaaaaaaaaaaaaaaaaaaaaaaaaaaaaaaa

SEQ ID NO: 19292 - RNA, 1532 nt, Artificial Sequence
  SARS-CoV-2__MT706334.1__nucleocapsid protein (N) mRNA gc
aggagagucccgcagucggcguccagcggcucugcuuguucgugugugugucguugcaggccuuauucaagcuuaccaugagcgacaacggcccccagaaccagcgcaacgccccgcggaucaccuucgggggccccuccgacagcaccggguccaaccagaacggcgagcgcagcggggcccgguccaagcagcgccggccccagggccugcccaacaacacggcgagcugguucaccgcccucacccagcacggcaaggaggaccugaaguucccgcgcgggcagggcgugcccaucaacaccaacuccagccccgacgaccagaucggguacuaccggcgcgccacgcggcgcauccggggcggggacggcaagaugaaggaccugagcccccgcugguacuucuacuaccucggcaccgggccggaggccggccugcccuacggggccaacaaggacggcaucaucugggucgcgaccgagggcgcccugaacacccccaaggaccacaucgggacgcggaaccccgccaacaacgccgcgaucgugcuccagcugccgcagggcaccacccugcccaagggguucuacgccgagggcucccgcgggggcucccaggccagcucccggagcuccagccgcucccggaacagcucccgcaacagcacccccggcagcucccgggggacgagccccgcccgcauggccggcaacgggggcgacgcggcccucgcccugcugcuccuggaccggcugaaccagcucgaguccaagaugagcgggaagggccagcagcagcagggccagaccgugaucaagaaguccgccgccgaggcgagcaagaagccgcgccagaagcgcaccgccaccaaggccuacaacgucacgcaggccuucgggcggcgcggccccgagcagacccaggggaacuucggcgaccaggagcugauccggcaggggaccgacuacaagcacuggccccagaucgcccaguucgcgcccuccgccagcgccuucuucggcaugucccgcaucggcauggaggugaccccgagcgggacguggcugaccuacaccggcgccaucaagcucgacgacaaggaccccaacuucaaggaccaggugauccugcugaacaagcacaucgacgccuacaagaccuucccgcccacggagcccaagaaggacaagaagaagaaggcggacgagacccaggcccucccccagcggcagaagaagcagcagaccgucacccugcugcccgccgccgaccucgacgacuucuccaagcagcugcagcagagcauguccagcgcggacuccacgcaggccugaggacuagucccuguucccagagcccacuuuuuuuucuuuuuuugaaauaaaauagccugucuuucagaucucaaaggcucuuuucagagccaccaaaaaaaaaaaaaaaaaaaaaaaaaaaaaaaaaaaaaaaaaaaaaaaaaaaaaaaaaaaaaaaaaaaaaaaaaaaaaaaaaaaaaaaaaaaaaaaaaaaaa

SEQ ID NO: 19293 - RNA, 1532 nt, Artificial Sequence
  SARS-CoV-2__MT706337.1__nucleocapsid protein (N) mRNA gc
aggagagucccgcagucggcguccagcggcucugcuuguucgugugugugucguugcaggccuuauucaagcuuaccaugagcgacaacggcccccagaaccagcgcaacgccccgcggaucaccuucgggggccccuccgacagcaccggguccaaccagaacggcgagcgcagcggggcccgguccaagcagcgccggccccagggccugcccaacaacacggcgagcugguucaccgcccucacccagcacggcaaggaggaccugaaguucccgcgcgggcagggcgugcccaucaacaccaacuccagccccgacgaccagaucggguacuaccggcgcgccacgcggcgcauccggggcggggacggcaagaugaaggaccugagcccccgcugguacuucuacuaccucggcaccgggccggaggccggccugcccuacggggccaacaaggacggcaucaucugggucgcgaccgagggcgcccugaacacccccaaggaccacaucgggacgcggaaccccgccaacaacgccgcgaucgugcuccagcugccgcagggcaccacccugcccaagggguucuacgccgagggcucccgcgggggcucccaggccagcucccggagcuccagccgcucccggaacagcucccgcaacagcacccccggcagcucccgggggacgagccccgcccgcauggccggcaacgggggcgacgcggcccucgcccugcugcuccuggaccggcugaaccagcucgaguccaagaugagcgggaagggccagcagcagcagggccagaccgugaccaagaaguccgccgccgaggcgagcaagaagccgcgccagaagcgcaccgccacgaaggccuacaacgucacccaggccuucgggcggcgcggccccgagcagacccaggggaacuucggcgaccaggagcugauccggcaggggaccgacuacaagcacuggccccagaucgcccaguucgcgcccuccgccagcgccuucuucggcaugucccgcaucggcauggaggugacgccgagcgggaccuggcugaccuacaccggcgccaucaagcucgacgacaaggaccccaacuucaaggaccaggugauccugcugaacaagcacaucgacgccuacaagacguucccgcccaccgagcccaagaaggacaagaagaagaaggcggacgagacccagguccucccccagcggcagaagaagcagcagaccgugacgcugcugcccgccgccgaccucgacgacuucuccaagcagcugcagcagagcauguccagcgccgacuccacccaggcgugaggacuagucccuguucccagagcccacuuuuuuuucuuuuuuugaaauaaaauagccugucuuucagaucucaaaggcucuuuucagagccaccaaaaaaaaaaaaaaaaaaaaaaaaaaaaaaaaaaaaaaaaaaaaaaaaaaaaaaaaaaaaaaaaaaaaaaaaaaaaaaaaaaaaaaaaaaaaaaaaaaaaa

SEQ ID NO: 19294 - RNA, 1532 nt, Artificial Sequence
  SARS-CoV-2__MT706363.1__nucleocapsid protein (N) mRNA gc
aggagagucccgcagucggcguccagcggcucugcuuguucgugugugugucguugcaggccuuauucaagcuuaccaugagcgacaacggcccccagaaccagcgcaacgccccgcggaucaccuucgggggccccuccgacagcaccggguccaaccagaacggcgagcgcagcggggcccgguccaagcagcgccggccccagggccugcccaacaacacggcgagcugguucaccgcccucacccagcacggcaaggaggaccugaaguucccgcgcgggcagggcgugcccaucaacaccaacuccagccccgacgaccagaucggguacuaccggcgcgccacgcggcgcauccggggcggggacggcaagaugaaggaccugagcccccgcugguacuucuacuaccucggcaccgggccggaggccggccugcccuacggggccaacaaggacggcaucaucugggucgcgaccgagggcgcccugaacacccccaaggaccacaucgggacgcggaaccccgccaacaacgccgcgaucgugcuccagcugccgcagggcaccacccugcccaagggguucuacgccgagggcucccgcgggggcucccaggccagcucccggagcuccagccgcucccggaacagcucccgcaacagcacccccggcagcucccgggggacgagccccgcccgcauggccggcaacgggggcgacgcggcccucgcccugcugcuccuggaccggcugaaccagcucgaguccaagaugagcgggaagggccagcagcagcagggccagaccgugaccaagaaguccgccgccgaggcgagcaagaagccgcgccagaagcgcaccgccacgaaggccuacaacgucacccaggccuucgggcggcgcggccccgagcagacccaggggaacuucggcgaccaggagcugauccggcaggggaccgacuacaagcacuggccccagaucgcccaguucgcgcccuccgccagcgccuucuucggcaugucccgcaucggcauggaggugacgccgagcgggaccuggcugaccuacaccggcgccuucaagcucgacgacaaggaccccaacuucaaggaccaggugauccugcugaacaagcacaucgacgccuacaagacguucccgcccaccgagcccaagaaggacaagaagaagaaggcggacgagacccaggcccucccccagcggcagaagaagcagcagaccgucacgcugcugcccgccgccgaccucgacgacuucuccaagcagcugcagcagagcauguccagcgcggacuccacccaggccugaggacuagucccuguucccagagcccacuuuuuuuucuuuuuuugaaauaaaauagccugucuuucagaucucaaaggcucuuuucagagccaccaaaaaaaaaaaaaaaaaaaaaaaaaaaaaaaaaaaaaaaaaaaaaaaaaaaaaaaaaaaaaaaaaaaaaaaaaaaaaaaaaaaaaaaaaaaaaaaaaaaaa

SEQ ID NO: 19295 - RNA, 1532 nt, Artificial Sequence
  SARS-CoV-2__MT706376.1__nucleocapsid protein (N) mRNA gc
aggagagucccgcagucggcguccagcggcucugcuuguucgugugugugucguugcaggccuuauucaagcuuaccaugagcgacaacggcccccagaaccagcgcaacgccccgcggaucaccuucgggggccccuccgacagcaccggguccaaccagaacggcgagcgcagcggggcccgguccaagcagcgccggccccagggccugcccaacaacacggcgagcugguucaccgcccucacccagcacggcaaggaggaccugaaguucccgcgcgggcagggcgugcccaucaacaccaacuccagccccgacgaccagaucggguacuaccggcgcgccacgcggcgcauccggggcggggacggcaagaugaaggaccugagcccccgcugguacuucuacuaccucggcaccgggccggaggccggccugcccuacggggccaacaaggacggcaucaucugggucgcgaccgagggcgcccugaacacccccaaggaccacaucgggacgcggaaccccgccaacaacgccgcgaucgugcuccagcugccgcagggcaccacccugcccaagggguucuacgccgagggcucccgcgggggcucccaggccagcucccggagcuccagccgcucccggaacagcucccgcaacagcacccccggcagcucccgggggacgagccccgcccgcaucgccggcaacgggggcgacgcggcccucgcccugcugcuccuggaccggcugaaccagcucgaguccaagaugagcgggaagggccagcagcagcagggccagaccgugaccaagaaguccgccgccgaggcgagcaagaagccgcgccagaagcgcaccgccacgaaggccuacaacgucacccaggccuucgggcggcgcggccccgagcagacccaggggaacuucggcgaccaggagcugauccggcaggggaccgacuacaagcacuggccccagaucgcccaguucgcgcccuccgccagcgccuucuucggcaugucccgcaucggcauggaggugacgccgagcgggaccuggcugaccuacaccggcgccaucaagcucgacgacaaggaccccaacuucaaggaccaggugauccugcugaacaagcacaucgacgccuacaagacguucccgcccaccgagcccaagaaggacaagaagaagaaggcggacgagacccaggcccucccccagcggcagaagaagcagcagaccgucacgcugcugcccgccgccgaccucgacgacuucuccaagcagcugcagcagagcauguccagcgcggacuccacccaggccugaggacuagucccuguucccagagcccacuuuuuuuucuuuuuuugaaauaaaauagccugucuuucagaucucaaaggcucuuuucagagccaccaaaaaaaaaaaaaaaaaaaaaaaaaaaaaaaaaaaaaaaaaaaaaaaaaaaaaaaaaaaaaaaaaaaaaaaaaaaaaaaaaaaaaaaaaaaaaaaaaaaaa

SEQ ID NO: 19296 - RNA, 1532 nt, Artificial Sequence
  SARS-CoV-2__MT706398.1__nucleocapsid protein (N) mRNA gc
aggagagucccgcagucggcguccagcggcucugcuuguucgugugugugucguugcaggccuuauucaagcuuaccaugagcgacaacggcccccagaaccagcgcaacgccccgcggaucaccuucgggggccccuccgacagcaccggguccaaccagaacggcgagcgcagcggggcccgguccaagcagcgccggccccagggccugcccaacaacacggcgagcugguucaccgcccucacccagcacggcaaggaggaccugaaguucccgcgcgggcagggcgugcccaucaacaccaacuccagccccgacgaccagaucggguacuaccggcgcgccacgcggcgcauccggggcggggacggcaagaugaaggaccugagcccccgcugguacuucuacuaccucggcaccgggccggaggccggccugcccuacggggccaacaaggacggcaucaucugggucgcgaccgagggcgcccugaacacccccaagcaccacaucgggacgcggaaccccgccaacaacgccgcgaucgugcuccagcugccgcagggcaccacccugcccaagggguucuacgccgagggcucccgcgggggcucccaggccagcucccggagcuccagccgcucccggaacagcucccgcaacagcacccccggcagcucccgggggacgagccccgcccgcauggccggcaacgggggcgacgcggcccucgcccugcugcuccuggaccggcugaaccagcucgaguccaagaugagcgggaagggccagcagcagcagggccagaccgugaccaagaaguccgccgccgaggcgagcaagaagccgcgccagaagcgcaccgccacgaaggccuacaacgucacccaggccuucgggcggcgcggccccgagcagacccaggggaacuucggcgaccaggagcugauccggcaggggaccgacuacaagcacuggccccagaucgcccaguucgcgcccuccgccagcgccuucuucggcaugucccgcaucggcauggaggugacgccgagcgggaccuggcugaccuacaccggcgccaucaagcucgacgacaaggaccccaacuucaaggaccaggugauccugcugaacaagcacaucgacgccuacaagacguucccgcccaccgagcccaagaaggacaagaagaagaaggcggacgagacccaggcccucccccagcggcagaagaagcagcagaccgucacgcugcugcccgccgccgaccucgacgacuucuccaagcagcugcagcagagcauguccagcgcggacuccacccaggccugaggacuagucccuguucccagagcccacuuuuuuuucuuuuuuugaaauaaaauagccugucuuucagaucucaaaggcucuuuucagagccaccaaaaaaaaaaaaaaaaaaaaaaaaaaaaaaaaaaaaaaaaaaaaaaaaaaaaaaaaaaaaaaaaaaaaaaaaaaaaaaaaaaaaaaaaaaaaaaaaaaaaa

SEQ ID NO: 19297 - RNA, 1532 nt, Artificial Sequence
  SARS-CoV-2__MT704017.1__nucleocapsid protein (N) mRNA gc
aggagagucccgcagucggcguccagcggcucugcuuguucgugugugugucguugcaggccuuauucaagcuuaccaugagcgacaacggcccccagaaccagcgcaacgccccgcggaucaccuucgggggccccuccgacagcaccggguccaaccagaacggcgagcgcagcggggcccgguccaagcagcgccggccccagggccugcccaacaacacggcgagcugguucaccgcccucacccagcacggcaaggaggaccugaaguucccgcgcgggcagggcgugcccaucaacaccaacuccagccccgacgaccagaucggguacuaccggcgcgccacgcggcgcauccggggcggggacggcaagaugaaggaccugagcccccgcugguacuucuacuaccucggcaccgggccggaggucggccugcccuacggggccaacaaggacggcaucaucuggguggccaccgagggcgcgcugaacacccccaaggaccacaucgggacgcggaaccccgccaacaacgccgccaucgugcuccagcugccgcagggcaccacccugcccaagggguucuacgcggagggcucccgcgggggcucccaggccagcucccggagcuccagccgcucccggaacagcucccgcaacagcacccccggcagcucccgggggacgagccccgcccgcauggccggcaacgggggcgacgccgcgcucgcccugcugcuccuggaccggcugaaccagcucgaguccaagaugagcgggaagggccagcagcagcagggccagaccgucaccaagaaguccgccgccgaggccagcaagaagccgcgccagaagcgcaccgcgacgaaggccuacaacgugacccaggccuucgggcggcgcggccccgagcagacccaggggaacuucggcgaccaggagcugauccggcaggggaccgacuacaagcacuggccccagaucgcccaguucgcccccuccgcgagcgccuucuucggcaugucccgcaucggcauggaggugacgccgagcgggaccuggcugaccuacaccggcgccaucaagcucgacgacaaggaccccaacuucaaggaccaggucauccugcugaacaagcacaucgacgccuacaagacguucccgcccaccgagcccaagaaggacaagaagaagaaggccgacgagacccaggcgcucccccagcggcagaagaagcagcagaccgugacgcugcugcccgccgccgaccucgacgacuucuccaagcagcugcagcagagcauguccagcgccgacuccacccaggcgugaggacuagucccuguucccagagcccacuuuuuuuucuuuuuuugaaauaaaauagccugucuuucagaucucaaaggcucuuuucagagccaccaaaaaaaaaaaaaaaaaaaaaaaaaaaaaaaaaaaaaaaaaaaaaaaaaaaaaaaaaaaaaaaaaaaaaaaaaaaaaaaaaaaaaaaaaaaaaaaaaaaaa

SEQ ID NO: 19298 - RNA, 1532 nt, Artificial Sequence
  SARS-CoV-2__MT704066.1__nucleocapsid protein (N) mRNA gc
aggagagucccgcagucggcguccagcggcucugcuuguucgugugugugucguugcaggccuuauucaagcuuaccaugagcgacaacggcccccagaaccagcgcaacgccccgcggaucaccuucgggggccccuccgacagcaccggguccaaccagaacggcgagcgcagcggggcccgguccaagcagcgccggccccagggccugcccaacaacacggcgagcugguucaccgcccucacccagcacggcaaggaggaccugaaguucccgcgcgggcagggcgugcccaucaacaccaacuccagccccgacgaccagaucggguacuaccggcgcgccacgcggcgcauccggggcggggacggcaagaugaaggaccugagcccccgcugguacuucuacuaccucggcaccgggccggaggccggccugcccuacggggccaacaaggacggcaucaucugggucgcgaccgagggcgcccugaacacccccaaggaccacaucgggacgcggaacagcgccaacaacgccgcgaucgugcuccagcugccccagggcaccacccugccgaagggguucuacgccgagggcucccgcgggggcagccaggccuccagccgguccagcucccgcagccggaacuccagccgcaacagcacccccggcuccagccgggggacgucccccgcccgcauggccggcaacgggggcgacgcggcccucgcccugcugcuccuggaccggcugaaccagcucgagagcaagauguccgggaagggccagcagcagcagggccagaccgugaccaagaaguccgccgccgaggcguccaagaagccccgccagaagcgcaccgccacgaaggccuacaacgucacccaggccuucgggcggcgcggcccggagcagacccaggggaacuucggcgaccaggagcugauccggcaggggaccgacuacaagcacuggccccagaucgcccaguucgcgcccagcgccuccgccuucuucggcaugagccgcaucggcauggaggugacgcccuccgggaccuggcugaccuacaccggcgccaucaagcucgacgacaaggacccgaacuucaaggaccaggugauccugcugaacaagcacaucgacgccuacaagacguucccgcccaccgagcccaagaaggacaagaagaagaaggcggacgagacccaggcccucccccagcggcagaagaagcagcagaccgucacgcugcugcccgccgccgaccucgacgacuucagcaagcagcugcagcaguccaugagcuccgcggacagcacccaggccugaggacuagucccuguucccagagcccacuuuuuuuucuuuuuuugaaauaaaauagccugucuuucagaucucaaaggcucuuuucagagccaccaaaaaaaaaaaaaaaaaaaaaaaaaaaaaaaaaaaaaaaaaaaaaaaaaaaaaaaaaaaaaaaaaaaaaaaaaaaaaaaaaaaaaaaaaaaaaaaaaaaaa

SEQ ID NO: 19299 - RNA, 1532 nt, Artificial Sequence
  SARS-CoV-2__MT704068.1__nucleocapsid protein (N) mRNA gc
aggagagucccgcagucggcguccagcggcucugcuuguucgugugugugucguugcaggccuuauucaagcuuaccaugagcgacaacggcccccagaaccagcgcaacgccccgcggaucaccuucgggggccccuccgacagcaccggguccaaccagaacggcgagcgcagcggggcccgguccaagcagcgccggccccagggccugcccaacaacacggcgagcugguucaccgcccucacccagcacggcaaggaggaccugaaguucccgcgcgggcagggcgugcccaucaacaccaacuccagccccgacgaccagaucggguacuaccggcgcgccacgcggcgcauccggggcggggacggcaagaugaaggaccugagcccccgcugguacuucuacuaccucggcaccgggccggaggccggccugcccuacggggccaacaaggacggcaucaucugggucgcgaccgagggcgcccugaacacccccaaggaccacaucgggacgcggaaccccgccaacaacgccgcgaucgugcuccagcugccgcagggcaccacccugcccaagggguucuacgccgagggcucccgcgggggcucccaggccagcucccggagcuccagccgcucccggaacagcucccgcaacagcacccccggcagcucccgggggacgagccccgcccgcauggccggcaacgggggcgacgcggcccucgcccugcugcuccuggaccggcugaaccagcucgaguccaagaugagcgggaagggccagcagcagcagggccagaccgugaccaagaaguccgccgccgaggcgagcaagaagccgcgccagaagcgcaccgccacgaaggccuacaacgucacccaggccuucgggcggcgcggccccgagcagacccaggggaacuucggcgaccuggagcugauccggcaggggaccgacuacaagcacuggccccagaucgcccaguucgcgcccuccgccagcgccuucuucggcaugucccgcaucggcauggaggugacgccgagcgggaccuggcucaccuacaccggcgccaucaagcuggacgacaaggaccccaacuucaaggaccaggugauccugcucaacaagcacaucgacgccuacaagacguucccgcccaccgagcccaagaaggacaagaagaagaaggcggacgagacccaggcccugccccagcggcagaagaagcagcagaccgucacgcugcuccccgccgccgaccuggacgacuucuccaagcagcugcagcagagcauguccagcgcggacuccacccaggccugaggacuagucccuguucccagagcccacuuuuuuuucuuuuuuugaaauaaaauagccugucuuucagaucucaaaggcucuuuucagagccaccaaaaaaaaaaaaaaaaaaaaaaaaaaaaaaaaaaaaaaaaaaaaaaaaaaaaaaaaaaaaaaaaaaaaaaaaaaaaaaaaaaaaaaaaaaaaaaaaaaaaa

SEQ ID NO: 19300 - RNA, 1532 nt, Artificial Sequence
  SARS-CoV-2__MT704112.1__nucleocapsid protein (N) mRNA gc
aggagagucccgcagucggcguccagcggcucugcuuguucgugugugugucguugcaggccuuauucaagcuuaccaugagcgacaacggcccccagaaccagcgcaacgccccgcggaucaccuucgggggccccuccgacagcaccggguccaaccagaacggcgagcgcagcggggcccgguccaagcagcgccggccccagggccugcccaacaacacggcgagcugguucaccgcccucacccagcacggcaaggaggaccugaaguucccgcgcgggcagggcgugcccaucaacaccaacuccagccccgacgaccagaucggguacuaccggcgcgccacgcggcgcauccggggcggggacggcaagaugaaggaccugagcccccgcugguacuucuacuaccucggcaccgggccggaggccggccugcccuacggggccaacaaggacggcaucaucugggucgcgaccgagggcgcccugaacacccccaaggaccacaucgggacgcggaaccccgccaacaacgccgcgaucgugcuccagcugccgcagggcaccacccugcccaagggguucuacgccgagggcagccgcgggggcucccaggccagcucccggagcuccagccgcucccggaacaacagccgcaacuccacccccggcagcagccgggggacgucccccgcccgcauggccggcaacgggggcgacgcggcccucgcccugcugcuccuggaccggcugaaccagcucgagagcaagauguccgggaagggccagcagcagcagggccagaccgugaccaagaaguccgccgccgaggcguccaagaagccgcgccagaagcgcaccgccacgaaggccuacaacgucacccaggccuucgggcggcgcggccccgagcagacccaggggaacuucggcgaccaggagcugauccggcaggggaccgacuacaagcacuggccccagaucgcccaguucgcgcccagcgccuccgccuucuucggcaugagccgcaucggcauggaggugacgccguccgggaccuggcugaccuacaccggcgccaucaagcucgacgacaaggaccccaacuucaaggaccaggugauccugcugaacaagcacaucgacgccuacaagacguucccgcccaccgagcccaagaaggacaagaagaagaaggcggacgagacccaggcccucccccagcggcagaagaagcagcagaccgucacgcugcugcccgccgccgaccucgacgacuucagcaagcagcugcagcaguccaugagcuccgcggacagcacccaggccugaggacuagucccuguucccagagcccacuuuuuuuucuuuuuuugaaauaaaauagccugucuuucagaucucaaaggcucuuuucagagccaccaaaaaaaaaaaaaaaaaaaaaaaaaaaaaaaaaaaaaaaaaaaaaaaaaaaaaaaaaaaaaaaaaaaaaaaaaaaaaaaaaaaaaaaaaaaaaaaaaaaaa

SEQ ID NO: 19301 - RNA, 1532 nt, Artificial Sequence
  SARS-CoV-2__MT683418.1__nucleocapsid protein (N) mRNA gc
aggagagucccgcagucggcguccagcggcucugcuuguucgugugugugucguugcaggccuuauucaagcuuaccaugagcgacaacggcccccagaaccagcgcaacgccccgcggaucaccuucgggggccccuccgacagcaccggguccaaccagaacggcgagcgcagcgggucccggagcaagcagcgccggccccagggccugcccaacaacacggccuccugguucaccgcgcucacccagcacggcaaggaggaccugaaguucccgcgcgggcagggcgugcccaucaacaccaacagcucccccgacgaccagaucggguacuaccggcgcgccacgcggcgcauccggggcggggacggcaagaugaaggaccugagcccccgcugguacuucuacuaccucggcaccgggccggaggccggccugcccuacggggccaacaaggacggcaucaucugggucgccaccgagggcgcgcugaacacccccaaggaccacaucgggacgcggaaccccgccaacaacgccgccaucgugcuccagcugccgcagggcaccacccugcccaagggguucuacgcggagggcucccgcgggggcagccaggccuccagccgguccagcucccgcagccggaacuccagccgcaacagcacccccggcuccagccgggggacgucccccgcccgcauggccggcaacgggggcgacgccgcgcucgcccugcugcuccuggaccggcugaaccagcucgagagcaagauguccgggaagggccagcagcagcagggccagaccgugaccaagaaguccgccgccgaggccagcaagaagccgcgccagaagcgcaccgcgacgaaggccuacaacgucacccaggccuucgggcggcgcggccccgagcagacccaggggaacuucggcgaccaggagcugauccggcaggggaccgacuacaagcacuggccccagaucgcccaguucgcccccagcgcguccgccuucuucggcaugagccgcaucggcauggaggugacgccguccgggaccuggcugaccuacaccggcgccaucaagcucgacgacaacgaccccaacuucaaggaccaggugauccugcugaacaagcacaucgacgccuacaagacguucccgcccaccgagcccaagaaggacaagaagaagaaggccgacgagacccaggcgcucccccagcggcagaagaagcagcagaccgucacgcugcugcccgccgccgaccucgacgacuucagcaagcagcugcagcaguccaugagcuccgccgacagcacccaggcgugaggacuagucccuguucccagagcccacuuuuuuuucuuuuuuugaaauaaaauagccugucuuucagaucucaaaggcucuuuucagagccaccaaaaaaaaaaaaaaaaaaaaaaaaaaaaaaaaaaaaaaaaaaaaaaaaaaaaaaaaaaaaaaaaaaaaaaaaaaaaaaaaaaaaaaaaaaaaaaaaaaaaa

SEQ ID NO: 19302 - RNA, 1532 nt, Artificial Sequence
  SARS-CoV-2__MT678839.1__nucleocapsid protein (N) mRNA gc
aggagagucccgcagucggcguccagcggcucugcuuguucgugugugugucguugcaggccuuauucaagcuuaccaugagcgacaacggcccccagaaccagcgcaacgccccgcggaucaccuucgggggccccuccgacagcaccggguccaaccagaacggcgagcgcagcggggcccgguccaagcagcgccggccccagggccugcccaacaacacggcgagcugguucaccgcccucacccagcacggcaaggaggaccugaaguucccgcgcgggcagggcgugcccaucaacaccaacuccagccccgacgaccagaucggguacuaccggcgcgccacgcggcgcauccggggcggggacggcaagaugaaggaccugagcccccgcugguacuucuacuaccucggcaccgggccggaggccggccugcccuacggggccaacaaggacggcaucaucugggucgcgaccgagggcgcccugaacacccccaaggaccacaucgggacgcggaaccccgccaacaacgccgcgaucgugcuccagcugccgcagggcaccacccugcccaagggguucuacgccgagggcucccgcgggggcucccaggccagcucccggagcuccagccgcucccggaacagcucccgcaacagcacccccggcagcucccgggggacgagccccgcccgcauggccggcaacgggggcgacgcggcccucgcccugcugcuccuggaccggcugaaccagcucgaguccaagaugagcgggaagggccagcagcagcagggccagaccgugaccaagaaguccgccgccgaggcgagcaagaagccgcgccagaagcgcaccgccacgaaggccuacaacgucacccaggccuucgggcggcgcggccccgagcagacccaggggaacuucggcgaccaggagcugauccggcaggggaccgacuacaagcacuggccccagaucgcccaguucgcgcccuccgccagcgccuucuucggcaugucccgcaucggcauggaggugacgccgagcgggaccuggcugaccuacaccggcgccaucaagcucgacgacaaggaccccaacuucaaggaccaggugauccugcugaacaagcacaucgacgccuacaucacguucccgcccaccgagcccaagaaggacaagaagaagaaggcggacgagacccaggcccucccccagcggcagaagaagcagcagaccgucacgcugcugcccgccgccgaccucgacgacuucuccaagcagcugcagcagagcauguccagcgcggacuccacccaggccugaggacuagucccuguucccagagcccacuuuuuuuucuuuuuuugaaauaaaauagccugucuuucagaucucaaaggcucuuuucagagccaccaaaaaaaaaaaaaaaaaaaaaaaaaaaaaaaaaaaaaaaaaaaaaaaaaaaaaaaaaaaaaaaaaaaaaaaaaaaaaaaaaaaaaaaaaaaaaaaaaaaaa

SEQ ID NO: 19303 - RNA, 1532 nt, Artificial Sequence
  SARS-CoV-2__MT611442.1__nucleocapsid protein (N) mRNA gc
aggagagucccgcagucggcguccagcggcucugcuuguucgugugugugucguugcaggccuuauucaagcuuaccaugagcgacaacggcccccagaaccagcgcaacgccccgcggaucaccuucgggggccccuccgacagcaccggguccaaccagaacggcgagcgcagcggggcccgguccaagcagcgccggccccagggccugcccaacaacacggcgagcugguucaccgcccucacccagcacggcaaggaggaccugaaguucccgcgcgggcagggcgugcccaucaacaccaacuccagccccgacgaccagaucggguacuaccggcgcgccacgcggcgcauccggggcggggacggcaagaugaaggaccugagcccccgcugguacuucuacuaccucggcaccgggccggaggccggccugcccuacggggccaacaaggacggcaucaucugggucgcgaccgagggcgcccugaacacccccaaggaccacaucgggacgcggaaccccgccaacaacgccgcgaucgugcuccagcugccgcagggcaccacccugcccaagggguucuacgccgagggcucccgcgggggcucccaggccagcucccggagcuccagccgcucccggaacagcucccgcaacagcacccccggcagcucccgggggacgagccccgcccgcauggccggcaacgggggcgacgcggcccucgcccugcugcuccuggaccggcugaaccagcucgaguccaagaugagcgggaagggccagcagcagcagggccagaccgugaccaagaaguccgccgccgaggcgagcaagaagccgcgccagaagcgcaccgccacgaaggccuacaacgucacccaggccuucgggcggcgcggccccgagcagauccaggggaacuucggcgaccaggagcugauccggcaggggaccgacuacaagcacuggccccagaucgcccaguucgcgcccuccgccagcgccuucuucggcaugucccgcaucggcauggaggugaccccgagcgggacguggcugaccuacaccggcgccaucaagcucgacgacaaggaccccaacuucaaggaccaggugauccugcugaacaagcacaucgacgccuacaagaccuucccgcccacggagcccaagaaggacaagaagaagaaggcggacgagacccaggcccucccccagcggcagaagaagcagcagaccgucacccugcugcccgccgccgaccucgacgacuucuccaagcagcugcagcagagcauguccagcgcggacuccacgcaggccugaggacuagucccuguucccagagcccacuuuuuuuucuuuuuuugaaauaaaauagccugucuuucagaucucaaaggcucuuuucagagccaccaaaaaaaaaaaaaaaaaaaaaaaaaaaaaaaaaaaaaaaaaaaaaaaaaaaaaaaaaaaaaaaaaaaaaaaaaaaaaaaaaaaaaaaaaaaaaaaaaaaaa

SEQ ID NO: 19304 - RNA, 1532 nt, Artificial Sequence
  SARS-CoV-2__MT676368.1__nucleocapsid protein (N) mRNA gc
aggagagucccgcagucggcguccagcggcucugcuuguucgugugugugucguugcaggccuuauucaagcuuaccaugagcgacaacggcccccagaaccagcgcaacgccccgcggaucaccuucgggggccccuccgacagcaccggguccaaccagaacggcgagcgcagcggggcccgguccaagcagcgccggccccagggccugcccaacaacacggcgagcugguucaccgcccucacccagcacggcaaggaggaccugaaguucccgcgcgggcagggcgugcccaucaacaccaacuccagccccgacgaccagaucggguacuaccggcgcgccacgcggcgcauccggggcggggacggcaagaugaaggaccugagcccccgcugguacuucuacuaccucggcaccgggccggaggccggccugcccuacggggccaacaaggacggcaucaucugggucgcgaccgagggcgcccugaacacccccaaggaccacaucgggacgcggaaccccgccaacaacgccgcgaucgugcuccagcugccgcagggcaccacccugcccaagggguucuacgccgagggcagccgcgggggcucccaggccagcucccggagcuccagccgcucccggaacagccuccgcaacuccacccccggcagcagccgggggacgucccccgcccgcauggccggcaacgggggcgacgcggugcuggcccugcuccugcuggaccggcucaaccagcuggagagcaagauguccgggaagggccagcagcagcagggccagaccgucaccaagaaguccgccgccgaggccuccaagaagccgcgccagaagcgcaccgcgacgaaggccuacaacgugacccaggccuucgggcggcgcggccccgagcagacccaggggaacuucggcgaccaggagcugauccggcaggggaccgacuacaagcacuggccccagaucgcccaguucgcccccagcgcguccgccuucuucggcaugagccgcaucggcauggaggugacgccguccgggaccuggcucaccuacaccggcgccaucaagcuggacgacaaggaccccaacuucaaggaccaggucauccugcucaacaagcacaucgacgccuacaagacguucccgcccaccgagcccaagaaggacaagaagaagaaggccgacgagacccaggcgcugccccagcggcagaagaagcagcagaccgugacgcugcuccccgccgccgaccuggacgacuucagcaagcagcugcagcaguccaugagcuccgccgacagcacccaggcgugaggacuagucccuguucccagagcccacuuuuuuuucuuuuuuugaaauaaaauagccugucuuucagaucucaaaggcucuuuucagagccaccaaaaaaaaaaaaaaaaaaaaaaaaaaaaaaaaaaaaaaaaaaaaaaaaaaaaaaaaaaaaaaaaaaaaaaaaaaaaaaaaaaaaaaaaaaaaaaaaaaaaa

SEQ ID NO: 19305 - RNA, 1532 nt, Artificial Sequence
  SARS-CoV-2__MT669322.1__nucleocapsid protein (N) mRNA gc
aggagagucccgcagucggcguccagcggcucugcuuguucgugugugugucguugcaggccuuauucaagcuuaccaugagcgacaacggcccccagaaccagcgcaacgccccgcggaucaccuucgggggccccuccgacagcaccggguccaaccagaacggcgagcgcagcggggcccgguccaagcagcgccggccccagggccugcccaacaacacggcgagcugguucaccgcccucacccagcacggcaaggaggaccugaaguucccgcgcgggcagggcgugcccaucaacaccaacuccagccccgacgaccagaucggguacuaccggcgcgccacgcggcgcauccggggcggggacggcaagaugaaggaccugagcccccgcugguacuucuacuaccucggcaccgggccggaggccggccugcccuacggggccaacaaggacggcaucaucugggucgcgaccgagggcgcccugaacacccccaaggaccacaucgggacgcggaaccccgccaacaacgccgcgaucgugcuccagcugccgcagggcaccacccugcccaagggguucuacgccgagggcagccgcgggggcucccaggccagcucccggagcuccagccgcucccggaacagccuccgcaacuccacccccggcagcagcgggcggacgucccccgcccgcauggccggcaacgggggcgacgcggcccuggcccugcuccugcuggaccggcucaaccagcuggagagcaagauguccgggaagggccagcagcagcagggccagaccgugaccaagaaguccgccgccgaggcguccaagaagccgcgccagaagcgcaccgccacgaaggccuacaacgucacccaggccuucgggcggcgcggccccgagcagacccaggggaacuucggcgaccaggagcugauccggcaggggaccgacuacaagcacuggccccagaucgcccaguucgcgcccagcgccuccgccuucuucggcaugagccgcaucggcauggaggugacgccguccgggaccuggcucaccuacaccggcgccaucaagcuggacgacaaggaccccaacuucaaggaccaggugauccugcucaacaagcacaucgacgccuacaagacguucccgcccaccgagcccaagaaggacaagaagaagaaggcggacgagacccaggcccugccccagcggcagaagaagcagcagaccgucacgcugcuccccgccgccgaccuggacgacuucagcaagcagcugcagcaguccaugagcuccgcggacagcacccaggccugaggacuagucccuguucccagagcccacuuuuuuuucuuuuuuugaaauaaaauagccugucuuucagaucucaaaggcucuuuucagagccaccaaaaaaaaaaaaaaaaaaaaaaaaaaaaaaaaaaaaaaaaaaaaaaaaaaaaaaaaaaaaaaaaaaaaaaaaaaaaaaaaaaaaaaaaaaaaaaaaaaaaa

SEQ ID NO: 19306 - RNA, 1532 nt, Artificial Sequence
  SARS-CoV-2__MT671828.1__nucleocapsid protein (N) mRNA gc
aggagagucccgcagucggcguccagcggcucugcuuguucgugugugugucguugcaggccuuauucaagcuuaccaugagcgacaacggcccccagaaccagcgcaacgccccgcggaucaccuucgggggccccuccgacagcaccggguccaaccagaacggcgagcgcagcggggcccgguccaagcagcgccggccccagggccugcccaacaacacggcgagcugguucaccgcccucacccagcacggcaaggaggaccugaaguucccgcgcgggcagggcgugcccaucaacaccaacuccagccccgacgaccagaucggguacuaccggcgcgccacgcggcgcauccggggcggggacggcaagaugaaggaccugagcccccgcugguacuucuacuaccucggcaccgggccggaggccggccugcccuacggggccaacaaggacggcaucaucugggucgcgaccgagggcgcccugaacacccccaagcaccacaucgggacgcggaaccccgccaacaacgccgcgaucgugcuccagcugccgcagggcaccacccugcccaagggguucuacgccgagggcucccgcgggggcucccaggccagcucccggagcuccagccgcucccggaacagcucccgcaacagcacccccggcagcuccaagcggacgagccccgcccgcauggccgggaacggcggggacgcggcccucgcccugcugcuccuggaccggcugaaccagcucgaguccaagaugagcggcaaggggcagcagcagcagggccagaccgugaccaagaaguccgccgccgaggcgagcaagaagccgcgccagaagcgcaccgccacgaaggccuacaacgucacccaggccuucggccggcgcgggcccgagcagacccagggcaacuucggggaccaggagcugauccggcagggcaccgacuacaagcacuggccccagaucgcccaguucgcgcccuccgccagcgccuucuucgggaugucccgcaucggcauggaggugacgccgagcggcaccuggcugaccuacaccggggccaucaagcucgacgacaaggaccccaacuucaaggaccaggugauccugcugaacaagcacaucgacgccuacaagacguucccgcccaccgagcccaagaaggacaagaagaagaaggcggacgagacccaggcccucccccagcggcagaagaagcagcagaccgucacgcugcugcccgccgccgaccucgacgacuucuccaagcagcugcagcagagcauguccagcgcggacuccacccaggccugaggacuagucccuguucccagagcccacuuuuuuuucuuuuuuugaaauaaaauagccugucuuucagaucucaaaggcucuuuucagagccaccaaaaaaaaaaaaaaaaaaaaaaaaaaaaaaaaaaaaaaaaaaaaaaaaaaaaaaaaaaaaaaaaaaaaaaaaaaaaaaaaaaaaaaaaaaaaaaaaaaaaa

SEQ ID NO: 19307 - RNA, 1532 nt, Artificial Sequence
  SARS-CoV-2__MT664107.1__nucleocapsid protein (N) mRNA gc
aggagagucccgcagucggcguccagcggcucugcuuguucgugugugugucguugcaggccuuauucaagcuuaccaugagcgacaacggcccccagaaccagcgcaacgccccgcggaucaccuucgggggccccuccgacagcaccggguccaaccagaacggcgagcgcagcggggcccgguccaagcagcgccggccccagggccugcccaacaacacggcgagcugguucaccgcccucacccagcacggcaaggaggaccugaaguucccgcgcgggcagggcgugcccaucaacaccaacuccagccccgacgaccagaucggguacuaccggcgcgccacgcggcgcauccggggcggggacggcaagaugaaggaccugagcccccgcugguacuucuacuaccucggcaccgggccggaggccggccugcccuacggggccaacaaggacggcaucaucugggucgcgaccgagggcgcccugaacacccccaaggaccacaucgggacgcggaaccccgccaacaacgccgcgaucgugcuccagcugccgcagggcaccacccugcccaagggguucuacgccgagggcagccgcgggggcucccaggccagcucccggagcuccagccgcucccggaacagccuccgcaacuccacccccggcagcagccgggggacgucccccgcccgcauggccggcaacgggggcgacgcggcccuggcccugcuccugcuggaccggcucaaccagcuggagagcaagauguccgggaagggccagcagcagcagggccagaccgugaccaagaaguccgccgccgaggcguccaagaagccgcgccagaagcgcaccgccacgaaggccuacaaccugauccaggccuucgggcggcgcggccccgagcagacccaggggaacuucggcgaccaggagcucauccggcaggggaccgacuacaagcacuggccccagaucgcccaguucgcgcccagcgccuccgccuucuucggcaugagccgcaucggcauggaggucaccccguccgggacguggcugaccuacaccggcgccaucaagcuggacgacaaggaccccaacuucaaggaccaggugauccuccugaacaagcacaucgacgccuacaagaccuucccgcccacggagcccaagaaggacaagaagaagaaggcggacgagacccaggcccugccccagcggcagaagaagcagcagaccgugacccuccugcccgccgccgaccuggacgacuucagcaagcagcuccagcaguccaugagcuccgcggacagcacgcaggccugaggacuagucccuguucccagagcccacuuuuuuuucuuuuuuugaaauaaaauagccugucuuucagaucucaaaggcucuuuucagagccaccaaaaaaaaaaaaaaaaaaaaaaaaaaaaaaaaaaaaaaaaaaaaaaaaaaaaaaaaaaaaaaaaaaaaaaaaaaaaaaaaaaaaaaaaaaaaaaaaaaaaa

SEQ ID NO: 19308 - RNA, 1532 nt, Artificial Sequence
  SARS-CoV-2__MT664203.1__nucleocapsid protein (N) mRNA gc
aggagagucccgcagucggcguccagcggcucugcuuguucgugugugugucguugcaggccuuauucaagcuuaccaugagcgacaacggcccccagaaccagcgcaacgccccgcggaucaccuucgggggccccuccaacagcaccggguccaaccagaacggcgagcgcagcggggcccgguccaagcagcgccggccccagggccugcccaacaacacggcgagcugguucaccgcccucacccagcacggcaaggaggaccugaaguucccgcgcgggcagggcgugcccaucaacaccaacuccagccccgacgaccagaucggguacuaccggcgcgccacgcggcgcauccggggcggggacggcaagaugaaggaccugagcccccgcugguacuucuacuaccucggcaccgggccggaggccggccugcccuacggggccaacaaggacggcaucaucugggucgcgaccgagggcgcccugaacacccccaaggaccacaucgggacgcggaaccccgccaacaacgccgcgaucgugcuccagcugccgcagggcaccacccugcccaagggguucuacgccgagggcagccgcgggggcucccaggccagcucccggagcuccagccgcucccggaacagccuccgcaacuccacccccggcagcagccgggggacgucccccgcccgcauggccggcaacgggggcgacgcggcccuggcccugcuccugcuggaccggcucaaccagcuggagagcaagauguccgggaagggccagcagcagcagggccagaccgugaccaagaaguccgccgccgaggcguccaagaagccgcgccagaagcgcaccgccacgaaggccuacaacgucacccaggccuucgggcggcgcggccccgagcagacccaggggaacuucggcgaccaggagcugauccggcaggggaccgacuacaagcacuggccccagaucgcccaguucgcgcccagcgccuccgccuucuucggcaugagccgcaucggcauggaggugacgccguccgggaccuggcucaccuacaccggcgccaucaagcuggacgacaaggaccccaacuucaaggaccaggugauccugcucaacaagcacaucgacgccuacaagacguucccgcccaccgagcccaagaaggacaagaagaagaaggcggacgagacccaggcccugccccagcggcagaagaagcagcagaccgucacgcugcuccccgccgccgaccuggacgacuucagcaagcagcugcagcaguccaugagcuccgcggacagcacccaggccugaggacuagucccuguucccagagcccacuuuuuuuucuuuuuuugaaauaaaauagccugucuuucagaucucaaaggcucuuuucagagccaccaaaaaaaaaaaaaaaaaaaaaaaaaaaaaaaaaaaaaaaaaaaaaaaaaaaaaaaaaaaaaaaaaaaaaaaaaaaaaaaaaaaaaaaaaaaaaaaaaaaaa

SEQ ID NO: 19309 - RNA, 1532 nt, Artificial Sequence
  SARS-CoV-2__MT667351.1__nucleocapsid protein (N) mRNA gc
aggagagucccgcagucggcguccagcggcucugcuuguucgugugugugucguugcaggccuuauucaagcuuaccaugagcgacaacggcccccagaaccagcgcaacgccccgcggaucaccuucgggggccccuccgacagcaccggguccaaccagaacggcgagcgcagcggggcccgguccaagcagcgccggccccagggccugcccaacaacacggcgagcugguucaccgcccucacccagcacggcaaggaggaccugaaguucccgcgcgggcagggcgugcccaucaacaccaacuccagccccgacgaccggaucggguacuaccgccgggccacgcgccggauccgcggcggggacggcaagaugaaggaccugagcccccggugguacuucuacuaccucggcaccgggccggaggccggccugcccuacggggccaacaaggacggcaucaucugggucgcgaccgagggcgcccugaacacccccaaggaccacaucgggacgcgcaaccccgccaacaacgccgcgaucgugcuccagcugccgcagggcaccacccugcccaagggguucuacgccgagggcucccgcgggggcucccaggccagcucccggagcuccagccggucccgcaacagcucccggaacagcacccccggcagcuccaagcgcacgagccccgcccggauggccgggaacggcggggacgcggcccucgcccugcugcuccuggaccgccugaaccagcucgaguccaagaugagcggcaaggggcagcagcagcagggccagaccgugaccaagaaguccgccgccgaggcgagcaagaagccgcgccagaagcggaccgccacgaaggccuacaacgucacccaggccuucggccgccgggggcccgagcagacccagggcaacuucggggaccaggagcugauccgccagggcaccgacuacaagcacuggccccagaucgcccaguucgcgcccuccgccagcgccuucuucgggaugucccggaucggcauggaggugacgccgagcggcaccuggcugaccuacaccggggccaucaagcucgacgacaaggaccccaacuucaaggaccaggugauccugcugaacaagcacaucgacgccuacaagacguucccgcccaccgagcccaagaaggacaagaagaagaaggcggacgagacccaggcccucccccagcgccagaagaagcagcagaccgucacgcugcugcccgccgccgaccucgacgacuucuccaagcagcugcagcagagcauguccagcgcggacuccacccaggccugaggacuagucccuguucccagagcccacuuuuuuuucuuuuuuugaaauaaaauagccugucuuucagaucucaaaggcucuuuucagagccaccaaaaaaaaaaaaaaaaaaaaaaaaaaaaaaaaaaaaaaaaaaaaaaaaaaaaaaaaaaaaaaaaaaaaaaaaaaaaaaaaaaaaaaaaaaaaaaaaaaaaa

SEQ ID NO: 19310 - RNA, 1532 nt, Artificial Sequence
  SARS-CoV-2__MT646074.1__nucleocapsid protein (N) mRNA gc
aggagagucccgcagucggcguccagcggcucugcuuguucgugugugugucguugcaggccuuauucaagcuuaccaugagcgacaacggcccccagaaccagcgcaacgccccgcggaucaccuucgggggccccuccgacagcaccggguccaaccagaacggcgagcgcagcggggcccgguccaagcagcgccggccccagggccugcccaacaacacggcgagcugguucaccgcccucacccagcacggcaaggaggaccugaaguucccgcgcgggcagggcgugcccaucaacaccaacuccagccccgacgaccagaucggguacuaccggcgcgccacgcggcgcauccggggcggggacggcaagaugaaggaccugagcccccgcugguacuucuacuaccucggcaccgggccggaggccggccugcccuacggggccaacaaggacggcaucaucugggucgcgaccgagggcgcccugaacacccccaaggaccacaucgggacgcggaaccccgccaacaacgccgcgaucgugcuccagcugccgcagggcaccacccugcccaagggguucuacgccgagggcagccgcgggggcucccaggccagcucccggagccucucccgcagccggaacuccagccgcaacuccacccccggcagcagcaagcggacgucccccgcccgcauggccgggaacggcggggacgcggcccuggcccugcuccugcuggaccggcucaaccagcuggagagcaagauguccggcaaggggcagcagcagcagggccagaccgugaccaagaaguccgccgccgaggcguccaagaagccgcgccagaagcgcaccgccacgaaggccuacaacgucacccaggccuucggccggcgcgggcccgagcagacccagggcaacuucggggaccaggagcugauccggcagggcaccgacuacaagcacuggccccagaucgcccaguucgcgcccagcgccuccgccuucuucgggaugagccgcaucggcauggaggugacgccguccggcaccuggcucaccuacaccggggccaucaagcuggacgacaaggaccccaacuucaaggaccaggugauccugcucaacaagcacaucgacgccuacaagacguucccgcccaccgagcccaagaaggacaagaagaagaaggcggacgagacccaggcccugccccagcggcagaagaagcagcagaccgucacgcugcuccccgccgccgaccuggacgacuucagcaagcagcugcagcaguccaugagcuccgcggacagcacccaggccugaggacuagucccuguucccagagcccacuuuuuuuucuuuuuuugaaauaaaauagccugucuuucagaucucaaaggcucuuuucagagccaccaaaaaaaaaaaaaaaaaaaaaaaaaaaaaaaaaaaaaaaaaaaaaaaaaaaaaaaaaaaaaaaaaaaaaaaaaaaaaaaaaaaaaaaaaaaaaaaaaaaaa

SEQ ID NO: 19311 - RNA, 1532 nt, Artificial Sequence
  SARS-CoV-2__MT641507.1__nucleocapsid protein (N) mRNA gc
aggagagucccgcagucggcguccagcggcucugcuuguucgugugugugucguugcaggccuuauucaagcuuaccaugagcgacaacggcccccagaaccagcgcaacgccccgcggaucaccuucgggggccccuccgacagcaccggguccaaccagaacggcgagcgcagcggggcccgguccaagcagcgccggccccagggccugcccaacaacacggcgagcugguucaccgcccucacccagcacggcaaggaggaccugaaguucccgcgcgggcagggcgugcccaucaacaccaacuccagccccgacgaccagaucggguacuaccggcgcgccacgcggcgcauccggggcggggacggcaagaugaaggaccugagcccccgcugguacuucuacuaccucggcaccgggccggaggccggccugcccuacggggccaacaaggacggcaucaucugggucgcgaccgagggcgcccugaacacccccaaggaccacaucgggacgcggaaccccgccaacaacgccgcgaucgugcuccagcugccgcagggcaccacccugcccaagggguucuacgccgagggcucccgcgggggcucccaggccagcucccggagcuccagccgcucccggaacagcucccgcaacagcacccccggcagcucccgggggacgagccccgcccgcauggccggcaacgggggcgacgcggcccucgcccugcugcuccuggaccggcugaaccagcucgaguccaagaugagcgggaagggccagcagcagcagggccagaccgugaccaagaaguccgccgccgaggcgagcaagaagccgcgccagaagcgcaccgccacgaaggccuacaacgucacccaggccuucgggcggcgcggccccgagcagacccaggagaacuucggggaccaggagcugauccggcagggcaccgacuacaagcacuggccccagaucgcccaguucgcgcccuccgccagcgccuucuucgggaugucccgcaucggcauggaggugacgccgagcggcaccuggcugaccuacaccggggccaucaagcucgacgacaaggaccccaacuucaaggaccaggugauccugcugaacaagcacaucgacgccuacaagacguucccgcccaccgagcccaagaaggacaagaagaagaaggcggacgagacccaggcccucccccagcggcagaagaagcagcagaccgucacgcugcugcccgccgccgaccucgacgacuucuccaagcagcugcagcagagcauguccagcgcggacuccacccaggccugaggacuagucccuguucccagagcccacuuuuuuuucuuuuuuugaaauaaaauagccugucuuucagaucucaaaggcucuuuucagagccaccaaaaaaaaaaaaaaaaaaaaaaaaaaaaaaaaaaaaaaaaaaaaaaaaaaaaaaaaaaaaaaaaaaaaaaaaaaaaaaaaaaaaaaaaaaaaaaaaaaaaa

SEQ ID NO: 19312 - RNA, 1532 nt, Artificial Sequence
  SARS-CoV-2__MT641510.1__nucleocapsid protein (N) mRNA gc
aggagagucccgcagucggcguccagcggcucugcuuguucgugugugugucguugcaggccuuauucaagcuuaccaugagcgacaacggcccccagaaccagcgcaacgccccgcggaucaccuucgggggccccuccgacagcaccggguccaaccagaacggcgagcgcagcggggcccgguccaagcagcgccggccccagggccugcccaacaacacggcgagcugguucaccgcccucacccagcacggcaaggaggaccugaaguucccgcgcgggcagggcgugcccaucaacaccaacuccagccccgacgaccagaucggguacuaccggcgcgccacgcggcgcauccggggcggggacggcaagaugaaggaccugagcccccgcugguacuucuacuaccucggcaccgggccggaggccggccugcccuacggggccaacaaggacggcaucaucugggucgcgaccgagggcgcccugaacacccccaaggaccacaucgggacgcggaaccccgccaacaacgccgcgaucgugcuccagcugccgcgcggcaccacccugcccaagggguucuacgccgagggcucccgcgggggcucccaggccagcucccggagcuccagccggucccgcaacagcucccggaacagcacccccggcagcucccgcgggacgagccccgcccggauggccggcaacgggggcgacgcggcccucgcccugcugcuccuggaccgccugaaccagcucgaguccaagaugagcgggaagggccagcagcagcagggccagaccgugaccaagaaguccgccgccgaggcgagcaagaagccgcgccagaagcggaccgccacgaaggccuacaacgucacccaggccuucgggcgccggggccccgagcagacccaggggaacuucggcgaccaggagcugauccgccaggggaccgacuacaagcacuggccccagaucgcccaguucgcgcccuccgccagcgccuucuucggcaugucccggaucggcauggaggugacgccgagcgggaccuggcugaccuacaccggcgccaucaagcucgacgacaaggaccccaacuucaaggaccaggugauccugcugaacaagcacaucgacgccuacaagacguucccgcccaccgagcccaagaaggacaagaagaagaaggcggacgagacccaggcccucccccagcgccagaagaagcagcagaccgucacgcugcugcccgccgccgaccucgacgacuucuccaagcagcugcagcagagcauguccagcgcggacuccacccaggccugaggacuagucccuguucccagagcccacuuuuuuuucuuuuuuugaaauaaaauagccugucuuucagaucucaaaggcucuuuucagagccaccaaaaaaaaaaaaaaaaaaaaaaaaaaaaaaaaaaaaaaaaaaaaaaaaaaaaaaaaaaaaaaaaaaaaaaaaaaaaaaaaaaaaaaaaaaaaaaaaaaaaa

SEQ ID NO: 19313 - RNA, 1532 nt, Artificial Sequence
  SARS-CoV-2__MT641567.1__nucleocapsid protein (N) mRNA gc
aggagagucccgcagucggcguccagcggcucugcuuguucgugugugugucguugcaggccuuauucaagcuuaccaugagcgacaacggcccccagaaccagcgcaacgccccgcggaucaccuucgggggccccuccgacagcaccggguccaaccagaacggcgagcgcagcggggcccgguccaagcagcgccggccccagggccugcccaacaacacggcgagcugguucaccgcccucacccagcacggcaaggaggaccugaaguucccgcgcgggcagggcgugcccaucaacaccaacuccagccccgacgaccagaucggguacuaccggcgcgccacgcggcgcauccggggcggggacggcaagaugaaggaccugagcccccgcugguacuucuacuaccucggcaccgggccggaggccggccugcccuacggggccaacaaggacggcaucaucugggucgcgaccgagggcgcccugaacacccccaaggaccacaucgggacgcggaaccccgccaacuacgccgcgaucgugcuccagcugccgcagggcaccacccugcccaagggguucuacgccgagggcucccgcgggggcucccaggccagcucccggagcuccagccgcucccggaacagcucccgcaacagcacccccggcagcucccgggggacgagccccgcccgcauggccggcaacgggggcgacgcggcccucgcccugcugcuccuggaccggcugaaccagcucgaguccaagaugagcgggaagggccagcagcagcagggccagaccgugaccaagaaguccgccgccgaggcgagcaagaagccgcgccagaagcgcaccgccacgaaggccuacaacgucacccaggccuucgggcggcgcggccccgagcagacccaggggaacuucggcgaccaggagcugauccggcaggggaccgacuacaagcacuggccccagaucgcccaguucgcgcccuccgccagcgccuucuucggcaugucccgcaucggcauggaggugacgccgagcgggaccuggcugaccuacaccggcgccaucaagcucgacgacaaggaccccaacuucaaggaccaggugauccugcugaacaagcacaucgacgccuacaagacguucccgcccaccgagcccaagaaggacaagaagaagaaggcggacgagacccaggcccucccccagcggcagaagaagcagcagaccgucacgcugcugcccgccgccgaccucgacgacuucuccaagcagcugcagcagagcauguccagcgcggacuccacccaggccugaggacuagucccuguucccagagcccacuuuuuuuucuuuuuuugaaauaaaauagccugucuuucagaucucaaaggcucuuuucagagccaccaaaaaaaaaaaaaaaaaaaaaaaaaaaaaaaaaaaaaaaaaaaaaaaaaaaaaaaaaaaaaaaaaaaaaaaaaaaaaaaaaaaaaaaaaaaaaaaaaaaaa

SEQ ID NO: 19314 - RNA, 1532 nt, Artificial Sequence
  SARS-CoV-2__MT641667.1__nucleocapsid protein (N) mRNA gc
aggagagucccgcagucggcguccagcggcucugcuuguucgugugugugucguugcaggccuuauucaagcuuaccaugagcgacaacggcccccagaaccagcgcaacgccccgcggaucaccuucgggggccccuccgacagcaccggguccaaccagaacggcgagcgcagcggggcccgguccaagcagcgccggccccagggccugcccaacaacacggcgagcugguucaccgcccucacccagcacggcaaggaggaccugaaguucccgcgcgggcagggcgugcccaucaacaccaacuccagccccgacgaccagaucggguacuaccggcgcgccacgcggcgcauccugggcggggacggcaagaugaaggaccucagcccccggugguacuucuacuaccugggcaccgggccggaggccggccugcccuacggggccaacaaggacggcaucaucugggucgcgaccgagggcgcccucaacacccccaaggaccacaucgggacgcgcaaccccgccaacaacgccgcgaucgugcugcagcugccgcagggcaccacccuccccaagggguucuacgccgagggcucccgcgggggcucccaggccagcucccggagcuccagccggucccgcaacagcucccggaacagcacccccggcagcuccaagcgcacgagccccgcccggauggccgggaacggcggggacgcggcccuggcccugcuccugcuggaccgccucaaccagcuggaguccaagaugagcggcaaggggcagcagcagcagggccagaccgugaccaagaaguccgccgccgaggcgagcaagaagccgcggcagaagcgcaccgccacgaaggccuacaacgucacccaggccuucggccgccgggggcccgagcagacccagggcaacuucggggaccaggagcugauccgccagggcaccgacuacaagcacuggccccagaucgcccaguucgcgcccuccgccagcgccuucuucgggaugucccggaucggcauggaggugacgccgagcggcaccuggcucaccuacaccggggccaucaagcuggacgacaaggaccccaacuucaaggaccaggugauccugcucaacaagcacaucgacgccuacaagacguucccgcccaccgagcccaagaaggacaagaagaagaaggcggacgagacccaggcccugccccagcgccagaagaagcagcagaccgucacgcugcuccccgccgccgaccuggacgacuucuccaagcagcugcagcagagcauguccagcgcggacuccacccaggccugaggacuagucccuguucccagagcccacuuuuuuuucuuuuuuugaaauaaaauagccugucuuucagaucucaaaggcucuuuucagagccaccaaaaaaaaaaaaaaaaaaaaaaaaaaaaaaaaaaaaaaaaaaaaaaaaaaaaaaaaaaaaaaaaaaaaaaaaaaaaaaaaaaaaaaaaaaaaaaaaaaaaa

SEQ ID NO: 19315 - RNA, 1532 nt, Artificial Sequence
  SARS-CoV-2__MT641708.1__nucleocapsid protein (N) mRNA gc
aggagagucccgcagucggcguccagcggcucugcuuguucgugugugugucguugcaggccuuauucaagcuuaccaugagcgacaacggcccccagaaccagcgcaacgccccgcggaucaccuucgggggccccuccgacagcaccggguccaaccagaacggcgagcgcagcggggcccgguccaagcagcgccggccccagggccugcccaacaacacggcgagcugguucaccgcccucacccagcacggcaaggaggaccugaaguucccgcgcgggcagggcgugcccaucaacaccaacuccagccccgacgaccagaucggguacuaccggcgcgccacgcggcgcauccggggcggggacggcaagaugaaggaccugagcccccgcugguacuucuacuaccucggcaccgggccggaggccggccugcccuacggggccaacaaggacggcaucaucugggucgcgaccgagggcgcccugaacacccccaaggaccacaucgggacgcggaaccccgccaacaacgccgcgaucgugcuccagcugccgcagggcaccacccugcccaagggguucuacgccgagggcucccgcgggggcucccaggccagcucccggagcuccagccgcucccggaacagcucccgcaacagcacccccggcagcucccgggggacgagccccgcccgcauggccggcaacgggggcgacgcggcccucgcccugcugcuccuggaccggcugaaccagcucgaguccaagaugagcgggaagggccagcagcagcagggccagaccgugaccaagaaguccgccgccgaggcguucaagaagccgcgccagaagcgcaccgccacgaaggccuacaacgucacccaggccuucgggcggcgcggccccgagcagacccaggggaacuucggcgaccaggagcugauccggcaggggaccgacuacaagcacuggccccagaucgcccaguucgcgcccagcgccuccgccuucuucggcaugagccgcaucggcauggaggugacgccguccgggaccuggcugaccuacaccggcgccaucaagcucgacgacaaggaccccaacuucaaggaccaggugauccugcugaacaagcacaucgacgccuacaagacguucccgcccaccgagcccaagaaggacaagaagaagaaggcggacgagacccaggcccucccccagcggcagaagaagcagcagaccgucacgcugcugcccgccgccgaccucgacgacuucagcaagcagcugcagcaguccaugagcuccgcggacagcacccaggccugaggacuagucccuguucccagagcccacuuuuuuuucuuuuuuugaaauaaaauagccugucuuucagaucucaaaggcucuuuucagagccaccaaaaaaaaaaaaaaaaaaaaaaaaaaaaaaaaaaaaaaaaaaaaaaaaaaaaaaaaaaaaaaaaaaaaaaaaaaaaaaaaaaaaaaaaaaaaaaaaaaaaa

SEQ ID NO: 19316 - RNA, 1532 nt, Artificial Sequence
  SARS-CoV-2__MT641710.1__nucleocapsid protein (N) mRNA gc
aggagagucccgcagucggcguccagcggcucugcuuguucgugugugugucguugcaggccuuauucaagcuuaccaugagcgacaacggcccccagaaccagcgcaacgccccgcggaucaccuucgggggccccuccgacagcaccggguccaaccagaacggcgagcgcagcggggcccgguccaagcagcgccggccccagggccugcccaacaacacggcgagcugguucaccgcccucacccagcacggcaaggaggaccugaaguucccgcgcgggcagggcgugcccaucaacaccaacuccagccccgacgaccagaucggguacuaccggcgcgccacgcggcgcauccggggcggggacggcaagaugaaggaccugagcccccgcugguacuucuacuaccucggcaccgggccggaggccggccugcccuacggggccaacaaggacggcaucaucugggucgcgaccgagggcgcccugaacacccccaaggaccacaucgggacgcggaaccccgccaacaacgccgcgaucgugcuccagcugccgcagggcaccacccugcccaagggguucuacgccgagggcucccgcgggggcucccaggccagcucccggagcuccagccgcucccggaacagcucccgcaacagcacccccggcagcucccgggggacgagccccgcccgcauggccggcaacgggggcgacgcggcccucgcccugcugcuccuggaccggcugaaccagcucgaguccaagaugagcgggaagggccagcagcagcagggccagaccgugaccaagaaguccgccgccgaggcgagcaagaagccgcgccagaagcgcaccgccacgaaggccuacaacgucacccaggccuucgggcggcgcggccccgagcagacccaggggaacuucggcgaccaggagcugauccggcaggggaccgacuacaagcacuggccccagaucgcccaguucgcgcccuccgccagcgccuucuucggcaugucccgcaucggcauggaggugacgccgagcgggaccuggcugaccuacaccggcgccaucaagcucgacgacaaggaccccaacuucaaggaccaggugauccugcugaacaagcacaucgacgccuacaagacguucccgcccaccgagcccaagaaggacaagaagaagaaggcggacgagacccaggcccucucccagcggcagaagaagcagcagaccgucacgcugcugcccgccgccgaccucgacgacuucagcaagcagcugcagcaguccaugagcuccgcggacagcacccaggccugaggacuagucccuguucccagagcccacuuuuuuuucuuuuuuugaaauaaaauagccugucuuucagaucucaaaggcucuuuucagagccaccaaaaaaaaaaaaaaaaaaaaaaaaaaaaaaaaaaaaaaaaaaaaaaaaaaaaaaaaaaaaaaaaaaaaaaaaaaaaaaaaaaaaaaaaaaaaaaaaaaaaa

SEQ ID NO: 19317 - RNA, 1532 nt, Artificial Sequence
  SARS-CoV-2__MT641738.1__nucleocapsid protein (N) mRNA gc
aggagagucccgcagucggcguccagcggcucugcuuguucgugugugugucguugcaggccuuauucaagcuuaccaugagcgacaacggcccccagaaccagcgcaacgccccgcggaucaccuucgggggccccuccgacagcaccggguccaaccagaacggcgagcgcagcggggcccgguccaagcagcgccggccccagggccugcccaacaacacggcgagcugguucaccgcccucacccagcacggcaaggaggaccugaaguucccgcgcgggcagggcgugcccaucaacaccaacuccagccccgacgaccagaucggguacuaccggcgcgccacgcggcgcauccggggcggggacggcaagaugaaggaccugagcccccgcugguacuucuacuaccucggcaccgggccggaggccggccugcccuacggggccaacaaggacggcaucaucugggucgcgaccgagggcgcccugaacacccccaaggaccacaucgggacgcggaaccccgccaacaacgccgcgaucgugcuccagcugccgcagggcaccacccugcccaagggguucuacgccgagggcucccgcgggggcucccaggccagcucccggagcuccagccgcucccggaacagcucccgcaacagcacccccggcagcucccgggggacgagccccgcccgcauggccggcaacgggggcgacgcggcccucgcccugcugcuccuggaccggcugaaccagcucgaguccaagaugagcgggaagggccagcagcagcagggccagaccgugaccaagaaguccgccgccgaggcgagcaagaagccgcgccagaagcgcaccgccacgaaggccuacaacgucacccaggccuucgggcggcgcggccccgagcagacccaggggaacuucggcgaccaggagcugauccggcaggggaccgacuacaagcacugcccccagaucgcccaguucgcgcccuccgccagcgccuucuucggcaugucccgcaucggcauggaggugacgccgagcgggaccuggcugaccuacaccggcgccaucaagcucgacgacaaggaccccaacuucaaggaccaggugauccugcugaacaagcacaucgacgccuacaagacguucccgcccaccgagcccaagaaggacaagaagaagaaggcggacgagacccaggcccucucccagcggcagaagaagcagcagaccgucacgcugcugcccgccgccgaccucgacgacuucagcaagcagcugcagcaguccaugagcuccgcggacagcacccaggccugaggacuagucccuguucccagagcccacuuuuuuuucuuuuuuugaaauaaaauagccugucuuucagaucucaaaggcucuuuucagagccaccaaaaaaaaaaaaaaaaaaaaaaaaaaaaaaaaaaaaaaaaaaaaaaaaaaaaaaaaaaaaaaaaaaaaaaaaaaaaaaaaaaaaaaaaaaaaaaaaaaaaa

SEQ ID NO: 19318 - RNA, 1532 nt, Artificial Sequence
  SARS-CoV-2__MT642069.1__nucleocapsid protein (N) mRNA gc
aggagagucccgcagucggcguccagcggcucugcuuguucgugugugugucguugcaggccuuauucaagcuuaccaugagcgacaacggcccccagaaccagcgcaacgccccgcggaucaccuucgggggccccuccgacagcaccggguccaaccagaacggcgagcgcagcggggcccgguccaagcagcgccggccccagggccugcccaacaacacggcgagcugguucaccgcccucacccagcacggcaagguggaccugaaguucccgcgcgggcagggcguccccaucaacaccaacuccagccccgacgaccagaucggguacuaccggcgcgccacgcggcgcauccggggcggggacggcaagaugaaggaccugagcccccgcugguacuucuacuaccucggcaccgggccggaggccggccugcccuacggggccaacaaggacggcaucaucuggguggcgaccgagggcgcccugaacacccccaaggaccacaucgggacgcggaaccccgccaacaacgccgcgaucgugcuccagcugccgcagggcaccacccugcccaagggguucuacgccgagggcucccgcgggggcucccaggccagcucccggagcuccagccgcucccggaacagcucccgcaacagcacccccggcagcucccgggggacgagccccgcccgcauggccggcaacgggggcgacgcggcccucgcccugcugcuccuggaccggcugaaccagcucgaguccaagaugagcgggaagggccagcagcagcagggccagaccgucaccaagaaguccgccgccgaggcgagcaagaagccgcgccagaagcgcaccgccacgaaggccuacaacgugacccaggccuucgggcggcgcggccccgagcagacccaggggaacuucggcgaccaggagcugauccggcaggggaccgacuacaagcacuggccccagaucgcccaguucgcgcccuccgccagcgccuucuucggcaugucccgcaucggcauggaggugacgccgagcgggaccuggcugaccuacaccggcgccaucaagcucgacgacaaggaccccaacuucaaggaccaggucauccugcugaacaagcacaucgacgccuacaagacguucccgcccaccgagcccaagaaggacaagaagaagaaggcggacgagacccaggcccucccccagcggcagaagaagcagcagaccgugacgcugcugcccgccgccgaccucgacgacuucuccaagcagcugcagcagagcauguccagcgcggacuccacccaggccugaggacuagucccuguucccagagcccacuuuuuuuucuuuuuuugaaauaaaauagccugucuuucagaucucaaaggcucuuuucagagccaccaaaaaaaaaaaaaaaaaaaaaaaaaaaaaaaaaaaaaaaaaaaaaaaaaaaaaaaaaaaaaaaaaaaaaaaaaaaaaaaaaaaaaaaaaaaaaaaaaaaaa

SEQ ID NO: 19319 - RNA, 1532 nt, Artificial Sequence
  SARS-CoV-2__MT642080.1__nucleocapsid protein (N) mRNA gc
aggagagucccgcagucggcguccagcggcucugcuuguucgugugugugucguugcaggccuuauucaagcuuaccaugagcgacaacggcccccagaaccagcgcaacgccccgcggaucaccuucgggggccccuccgacagcaccggguccaaccagaacggcgagcgcagcggggcccgguccaagcagcgccggccccagggccugcccaacaacacggcgagcugguucaccgcccucacccagcacggcaagguggaccugaaguucccgcgcgggcagggcguccccaucaacaccaacuccagccccgacgaccagaucggguacuaccggcgcgccacgcggcgcauccggggcggggacggcaagaugaaggaccugagcccccgcugguacuucuacuaccucggcaccgggccggaggccggccugcccuacggggccaacaaggacggcaucaucuggguggcgaccgagggcgcccugaacacccccaaggaccacaucgggacgcggaaccccgccaacaacgccgcgaucgugcuccagcugccgcagggcaccacccugcccaagggguucuacgccgagggcagccgcgggggcucccaggccagcucccggagcuccagccgcucccggaacagccuccgcaacuccacccccggcagcagccgggggacgucccccgcccgcauggccggcaacgggggcgacgcggcccuggcccugcuccugcuggaccggcucaaccagcuggagagcaagauguccgggaagggccagcagcagcagggccagaccgucaccaagaaguccgccgccgaggcguccaagaagccgcgccagaagcgcaccgccacgaaggccuacaacgugacccaggccuucgggcggcgcggccccgagcagacccaggggaacuucggcgaccaggagcugauccggcaggggaccgacuacaagcacuggccccagaucgcccaguucgcgcccagcgccuccgccuucuucggcaugagccgcaucggcauggaggugacgccguccgggaccuggcucaccuacaccggcgccaucaagcuggacgacaaggaccccaacuucaaggaccaggucauccugcucaacaagcacaucgacgccuacaagacguucccgcccaccgagcccaagaaggacaagaagaagaaggcggacgagacccaggcccugccccagcggcagaagaagcagcagaccgugacgcugcuccccgccgccgaccuggacgacuucagcaagcagcugcagcaguccaugagcuccgcggacagcacccaggccugaggacuagucccuguucccagagcccacuuuuuuuucuuuuuuugaaauaaaauagccugucuuucagaucucaaaggcucuuuucagagccaccaaaaaaaaaaaaaaaaaaaaaaaaaaaaaaaaaaaaaaaaaaaaaaaaaaaaaaaaaaaaaaaaaaaaaaaaaaaaaaaaaaaaaaaaaaaaaaaaaaaaa

SEQ ID NO: 19320 - RNA, 1532 nt, Artificial Sequence
  SARS-CoV-2__MT642120.1__nucleocapsid protein (N) mRNA gc
aggagagucccgcagucggcguccagcggcucugcuuguucgugugugugucguugcaggccuuauucaagcuuaccaugagcgacaacggcccccagaaccagcgcaacgccccgcggaucaccuucgggggccccuccgacagcaccggguccaaccagaacggcgagcgcagcggggcccgguccaagcagcgccggccccagggccugcccaacaacacggcgagcugguucaccgcccucacccagcacggcaaggaggaccugaaguucccgcgcgggcagggcgugcccaucaacaccaacuccagccccgacgaccagaucggguacuaccggcgcgccacgcggcgcauccggggcggggacggcaagaugaaggaccugagcccccgcugguacuucuacuaccucggcaccgggccggaggccggccugcccuacggggccaacaaggacggcaucaucugggucgcgaccgagggcgcccugaacacccccaaggaccacaucgggacgcggaaccccgccaacaacgccgcgaucgugcuccagcugccgcagggcaccacccugcccaagggguucuacgccgagggcucccgcgggggcucccaggccagcucccggagcuccagccgcucccggaacagcucccgcaacagcacccccggcagcucccgggggacgagccccgcccgcauggccggcaacgggggcgacgcggcccucgcccugcugcuccuggaccggcugaaccagcucgaguccaagaugagcgggaagggccagcagcagcagggccagaccgugaccaagaaguccgccgccgaggcgagcaagaagccgcgccagaagcgcaccgccacgaaggccuacaacgucacccaggccuucgggcggcgcggccccgagcagacccaggggaacuucggcgaccaggagcugauccggcaggggaccgacuacaagcacuggccccagaucgcccaguucgcgcccuccgccagcgccuucuucggcaugucccgcaucggcauggaggugacgccgagcgggaccuggcugaccuacaccggcgccaucaagcucgacgacaaggaccccaacuucaaggaccaggugauccugcugaacaagcacaucgacgccuacaagacguucccgcccaccgagcccaagaaggacaagaagaagaaggcggacgagacccaggcccucccccagcggcagaagaagcagcagaccgucacgcugcugcccgccguggaccucgacgacuucuccaagcagcugcagcagagcauguccagcgccgacuccacccaggcgugaggacuagucccuguucccagagcccacuuuuuuuucuuuuuuugaaauaaaauagccugucuuucagaucucaaaggcucuuuucagagccaccaaaaaaaaaaaaaaaaaaaaaaaaaaaaaaaaaaaaaaaaaaaaaaaaaaaaaaaaaaaaaaaaaaaaaaaaaaaaaaaaaaaaaaaaaaaaaaaaaaaaa

SEQ ID NO: 19321 - RNA, 1532 nt, Artificial Sequence
  SARS-CoV-2__MT642181.1__nucleocapsid protein (N) mRNA gc
aggagagucccgcagucggcguccagcggcucugcuuguucgugugugugucguugcaggccuuauucaagcuuaccaugagcgacaacggcccccagaaccagcgcaacgccccgcggaucaccuucgggggccccuccgacagcaccggguccaaccagaacggcgagcgcagcggggcccgguccaagcagcgccggccccagggccugcccaacaacacggcgagcugguucaccgcccucacccagcacggcaaggaggaccugaaguucccgcgcgggcagggcgugcccaucaacaccaacuccagccccgacgaccagaucggguacuaccggcgcgccacgcggcgcauccggggcggggacggcaagaugaaggaccugagcccccgcugguacuucuacuaccucggcaccgggccggaggccggccugcccuacggggccaacaaggacggcaucaucugggucgcgaccgagggcgcccugaacacccccaaggaccacaucgggacgcggaaccccgccaacaacgccgcgaucgugcuccagcugccgcagggcaccacccugcccaagggguucuacgccgagggcucccgcgggggcucccaggccagcucccggagcuccagccgcucccggaacagcucccgcaacagcacccccggcagcucccgggggacgagccccgcccgcauggccggcaacgggggcgacgcggcccucgcccugcugcuccuggaccggcugaaccagcucgaguccaagaugagcgggaagggccagcagcagcagggccagaccgugaccaagaaguccgccgccgaggcgagcaagaagccgcgccagaagcgcaccgccacgaaggccuacaacgucacccaggccuucgggcggcgcggccccgagcagacccaggggaacuucggcgaccaggagcugauccggcaggggaccgacuacaagcacuggccccagaucgcccaguucgcgcccuccgccagcgccuucuucggcaugucccgcaucggcauggaggugacgccgagcgggaccuggcugaccuacaccggcgccaucaagcucgacgacaaggaccccaacuucaaguaccaggugauccugcugaacaagcacaucgacgccuacaagacguucccgcccaccgagcccaagaaggacaagaagaagaaggcggacgagacccaggcccucccccagcggcagaagaagcagcagaccgucacgcugcugcccgccgccgaccucgacgacuucuccaagcagcugcagcagagcauguccagcgcggacuccacccaggccugaggacuagucccuguucccagagcccacuuuuuuuucuuuuuuugaaauaaaauagccugucuuucagaucucaaaggcucuuuucagagccaccaaaaaaaaaaaaaaaaaaaaaaaaaaaaaaaaaaaaaaaaaaaaaaaaaaaaaaaaaaaaaaaaaaaaaaaaaaaaaaaaaaaaaaaaaaaaaaaaaaaaa

SEQ ID NO: 19322 - RNA, 1532 nt, Artificial Sequence
  SARS-CoV-2__MT642410.1__nucleocapsid protein (N) mRNA gc
aggagagucccgcagucggcguccagcggcucugcuuguucgugugugugucguugcaggccuuauucaagcuuaccaugagcgacaacggcccccagaaccagcgcaacgccccgcggaucaccuucgggggccccuccgacagcaccggguccaaccagaacgccgagcgcagcggcgcgcgguccaagcagcgccggccccaggggcugcccaacaacacggccagcugguucaccgcccucacccagcacggcaaggaggaccugaaguucccgcgcggccagggggugcccaucaacaccaacuccagccccgacgaccagaucggcuacuaccggcgcgccacgcggcgcauccgcgggggcgacgggaagaugaaggaccugagcccccggugguacuucuacuaccucggcaccggcccggaggccgggcugcccuacggcgcgaacaaggacgggaucaucugggucgccaccgagggcgcccugaacacccccaaggaccacaucggcacgcggaaccccgccaacaacgcggccaucgugcuccagcugccgcaggggaccacccugcccaagggcuucuacgccgaggggucccgcggcgggucccaggccagcucccggagcuccagccgcucccggaacagcucccgcaacagcacccccggcagcucccggggcacgagccccgcccgcauggcggggaacggcggggacgccgcccucgcccugcugcuccuggaccggcugaaccagcucgaguccaagaugagcggcaaggggcagcagcagcagggccagaccgugaccaagaaguccgccgcggaggccagcaagaagccgcgccagaagcgcaccgccacgaaggccuacaacgucacccaggccuucggccggcgcgggcccgagcagacccagggcaacuucggggaccaggagcugauccggcagggcaccgacuacaagcacuggccccagaucgcgcaguucgcccccuccgccagcgccuucuucgggaugucccgcaucggcauggaggugacgccgagcggcaccuggcugaccuacaccggggccaucaagcucgacgacaaggaccccaacuucaaggaccaggugauccugcugaacaagcacaucgacgcguacaagacguucccgcccaccgagcccaagaaggacaagaagaagaaggccgacgagacccaggcccucccccagcggcagaagaagcagcagaccgucacgcugcugcccgccgcggaccucgacgacuucuccaagcagcugcagcagagcauguccagcgccgacuccacccaggccugaggacuagucccuguucccagagcccacuuuuuuuucuuuuuuugaaauaaaauagccugucuuucagaucucaaaggcucuuuucagagccaccaaaaaaaaaaaaaaaaaaaaaaaaaaaaaaaaaaaaaaaaaaaaaaaaaaaaaaaaaaaaaaaaaaaaaaaaaaaaaaaaaaaaaaaaaaaaaaaaaaaaa

SEQ ID NO: 19323 - RNA, 1532 nt, Artificial Sequence
  SARS-CoV-2__MT635408.1__nucleocapsid protein (N) mRNA gc
aggagagucccgcagucggcguccagcggcucugcuuguucgugugugugucguugcaggccuuauucaagcuuaccaugagcgacaacggcccccagaaccagcgcaacgccccgcggaucaccuucgggggccccuccgacagcaccggguccaaccagaacggcgagcgcagcggggcccgguccaagcagcgccggccccagggccugcccaacaacacggcgagcugguucaccgcccucacccagcacggcaaggaggaccugaaguucccgcgcgggcagggcgugcccaucaacaccaacuccagccccgacgaccagaucggguacuaccggcgcgccacgcggcgcauccggggcggggacggcaagaugaaggaccugagcccccgcugguacuucuacuaccucggcaccgggccggaggccggccugcccuacggggccaacaaggacggcaucaucugggucgugaccgagggcgcgcugaacacccccaaggaccacaucgggacgcggaaccccgccaacaacgccgccaucgugcuccagcugccgcagggcaccacccugcccaagggguucuacgcggagggcucccgcgggggcucccaggccagcucccggagcuccagccgcucccggaacagcucccgcaacagcacccccggcagcucccgggggacgagccccgcccgcauggccggcaacgggggcgacgccgcgcucgcccugcugcuccuggaccggcugaaccagcucgaguccaagaugagcgggaagggccagcagcagcagggccagaccgucaccaagaaguccgccgccgaggccagcaagaagccgcgccagaagcgcaccgcgacgaaggccuacaacgugacccaggccuucgggcggcgcggccccgagcagacccaggggaacuucggcgaccaggagcugauccggcaggggaccgacuacaagcacuggccccagaucgcccaguucgcccccuccgcgagcgccuucuucggcaugucccgcaucggcauggaggugacgccgagcgggaccuggcugaccuacaccggcgccaucaagcucgacgacaaggaccccaacuucaaggaccaggucauccugcugaacaagcacaucgacgccuacaagacguucccgcccaccgagcccaagaaggacaagaagaagaaggccgacgagacccaggcgcucccccagcggcagaagaagcagcagaccgugacgcugcugcccgccgccgaccucgacgacuucuccaagcagcugcagcagagcauguccagcgccgacuccacccaggcgugaggacuagucccuguucccagagcccacuuuuuuuucuuuuuuugaaauaaaauagccugucuuucagaucucaaaggcucuuuucagagccaccaaaaaaaaaaaaaaaaaaaaaaaaaaaaaaaaaaaaaaaaaaaaaaaaaaaaaaaaaaaaaaaaaaaaaaaaaaaaaaaaaaaaaaaaaaaaaaaaaaaaa

SEQ ID NO: 19324 - RNA, 1532 nt, Artificial Sequence
  SARS-CoV-2__MT635672.1__nucleocapsid protein (N) mRNA gc
aggagagucccgcagucggcguccagcggcucugcuuguucgugugugugucguugcaggccuuauucaagcuuaccaugagcgacaacggcccccagaaccagcgcaacgccccgcggaucaccuucgggggccccuccgacagcaccggguccaaccagaacggcgagcgcagcggggcccgguccaagcagcgccggccccagggccugcccaacaacacggcgagcugguucaccgcccucacccagcacggcaaggaggaccugaaguucccgcgcgggcagggcgugcccaucaacaccaacuccagccccgacgaccagaucggguacuaccggcgcgccacgcggcgcauccggggcggggacggcaagaugaaggaccugagcccccgcugguacuucuacuaccucggcaccgggccggaggccggccugcccuacggggccaacaaggacggcaucaucugggucgcgaccgagggcgcccugaacacccccaaggaccacaucgggacgcggaaccccgccaacaacgccgcgaucgugcuccagcugccgcagggcaccacccugcccaagggguucuacgccgagggcucccgcgggggcucccaggccagcucccggagcuccagccgcucccggaacagcucccgcaacagcacccccggcagcuccaagcggacgagccccgcccgcauggccgggaacggcggggacgcggcccucgcccugcugcuccuggaccggcugaaccagcucgaguccaagaugagcggcaaggggcagcagcagcagggccagaccgugaccaagaaguccgccgccgaggcgagcaagaagccgcgccagaagcgcaccgccacgaaggccuacaacgucacccaggccuucggccggcgcgggcccgagcagacccagggcaacuucggggaccaggagcugauccggcagggcaccgacuacaagcacuggccccagaucgcccaguucgcgcccuccgccagcgccuucuucgggaugucccgcaucggcauggaggugacgccgagcggcaccuggcugaccuacaccggggccaucaagcucgacgacaaggaccccaacuucaaguaccaggugauccugcugaacaagcacaucgacgccuacaagacguucccgcccaccgagcccaagaaggacaagaacaagaaggcggacgagacccaggcccucccccagcggcagaagaagcagcagaccgucacgcugcugcccgccgccgaccucgacgacuucuccaagcagcugcagcagagcauguccagcgcggacuccacccaggccugaggacuagucccuguucccagagcccacuuuuuuuucuuuuuuugaaauaaaauagccugucuuucagaucucaaaggcucuuuucagagccaccaaaaaaaaaaaaaaaaaaaaaaaaaaaaaaaaaaaaaaaaaaaaaaaaaaaaaaaaaaaaaaaaaaaaaaaaaaaaaaaaaaaaaaaaaaaaaaaaaaaaa

SEQ ID NO: 19325 - RNA, 1532 nt, Artificial Sequence
  SARS-CoV-2__MT627240.1__nucleocapsid protein (N) mRNA gc
aggagagucccgcagucggcguccagcggcucugcuuguucgugugugugucguugcaggccuuauucaagcuuaccaugagcgacaacggcccccagaaccagcgcaacgccccgcggaucaccuucgggggccccuccgacagcaccggguccaaccagaacggcgagcgcagcggggcccgguccaagcagcgccggccccagggccugcccaacaacacggcgagcugguucaccgcccucacccagcacggcaaggaggaccugaaguucccgcgcgggcagggcgugcccaucaacaccaacuccagccccgacgaccagaucggguacuaccggcgcgccacgcggcgcauccggggcggggacggcaagaugaaggaccugagcccccgcugguacuucuacuaccucggcaccgggccggaggccggccugcccuacggggccaacaaggacggcaucaucugggucgcgaccgagggcgcccugaacacccccaaggaccacuucgggacgcggaaccccgccaacaacgccgcgaucgugcuccagcugccgcagggcaccacccugcccaagggguucuacgccgagggcucccgcgggggcucccaggccagcucccggagcuccagccgcucccggaacagcucccgcaacagcacccccggcagcucccgggggacgagccccgcccgcauggccggcaacgggggcgacgcggcccucgcccugcugcuccuggaccggcugaaccagcucgaguccaagaugagcgggaagggccagcagcagcagggccagaccgugaccaagaaguccgccgccgaggcgagcaagaagccgcgccagaagcgcaccgccacgaaggccuacaacgucacccaggccuucgggcggcgcggccccgagcagacccaggggaacuucggcgaccaggagcugauccggcaggggaccgacuacaagcacuggccccagaucgcccaguucgcgcccuccgccagcgccuucuucggcaugucccgcaucggcauggaggugacgccgagcgggaccuggcugaccuacaccggcgccaucaagcucgacgacaaggaccccaacuucaaggaccaggugauccugcugaacaagcacaucgacgccuacaagacguucccgcccaccgagcccaagaaggacaagaagaagaaggcggacgagacccaggcccucccccagcggcagaagaagcagcagaccgucacgcugcugcccgccgccgaccucgacgacuucuccaagcagcugcagcagagcauguccagcgcggacuccacccaggccugaggacuagucccuguucccagagcccacuuuuuuuucuuuuuuugaaauaaaauagccugucuuucagaucucaaaggcucuuuucagagccaccaaaaaaaaaaaaaaaaaaaaaaaaaaaaaaaaaaaaaaaaaaaaaaaaaaaaaaaaaaaaaaaaaaaaaaaaaaaaaaaaaaaaaaaaaaaaaaaaaaaaa

SEQ ID NO: 19326 - RNA, 1532 nt, Artificial Sequence
  SARS-CoV-2__MT627244.1__nucleocapsid protein (N) mRNA gc
aggagagucccgcagucggcguccagcggcucugcuuguucgugugugugucguugcaggccuuauucaagcuuaccaugagcgacaacggcccccagaaccagcgcaacgccccgcggaucaccuucgggggccccuccgacagcaccggguccaaccagaacggcgagcgcagcggggcccgguccaagcagcgccggccccagggccugcccaacaacacggcgagcugguucaccgcccucacccagcacggcaaggaggaccugaaguucccgcgcgggcagggcgugcccaucaacaccaacuccagccccgacgaccagaucggguacuaccggcgcgccacgcggcgcauccggggcggggacggcaagaugaaggaccugagcccccgcugguacuucuacuaccucggcaccgggccggaggccggccugcccuacggggccaacaaggacggcaucaucugggucgcgaccgagggcgcccugaacacccccaaggaccacaucgggacgcggaaccccgccaacaacgccgcgaucgugcuccagcugccgcagggcaccacccugcccaagggguucuacgccgagggcagccgcgggggcucccaggccagcucccggagcuccagccgcucccggaacagcucccgcaacagcacccccggcagcucccgggggacgagccccgcccgcauggccggcaacgggggcgacgcggcccucgcccugcugcuccuggaccggcugaaccagcucgaguccaagaugccggggaagggccagcagcagcagggccagaccgugaccaagaaguccgccgccgaggcguccaagaagccccgccagaagcgcaccgccacgaaggccuacaacgucacccaggccuucgggcggcgcggccccgagcagacccaggggaacuucggcgaccaggagcugauccggcaggggaccgacuacaagcacuggccccagaucgcccaguucgcgccgagcgccuccgccuucuucggcaugagccgcaucggcauggaggugacgcccuccgggaccuggcugaccuacaccggcgccaucaagcucgacgacaaggaccccaacuucaaggaccaggugauccugcugaacaagcacaucgacgccuacaagacguucccgcccaccgagcccaagaaggacaagaagaagaaggcggacgagacccaggcccucccccagcggcagaagaagcagcagaccgucacgcugcugcccgccgccgaccucgacgacuucagcaagcagcugcagcaguccaugagcuccgcggacagcacccaggccugaggacuagucccuguucccagagcccacuuuuuuuucuuuuuuugaaauaaaauagccugucuuucagaucucaaaggcucuuuucagagccaccaaaaaaaaaaaaaaaaaaaaaaaaaaaaaaaaaaaaaaaaaaaaaaaaaaaaaaaaaaaaaaaaaaaaaaaaaaaaaaaaaaaaaaaaaaaaaaaaaaaaa

SEQ ID NO: 19327 - RNA, 1532 nt, Artificial Sequence
  SARS-CoV-2__MT627415.1__nucleocapsid protein (N) mRNA gc
aggagagucccgcagucggcguccagcggcucugcuuguucgugugugugucguugcaggccuuauucaagcuuaccaugagcgacaacggcccccagaaccagcgcaacgccccgcggaucaccuucgggggccccuccgacagcaccggguccaaccagaacggcgagcgcagcggggcccgguccaagcagcgccggccccagggccugcccaacaacacggcgagcugguucaccgcccucacccagcacggcaaggaggaccugaaguucccgcgcgggcagggcgugcccaucaacaccaacuccagccccgacgaccagaucggguacuaccggcgcgccacgcggcgcauccggggcggggacggcaagaugaaggaccugagcccccgcugguacuucuacuaccucggcaccgggccggaggccggccugcccuacggggccaacaaggacggcaucaucugggucgcgaccgagggcgcccugaacacccccaaggaccacaucgggacgcggaaccccgccaacaacgccgcgaucgugcuccagcugccgcagggcaccacccugcccaagggguucuacgccgagggcucccgcgggggcucccaggccagcuccugcagcuccagccggucccgcaacagcucccggaacagcacccccggcagcuccaagcgcacgagccccgcccggauggccgggaacggcggggacgcggcccucgcccugcugcuccuggaccgccugaaccagcucgaguccaagaugagcggcaaggggcagcagcagcagggccagaccgugaccaagaaguccgccgccgaggcgagcaagaagccgcggcagaagcgcaccgccacgaaggccuacaacgucacccaggccuucggccgccgggggcccgagcagacccagggcaacuucggggaccaggagcugauccgccagggcaccgacuacaagcacuggccccagaucgcccaguucgcgcccuccgccagcgccuucuucgggaugucccggaucggcauggaggugacgccgagcggcaccuggcugaccuacaccggggccaucaagcucgacgacaaggaccccaacuucaaggaccaggugauccugcugaacaagcacaucgacgccuacaagacguucccgcccaccgagcccaagaaggacaagaagaagaaggcggacgagacccaggcccucccccagcgccagaagaagcagcagaccgucacgcugcugcccgccgccgaccucgacgacuucuccaagcagcugcagcagagcauguccagcgcggacuccacccaggccugaggacuagucccuguucccagagcccacuuuuuuuucuuuuuuugaaauaaaauagccugucuuucagaucucaaaggcucuuuucagagccaccaaaaaaaaaaaaaaaaaaaaaaaaaaaaaaaaaaaaaaaaaaaaaaaaaaaaaaaaaaaaaaaaaaaaaaaaaaaaaaaaaaaaaaaaaaaaaaaaaaaaa

SEQ ID NO: 19328 - RNA, 1532 nt, Artificial Sequence
  SARS-CoV-2__MT627424.1__nucleocapsid protein (N) mRNA gc
aggagagucccgcagucggcguccagcggcucugcuuguucgugugugugucguugcaggccuuauucaagcuuaccaugagcgacaacggcccccagaaccagcgcaacgccccgcggaucaccuucgggggccccuccgacagcaccggguccaaccagaacggcgagcgcagcggggcccgguccaagcagcgccggccccagggccugcccaacaacacggcgagcugguucaccgcccucacccagcacggcaaggaggaccugaaguucccgcgcgggcagggcgugcccaucaacaccaacuccagccccgacgaccagaucggguacuaccggcgcgccacgcggcgcauccggggcggggacggcaagaugaaggaccugagcccccgcugguacuucuacuaccucggcaccgggccggaggccggccugcccuacggggccaacaaggacggcaucaucugggucgcgaccgagggcgcccugaacacccccaaggaccacaucgggacgcggaaccccgccaacaacgccgcgaucgugcuccagcugccgcagggcaccacccugcccaagggguucuacgccgagggcucccgcgggggcucccaggccagcucccggagcuccagccgcucccggaacagcucccgcaacagcacccccggcagcucccgggggacgagccccgcccgcauggccggcaacgggggcgacgcggcccucgcccugcugcuccuggaccggcugaaccagcucgaguccaagaugagcgggaagggccagcagcagcagggccagaccgugaccaagaaguccgccgccgaggcgagcaagaagccgcgccagaagcgcaccgccacgaaggccuacaacgucacccaggccuucgggcggcgcggccccgagcagacccaggggaacuucggcgaccaggagcugauccggcaggggaccgacuacaagcacuggccccagaucgcccaguucgcgcccuccgccagcgccuucuucggcaugucccgcaucggcauggaggugacgccgagcgggaccuggcugaccuacaccggcgccaucaagcucgacgacaaggaccccaacuucaaggaccaggugauccugcugaacaagcacaucgacgccuacaagacguuccuccccaccgagcccaagaaggacaagaagaagaaggcggacgagacccaggcccugccgcagcggcagaagaagcagcagaccgucacgcugcuccccgccgccgaccuggacgacuucuccaagcagcugcagcagagcauguccagcgcggacuccacccaggccugaggacuagucccuguucccagagcccacuuuuuuuucuuuuuuugaaauaaaauagccugucuuucagaucucaaaggcucuuuucagagccaccaaaaaaaaaaaaaaaaaaaaaaaaaaaaaaaaaaaaaaaaaaaaaaaaaaaaaaaaaaaaaaaaaaaaaaaaaaaaaaaaaaaaaaaaaaaaaaaaaaaaa

SEQ ID NO: 19329 - RNA, 1532 nt, Artificial Sequence
  SARS-CoV-2__MT627607.1__nucleocapsid protein (N) mRNA gc
aggagagucccgcagucggcguccagcggcucugcuuguucgugugugugucguugcaggccuuauucaagcuuaccaugagcgacaacggcccccagaaccagcgcaacgccccgcggaucaccuucgggggccccuccgacagcaccggguccaaccagaacggcgagcgcagcggggcccgguccaagcagcgccggccccagggccugcccaacaacacggcgagcugguucaccgcccucacccagcacggcaaggaggaccugaaguucccgcgcgggcagggcgugcccaucaacaccaacuccagccccgacgaccagaucggguacuaccggcgcgccacgcggcgcauccggggcggggacggcaagaugaaggaccugagcccccgcugguacuucuacuaccucggcaccgggccggaggccggccugcccuacgggaccaacaaggacggcaucaucugggucgccaccgagggcgcgcugaacacgcccaaggaccacaucgggacccggaaccccgccaacaacgccgccaucgugcuccagcugccgcagggcaccacccugcccaagggguucuacgcggagggcucccgcgggggcucccaggccagcucccggagcuccagccgcucccggaacagcucccgcaacagcacgcccggcagcucccgggggaccagccccgcccgcauggccggcaacgggggcgacgccgcgcucgcccugcugcuccuggaccggcugaaccagcucgaguccaagaugagcgggaagggccagcagcagcagggccagaccgugaccaagaaguccgccgccgaggccagcaagaagccgcgccagaagcgcacggcgaccaaggccuacaacgucacccaggccuucgggcggcgcggccccgagcagacccaggggaacuucggcgaccaggagcugauccggcaggggacggacuacaagcacuggccccagaucgcccaguucgcccccuccgcgagcgccuucuucggcaugucccgcaucggcauggaggugaccccgagcgggaccuggcugaccuacacgggcgccaucaagcucgacgacaaggaccccaacuucaaggaccaggugauccugcugaacaagcacaucgacgccuacaagaccuucccgcccaccgagcccaagaaggacaagaagaagaaggccgacgagacccaggcgcucccccagcggcagaagaagcagcagacggucacccugcugcccgccgccgaccucgacgacuucuccaagcagcugcagcagagcauguccagcgccgacuccacccaggcgugaggacuagucccuguucccagagcccacuuuuuuuucuuuuuuugaaauaaaauagccugucuuucagaucucaaaggcucuuuucagagccaccaaaaaaaaaaaaaaaaaaaaaaaaaaaaaaaaaaaaaaaaaaaaaaaaaaaaaaaaaaaaaaaaaaaaaaaaaaaaaaaaaaaaaaaaaaaaaaaaaaaaa

SEQ ID NO: 19330 - RNA, 1532 nt, Artificial Sequence
  SARS-CoV-2__MT627920.1__nucleocapsid protein (N) mRNA gc
aggagagucccgcagucggcguccagcggcucugcuuguucgugugugugucguugcaggccuuauucaagcuuaccaugagcgacaacggcccccagaaccagcgcaacgccccgcggaucaccuucgggggccccuccgacagcaccggguccaaccagaacggcgagcgcagcggggcccgguccaagcagcgccggccccagggccugcccaacaacacggcgagcugguucaccgcccucacccagcacggcaaggaggaccugaaguucccgcgcgggcagggcgugcccaucaacaccaacuccagccccgacgaccagaucggguacuaccggcgcgccacgcggcgcauccggggcggggacggcaagaugaaggaccugagcccccgcugguacuucuacuaccucggcaccgggccggaggccggccugcccuacggggccaacaaggacggcaucaucugggucgcgaccgagggcgcccugaacacccccaaggaccacaucgggacgcggaaccccgccaacaacgccgcgaucgugcuccagcugccgcagggcaccacccugcccaagggguucuacgccgagggcucccgcgggggcucccaggccagcucccggagcuccagccgcucccggaacagcucccgcaacagcacccccggcagcucccgggggacgagccccgcccgcauggccggcaacgggggcgacgcggcccucgcccugcugcuccuggaccggcugaaccagcucgaguccaagaugagcgggaagggccagcagcagcagggccagaccgugaccaagaaguucgccgccgaggcguccaagaagccgcgccagaagcgcaccgccacgaaggccuacaaccugacccaggccuucgggcggcgcggccccgagcagacccaggggaacuucggcgaccaggagcugauccggcaggggaccgacuacaagcacuggccccagaucgcccaguucgcgcccagcgccuccgccuucuucggcaugagccgcaucggcauggaggucacgccguccgggaccuggcucaccuacaccggcgccaucaagcuggacgacaaggaccccaacuucaaggaccaggugauccugcucaacaagcacaucgacgccuacaagacguucccgcccaccgagcccaagaaggacaagaagaagaaggcggacgagacccaggcccugccccagcggcagaagaagcagcagaccgugacgcugcuccccgccgccgaccuggacgacuucagcaagcagcugcagcaguccaugagcuccgcggacagcacccaggccugaggacuagucccuguucccagagcccacuuuuuuuucuuuuuuugaaauaaaauagccugucuuucagaucucaaaggcucuuuucagagccaccaaaaaaaaaaaaaaaaaaaaaaaaaaaaaaaaaaaaaaaaaaaaaaaaaaaaaaaaaaaaaaaaaaaaaaaaaaaaaaaaaaaaaaaaaaaaaaaaaaaaa

SEQ ID NO: 19331 - RNA, 1532 nt, Artificial Sequence
  SARS-CoV-2__MT627921.1__nucleocapsid protein (N) mRNA gc
aggagagucccgcagucggcguccagcggcucugcuuguucgugugugugucguugcaggccuuauucaagcuuaccaugagcgacaacggcccccagaaccagcgcaacgccccgcggaucaccuucgggggccccuccgacagcaccggguccaaccagaacggcgagcgcagcggggcccgguccaagcagcgccggccccagggccugcccaacaacacggcgagcugguucaccgcccucacccagcacggcaaggaggaccugaaguucccgcgcgggcagggcgugcccaucaacaccaacuccagccccgacgaccagaucggguacuaccggcgcgccacgcggcgcauccggggcggggacggcaagaugaaggaccugagcccccgcugguacuucuacuaccucggcaccgggccggaggccggccugcccuacggggccaacaaggacggcaucaucugggucgcgaccgagggcgcccugaacacccccaaggaccacaucgggacgcggaaccccgccaacaacgccgcgaucgugcuccagcugccgcagggcaccacccugcccaagggguucuacgccgagggcagccgcgggggcucccaggccagcucccggagccucucccgcagccggaacuccagccgcaacuccacccccggcagcagccgggggacgucccccgcccgcauggccggcaacgggggcgacgcggcccuggcccugcuccugcuggaccggcucaaccagcuggagagcaagauguccgggaagggccagcagcagcagggccagaccgugaccaagaaguccgccgccgaggcguccaagaagccgcgccagaagcgcaccgccacgaaggccuacaacgucacccaggccuucgggcggcgcggccccgagcagacccaggggaacuucggcgaccaggagcugauccggcaggggaccgacuacaagcacuggccccagaucgcccaguucgcgcccagcgccuccgccuucuucggcaugagccgcaucggcauggaggugacgccguccgggaccuggcucaccuacaccggcgccaucaagcuggacgacaaggaccccaacuucaaggaccaggugauccugcucaacaagcacaucgacgccuacaagacguucccgcccaccgagcccaagaaggacaagaagaagaaggcggacgagacccaggcccugccccagcggcagaagaagcagcagaccgucacgcugcuccccgccgccgaccuggacgacuucagcaagcagcugcagcaguccaugagcuccgcggacagcacccaggccugaggacuagucccuguucccagagcccacuuuuuuuucuuuuuuugaaauaaaauagccugucuuucagaucucaaaggcucuuuucagagccaccaaaaaaaaaaaaaaaaaaaaaaaaaaaaaaaaaaaaaaaaaaaaaaaaaaaaaaaaaaaaaaaaaaaaaaaaaaaaaaaaaaaaaaaaaaaaaaaaaaaaa

SEQ ID NO: 19332 - RNA, 1532 nt, Artificial Sequence
  SARS-CoV-2__MT628091.1__nucleocapsid protein (N) mRNA gc
aggagagucccgcagucggcguccagcggcucugcuuguucgugugugugucguugcaggccuuauucaagcuuaccaugagcgacaacggcccccagaaccagcgcaacgccccgcggaucaccuucgggggccccuccgacagcaccggguccaaccagaacggcgagcgcagcggggcccgguccaagcagcgccggccccagggccugcccaacaacacggcgagcugguucaccgcccucacccagcacggcaaggaggaccugaaguucccgcgcgggcagggcgugcccaucaacaccaacuccagccccgacgaccagaucggguacuaccggcgcgccacgcggcgcauccggggcggggacggcaagaugaaggaccugagcccccgcugguacuucuacuaccucggcaccgggccggaggccggccugcccuacggggccaacaaggacggcaucaucugggucgcgaccgagggcgcccugaacacccccaaggaccacaucgggacgcggaaccccgccaacaacgccgcgaucgugcuccagcugccgcagggcaccacccugcccaagggguucuacgccgagggcucccgcgggggcucccaggccagcucccucagcuccagccggucccgcaacagcucccggaacagcacccccggcagcucccgcgggacgagccccgcccggauggccggcaacgggggcgacgcggcccuggcccugcuccugcuggaccgccucaaccagcuggaguccaagaugagcgggaagggccagcagcagcagggccagaccgugaccaagaaguccgccgccgaggcgagcaagaagccgcggcagaagcgcaccgccacgaaggccuacaacgucacccaggccuucgggcgccggggccccgagcagacccaggggaacuucggcgaccaggagcugauccgccaggggaccgacuacaagcacuggccccagaucgcccaguucgcgcccuccgccagcgccuucuucggcaugucccggaucggcauggaggugacgccgagcgggaccuggcucaccuacaccggcgccaucaagcuggacgacaaggaccccaacuucaaggaccaggugauccugcucaacaagcacaucgacgccuacaagacguucccgcccaccgagcccaagaaggacaagaagaagaaggcggacgagacccaggcccugccccagcgccagaagaagcagcagaccgucacgcugcuccccgccgccgaccuggacgacuucuccaagcagcugcagcagagcauguccagcgcggacuccacccaggccugaggacuagucccuguucccagagcccacuuuuuuuucuuuuuuugaaauaaaauagccugucuuucagaucucaaaggcucuuuucagagccaccaaaaaaaaaaaaaaaaaaaaaaaaaaaaaaaaaaaaaaaaaaaaaaaaaaaaaaaaaaaaaaaaaaaaaaaaaaaaaaaaaaaaaaaaaaaaaaaaaaaaa

SEQ ID NO: 19333 - RNA, 1532 nt, Artificial Sequence
  SARS-CoV-2__MT628156.1__nucleocapsid protein (N) mRNA gc
aggagagucccgcagucggcguccagcggcucugcuuguucgugugugugucguugcaggccuuauucaagcuuaccaugagcgacaacggcccccagaaccagcgcaacgccccgcggaucaccuucgggcgccccuccgacagcaccggcuccaaccagaacggggagcggagcggcgcccgcuccaagcagcggcgcccccaggggcugcccaacaacacggcgagcugguucaccgcccucacccagcacggcaaggaggaccugaaguucccgcggggccagggggugcccaucaacaccaacuccagccccgacgaccagaucggcuacuaccgccgggccacgcgccggauccgcgggggcgacgggaagaugaaggaccugagcccccggugguacuucuacuaccucggcaccggcccggaggccgggcugcccuacggcgccaacaaggacgggaucaucugggucgcgaccgagggcgcccugaacacccccaaggaccacaucggcacgcgcaaccccgccaacaacgccgcgaucgugcuccagcugccgcaggggaccacccugcccaagggcuucuacgccgaggggucccggggcgggucccaggccagcucccgcagcuccagccggucccgcaacagcucccggaacagcacccccggcagcucccgcggcacgagccccgcccggauggccgggaacggcggggacgcggcccucgcccugcugcuccuggaccgccugaaccagcucgaguccaagaugagcggcaaggggcagcagcagcagggccagaccgugaccaagaaguccgccgccgaggcgagcaagaagccgcgccagaagcggaccgccacgaaggccuacaacgucacccaggccuucggccgccgggggcccgagcagacccagggcaacuucggggaccaggagcugauccgccagggcaccgacuacaagcacuggccccagaucgcccaguucgcgcccuccgccagcgccuucuucgggaugucccggaucggcauggaggugacgccgagcggcaccuggcugaccuacaccggggccaucaagcucgacgacaaggaccccaacuucaaggaccaggugauccugcugaacaagcacaucgacgccuacaagacguucccgcccaccgagcccaagaaggacaagaagaagaaggcggacgagacccaggcccucccccagcgccagaagaagcagcagaccgucacgcugcugcccgccgccgaccucgacgacuucuccaagcagcugcagcagagcauguccagcgcggacuccacccaggccugaggacuagucccuguucccagagcccacuuuuuuuucuuuuuuugaaauaaaauagccugucuuucagaucucaaaggcucuuuucagagccaccaaaaaaaaaaaaaaaaaaaaaaaaaaaaaaaaaaaaaaaaaaaaaaaaaaaaaaaaaaaaaaaaaaaaaaaaaaaaaaaaaaaaaaaaaaaaaaaaaaaaa

SEQ ID NO: 19334 - RNA, 1532 nt, Artificial Sequence
  SARS-CoV-2__MT628169.1__nucleocapsid protein (N) mRNA gc
aggagagucccgcagucggcguccagcggcucugcuuguucgugugugugucguugcaggccuuauucaagcuuaccaugagcgacaacggcccccagaaccagcgcaacgccccgcggaucaccuucgggggccccuccgacagcaccggguccaaccagaacggcgagcgcagcggggcccgguccaagcagcgccggccccagggccugcccaacaacacggcgagcugguucaccgcccucacccagcacggcaaggaggaccugaaguucccgcgcgggcagggcgugcccaucaacaccaacuccagccccgacgaccagaucggguacuaccggcgcgccacgcggcgcauccggggcggggacggcaagaugaaggaccugagcccccgcugguacuucuacuaccucggcaccgggccggaggccggccugcccuacggggccaacaaggacggcaucaucugggucgcgaccgagggcgcccugaacacccccaaggaccacaucgggacgcggaaccccgccaacaacgccgcgaucgugcuccagcugccgcagggcaccacccugcccaagggguucuacgccgagggcucccgcgggggcucccaggccagcucccggagcuccagccgcucccggaacagcucccgcaacagcacccccggcagcucccgggggacgagccccgcccgcauggccggcaacgggggcgacgcggugcucgcccugcugcuccuggaccggcugaaccagcucgaguccaagaugagcgggaagggccagcagcagcagggccagaccgucaccaagaaguccgccgccgaggccagcaagaagccgcgccagaagcgcaccgcgacgaaggccuacaacgugacccaggccuucgggcggcgcggccccgagcagacccaggggaacuucggcgaccaggagcugauccggcaggggaccgacuacaagcacuggccccagaucgcccaguucgcccccuccgcgagcgccuucuucggcaugucccgcaucggcauggaggugacgccgagcgggaccuggcugaccuacaccggcgccaucaagcucgacgacaaggaccccaacuucaaggaccaggucauccugcugaacaagcacaucgacgccuacaagacguucccgcccaccgagcccaagaaggacaagaagaagaaggccgacgagacccaggcgcucccccagcggcagaagaagcagcagaccgugacgcugcugcccgccgccgaccucgacgacuucuccaagcagcugcagcagagcauguccagcgccgacuccacccaggcgugaggacuagucccuguucccagagcccacuuuuuuuucuuuuuuugaaauaaaauagccugucuuucagaucucaaaggcucuuuucagagccaccaaaaaaaaaaaaaaaaaaaaaaaaaaaaaaaaaaaaaaaaaaaaaaaaaaaaaaaaaaaaaaaaaaaaaaaaaaaaaaaaaaaaaaaaaaaaaaaaaaaaa

SEQ ID NO: 19335 - RNA, 1532 nt, Artificial Sequence
  SARS-CoV-2__MT628180.1__nucleocapsid protein (N) mRNA gc
aggagagucccgcagucggcguccagcggcucugcuuguucgugugugugucguugcaggccuuauucaagcuuaccaugagcgacaacggcccccagaaccagcgcaacgccccgcggaucaccuucgggggccuguccgacagcaccggguccaaccagaacggcgagcgcagcggggcccgguccaagcagcgccggccccagggccuccccaacaacacggcgagcugguucaccgcccugacccagcacggcaaggaggaccugaaguucccccgcgggcagggcgugccgaucaacaccaacuccagccccgacgaccagaucggguacuaccggcgcgccacgcggcgcauccggggcggggacggcaagaugaaggaccucagcccccgcugguacuucuacuaccugggcaccgggcccgaggccggccugccguacggggccaacaaggacggcaucaucugggucgcgaccgagggcgcccucaacacccccaaggaccacaucgggacgcggaaccccgccaacaacgccgcgaucgugcugcagcugccccagggcaccacccucccgaagggguucuacgccgagggcucccgcgggggcucccaggccagcucccggagcuccagccgcucccggaacagcucccgcaacagcacccccggcagcucccgggggacgagccccgcccgcauggccggcaacgggggcgacgcggcccuggcccugcuccugcuggaccggcucaaccagcuggaguccaagaugagcgggaagggccagcagcagcagggccagaccgugaccaagaaguccgccgccgaggcgagcaagaagccccgccagaagcgcaccgccacgaaggccuacaacgucacccaggccuucgggcggcgcggcccggagcagacccaggggaacuucggcgaccaggagcugauccggcaggggaccgacuacaagcacuggccccagaucgcccaguucgcgcccuccgccagcgccuucuucggcaugucccgcaucggcauggaggugacgcccagcgggaccuggcucaccuacaccggcgccaucaagcuggacgacaaggacccgaacuucaaggaccaggugauccugcucaacaagcacaucgacgccuacaagacguucccgcccaccgagcccaagaaggacaagaagaagaaggcggacgagacccaggcccugccccagcggcagaagaagcagcagaccgucacgcugcuccccgccgccgaccuggacgacuucuccaagcagcugcagcagagcauguccagcgcggacuccacccaggccugaggacuagucccuguucccagagcccacuuuuuuuucuuuuuuugaaauaaaauagccugucuuucagaucucaaaggcucuuuucagagccaccaaaaaaaaaaaaaaaaaaaaaaaaaaaaaaaaaaaaaaaaaaaaaaaaaaaaaaaaaaaaaaaaaaaaaaaaaaaaaaaaaaaaaaaaaaaaaaaaaaaaa

SEQ ID NO: 19336 - RNA, 1532 nt, Artificial Sequence
  SARS-CoV-2__MT628202.1__nucleocapsid protein (N) mRNA gc
aggagagucccgcagucggcguccagcggcucugcuuguucgugugugugucguugcaggccuuauucaagcuuaccaugagcgacaacggcccccagaaccagcgcaacgccccgcggaucaccuucgggggccccuccgacagcaccggguccaaccagaacggcgagcgcagcggggcccgguccaagcagcgccggccccagggccugcccaacaacacggcgagcugguucaccgcccucacccagcacggcaaggaggaccugaaguucccgcgcgggcagggcgugcccaucaacaccaacuccagccccgacgaccagaucggguacuaccggcgcgccacgcggcgcauccggggcggggacggcaagaugaaggaccugagcccccgcugguacuucuacuaccucggcaccgggccggaggccggccugcccuacggggccaacaaggacggcaucaucugggucgcgaccgagggcgcccugaacacccccaaggaccacaucgggacgcggaaccccgccaacaacgccgcgaucgugcuccagcugccgcagggcaccacccugcccaagggguucuacgccgagggcagccgcgggggcucccaggccagcucccggagcuccagccgcucccggaacagccuccgcaacuccacccccggcagcagccgggggacgucccccgcccgcauggccggcaacgggggcgacgcggcccuggcccugcuccugcuggaccggcucaaccagcuggagagcaagauguccgggaagggccagcagcagcagggccagaccgugaccaagaaguccgccgccgaggcguccaagaagccgcgccagaagcgcaccgccacgaaggccuacaacgucacccaggccuucgggcggcgcggccccgagcagacccaggggaacuucggcgaccaggagcugauccggcaggggaccgacuacaagcacuggccccagaucgcccaguucgcgcccagcgccuccgccuucuucggcaugagccgcaucggcauggaggugacgccguccgggaccuggcucaccuacaccggcgccaucaagcuggacgacaaggaccccaacuucaaggaccaggugauccugcucaacaagcacaucgacgccuacaagacguucccgcccaccgagcccaagaaggacaagaagaagaaggcggacgagacccaggcccugccccagcggcagaagaagcagcagaccgucacgcugcuccccgccgccgaccuggacgacuucagcaagcagcugcagcaguccaugagcaucgcggacuccacccaggccugaggacuagucccuguucccagagcccacuuuuuuuucuuuuuuugaaauaaaauagccugucuuucagaucucaaaggcucuuuucagagccaccaaaaaaaaaaaaaaaaaaaaaaaaaaaaaaaaaaaaaaaaaaaaaaaaaaaaaaaaaaaaaaaaaaaaaaaaaaaaaaaaaaaaaaaaaaaaaaaaaaaaa

SEQ ID NO: 19337 - RNA, 1532 nt, Artificial Sequence
  SARS-CoV-2__MT628209.1__nucleocapsid protein (N) mRNA gc
aggagagucccgcagucggcguccagcggcucugcuuguucgugugugugucguugcaggccuuauucaagcuuaccaugagcgacaacggcccccagaaccagcgcaacgccccgcggaucaccuucgggggccccuccgacagcaccggguccaaccagaacggcgagcgcagcggggcccgguccaagcagcgccggccccagggccugcccaacaacacggcgagcugguucaccgcccucacccagcacggcaaggaggaccugaaguucccgcgcgggcagggcgugcccaucaacaccaacuccagccccgacgaccagaucggguacuaccggcgcgccacgcggcgcauccggggcggggacggcaagaugaaggaccugagcccccgcugguacuucuacuaccucggcaccgggccggaggccggccugcccuacggggccaacaaggacggcaucaucugggucgcgaccgagggcgcccugaacacccccaaggaccacaucgggacgcggaaccccgccaacaacgccgcgaucgugcuccagcugccgcagggcaccacccugccccgcggguucuacgccgagggcucccgcgggggcucccaggccagcucccggagcuccagccggucccgcaacagcucccggaacagcacccccggcagcuccaagcgcacgagccccgcccggauggccgggaacggcggggacgcggcccucgcccugcugcuccuggaccgccugaaccagcucgaguccaagaugagcggcaaggggcagcagcagcagggccagaccgugaccaagaaguccgccgccgaggcgagcaagaagccgcgccagaagcggaccgccacgaaggccuacaacgucacccaggccuucggccgccgggggcccgagcagacccagggcaacuucggggaccaggagcugauccgccagggcaccgacuacaagcacuggccccagaucgcccaguucgcgcccuccgccagcgccuucuucgggaugucccggaucggcauggaggugacgccgagcggcaccuggcugaccuacaccggggccaucaagcucgacgacaaggaccccaacuucaaggaccaggugauccugcugaacaagcacaucgacgccuacaagacguucccgcccaccgagcccaagaaggacaagaagaagaaggcggacgagacccaggcccucccccagcgccagaagaagcagcagaccgucacgcugcugcccgccgccgaccucgacgacuucuccaagcagcugcagcagagcauguccagcgcggacuccacccaggccugaggacuagucccuguucccagagcccacuuuuuuuucuuuuuuugaaauaaaauagccugucuuucagaucucaaaggcucuuuucagagccaccaaaaaaaaaaaaaaaaaaaaaaaaaaaaaaaaaaaaaaaaaaaaaaaaaaaaaaaaaaaaaaaaaaaaaaaaaaaaaaaaaaaaaaaaaaaaaaaaaaaaa

SEQ ID NO: 19338 - RNA, 1532 nt, Artificial Sequence
  SARS-CoV-2__MT632624.1__nucleocapsid protein (N) mRNA gc
aggagagucccgcagucggcguccagcggcucugcuuguucgugugugugucguugcaggccuuauucaagcuuaccaugagcgacaacggcccccagaaccagcgcaacgccccgcggaucaccuucgggggccccuccgacagcaccggguccaaccagaacggcgagcgcagcggggcccgguccaagcagcgccggccccagggccugcccaacaacacggcgagcugguucaccgcccucacccagcacggcaaggaggaccugaaguucccgcgcgggcagggcgugcccaucaacaccaacuccagccccgacgaccagaucggguacuaccggcgcgccacgcggcgcauccggggcggggacggcaagaugaaggaccugagcccccgcugguacuucuacuaccucggcaccgggccggaggccggccugcccuacggggccaacaaggacggcaucaucugggucgcgaccgagggcgcccugaacacccccaaggaccacaucgggacgcggaaccccgccaacaacgccgcgaucgugcuccagcugccgcagggcaccacccugcccaagggguucuacgccgagggcucccgcgggggcucccaggccagcucccggagcuccagccgcucccggaacagcucccgcaacagcacccccggcagcucccgggggacgagccccgcccgcauggccggcaacgggggcgacgcggcccucgcccugcugcuccuggaccggcugaaccagcucgaguccaagaugagcgggaagggccagcagcagcagggccagaccgugaccaagaaguccgccgccgaggcgagcaagaagccgcgccagaagcgcaccgccacgaaggccuacaacgucacccaggccuucgggcggcgcggccccgagcagacccaggggaacuucggcgaccaggagcugauccggcaggggaccgacuacaagcacuggccccagaucgcccaguucgcgcccuccgccagcgccuucuucggcaugucccgcaucggcauggaggugacgccgagcgggaccuggcugaccuacaccggcgccaucaagcucgacgacaaggaccccaacuucaaggaccaggugauccugcugaacaagcacaucgacgccuacaagacguucccgcccaccgagcccaagaaggacaagaagaagaaggcggacgagacccaggcccucccccagcggcagaagaagcagcagaccgucacgcugcugcccuccgccgaccucgacgacuucagcaagcagcugcagcaguccaugagcuccgccgacagcacccaggcgugaggacuagucccuguucccagagcccacuuuuuuuucuuuuuuugaaauaaaauagccugucuuucagaucucaaaggcucuuuucagagccaccaaaaaaaaaaaaaaaaaaaaaaaaaaaaaaaaaaaaaaaaaaaaaaaaaaaaaaaaaaaaaaaaaaaaaaaaaaaaaaaaaaaaaaaaaaaaaaaaaaaaa

SEQ ID NO: 19339 - RNA, 1532 nt, Artificial Sequence
  SARS-CoV-2__MT632797.1__nucleocapsid protein (N) mRNA gc
aggagagucccgcagucggcguccagcggcucugcuuguucgugugugugucguugcaggccuuauucaagcuuaccaugagcgacaacggcccccagaaccagcgcaacgccccgcggaucaccuucgggggccccuccgacagcaccggguccaaccagaacggcgagcgcagcggggcccgguccaagcagcgccggccccagggccugcccaacaacacggcgagcugguucaccgcccucacccagcacggcaaggaggaccugaaguucccgcgcgggcagggcgugcccaucaacaccaacuccagccccgacgaccagaucggguacuaccggcgcgccacgcggcgcauccggggcggggacggcaagaugaaggaccugagcccccgcugguacuucuacuaccucggcaccgggccggaggccggccugcccuacggggccaacaaggacggcaucaucugggucgcgaccgagggcgcccugaacacccccaaggaccacaucgggacgcggaaccccgccaacaacgccgcgaucgugcuccagcugccgcagggcaccacccugcccaagggguucuacgccgagggcucccgcgggggcucccaggccagcucccggagcuccagccgcucccggaacagcucccgcaacagcacccccggcagcucccgggggacgagccccgcccgcauggccggcaacgggggcgacgcggcccucgcccugcugcuccuggaccggcugaaccagcucgaguccaagaugagcgggaagggccagcagcagcagggccagaccgugaccaagcgcuccgccgccgaggcgagcaagaagccgcgccagaagcggaccgccacgaaggccuacaacgucacccaggccuucgggcgccggggccccgagcagacccaggggaacuucggcgaccaggagcugauccgccaggggaccgacuacaagcacuggccccagaucgcccaguucgcgcccuccgccagcgccuucuucggcaugucccggaucggcauggaggugacgccgagcgggaccuggcugaccuacaccggcgccaucaagcucgacgacaaggaccccaacuucaaggaccaggugauccugcugaacaagcacaucgacgccuacaagacguucccgcccaccgagcccaagaaggacaagaagaagaaggcggacgagacccaggcccucccccagcgccagaagaagcagcagaccgucacgcugcugcccgccgccgaccucgacgacuucuccaagcagcugcagcagagcauguccagcgcggacuccacccaggccugaggacuagucccuguucccagagcccacuuuuuuuucuuuuuuugaaauaaaauagccugucuuucagaucucaaaggcucuuuucagagccaccaaaaaaaaaaaaaaaaaaaaaaaaaaaaaaaaaaaaaaaaaaaaaaaaaaaaaaaaaaaaaaaaaaaaaaaaaaaaaaaaaaaaaaaaaaaaaaaaaaaaa

SEQ ID NO: 19340 - RNA, 1532 nt, Artificial Sequence
  SARS-CoV-2__MT632800.1__nucleocapsid protein (N) mRNA gc
aggagagucccgcagucggcguccagcggcucugcuuguucgugugugugucguugcaggccuuauucaagcuuaccaugagcgacaacggcccccagaaccagcgcaacgccccgcggaucaccuucgggggccccuccgacagcaccggguccaaccagaacggcgagcgcagcggggcccgguccaagcagcgccggccccagggccugcccaacaacacggcgagcugguucaccgcccucacccagcacggcaaggaggaccugaaguucccgcgcgggcagggcgugcccaucaacaccaacuccagccccgacgaccagaucggguacuaccggcgcgccacgcggcgcauccggggcggggacggcaagaugaaggaccugagcccccgcugguacuucuacuaccucggcaccgggccggaggccggccugcccuacggggccaacaaggacggcaucaucugggucgcgaccgagggcgcccugaacacccccaaggaccacaucgggacgcggaaccccgccaacaacgccgcgaucgugcuccagcugccgcagggcaccacccugcccaagggguucuacgccgagggcucccgcgggggcucccaggccagcucccggagcuccagccgcucccggaacagcucccgcaacagcacccccggcagcucccgggggacgagccccgcccgcauggccggcaacgggggcgacgcggcccucgcccugcugcuccuggaccggcugaaccagcucgaguccaagaugagcgggaagggccagcagcagcagggccagaccgugaccaagaaguccgccgccgaggcgagcaagaagccgcgccagaagcgcaccgccacgaaggccuacaacgucacccaggccuucgggcggcgcggccccgagcagacccaggggaacuucggcgaccaggagcugauccggcaggggaccgacuacaagcacuggccccagaucgcccaguucgcgcccuccgccagcgccuucuucggcaugucccgcaucggcauggaggugacgccgagcgggaccuggcugaccuacaccggcgccaucaagcucaacgacaaggaccccaacuucaaggaccaggugauccugcugaacaagcacaucgacgccuacaagacguucccgcccaccgagcccaagaaggacaagaagaagaaggcggacgagacccaggcccucccccagcggcagaagaagcagcagaccgucacgcugcugcccgccgccgaccucgacgacuucuccaagcagcugcagcagagcauguccagcgcggacuccacccaggccugaggacuagucccuguucccagagcccacuuuuuuuucuuuuuuugaaauaaaauagccugucuuucagaucucaaaggcucuuuucagagccaccaaaaaaaaaaaaaaaaaaaaaaaaaaaaaaaaaaaaaaaaaaaaaaaaaaaaaaaaaaaaaaaaaaaaaaaaaaaaaaaaaaaaaaaaaaaaaaaaaaaaa

SEQ ID NO: 19341 - RNA, 1532 nt, Artificial Sequence
  SARS-CoV-2__MT632822.1__nucleocapsid protein (N) mRNA gc
aggagagucccgcagucggcguccagcggcucugcuuguucgugugugugucguugcaggccuuauucaagcuuaccaugagcgacaacggcccccagaaccagcgcaacgccccgcggaucaccuucgggggccccuccgacagcaccggguccaaccagaacggcgagcgcagcggggcccgguccaagcagcgccggccccagggccugcccaacaacacggcgagcugguucaccgcccucacccagcacggcaaggaggaccugaaguucccgcgcgggcagggcgugcccaucaacaccaacuccagccccgacgaccagaucggguacuaccggcgcgccacgcggcgcauccggggcggggacggcaagaugaaggaccugagcccccgcugguacuucuacuaccucggcaccgggccggaggccggccugcccuacggggccaacaaggacggcaucaucugggucgcgaccgagggcgcccugaacacccccaaggaccacaucgggacgcggaaccccgccaacaacgccgcgaucgugcuccagcugccgcagggcaccacccugcccaagggguucuacgccgagggcucccgcgggggcucccaggccagcucccggagcuccagccgcucccggaacagcucccgcaacagcacccccggcagcucccgggggacgagccccgcccgcauggccugcaacggcggggacgcggcccucgcccugcugcuccuggaccggcugaaccagcucgaguccaagaugagcggcaaggggcagcagcagcagggccagaccgugaccaagaaguccgccgccgaggcgagcaagaagccgcgccagaagcgcaccgccacgaaggccuacaacgucacccaggccuucggccggcgcgggcccgagcagacccagggcaacuucggggaccaggagcugauccggcagggcaccgacuacaagcacuggccccagaucgcccaguucgcgcccuccgccagcgccuucuucgggaugucccgcaucggcauggaggugacgccgagcggcaccuggcugaccuacaccggggccaucaagcucgacgacaaggaccccaacuucaaggaccaggugauccugcugaacaagcacaucgacgccuacaagacguucccgcccaccgagcccaagaaggacaagaagaagaaggcggacgagacccaggcccucccccagcggcagaagaagcagcagaccgucacgcugcugcccgccgccgaccucgacgacuucuccaagcagcugcagcagagcauguccagcgcggacuccacccaggccugaggacuagucccuguucccagagcccacuuuuuuuucuuuuuuugaaauaaaauagccugucuuucagaucucaaaggcucuuuucagagccaccaaaaaaaaaaaaaaaaaaaaaaaaaaaaaaaaaaaaaaaaaaaaaaaaaaaaaaaaaaaaaaaaaaaaaaaaaaaaaaaaaaaaaaaaaaaaaaaaaaaaa

SEQ ID NO: 19342 - RNA, 1532 nt, Artificial Sequence
  SARS-CoV-2__MT614463.1__nucleocapsid protein (N) mRNA gc
aggagagucccgcagucggcguccagcggcucugcuuguucgugugugugucguugcaggccuuauucaagcuuaccaugagcgacaacggcccccagaaccagcgcaacgccccgcggaucaccuucgggggccccuccgacagcaccggguccaaccagaacggcgagcgcagcggggcccgguccaagcagcgccggccccagggccugcccaacaacacggcgagcugguucaccgcccucacccagcacggcaaggaggaccugaaguucccgcgcgggcagggcgugcccaucaacaccaacuccagccccgacgaccagaucggguacuaccggcgcgccacgcggcgcauccggggcggggacggcaagaugaaggaccugagcccccgcugguacuucuacuaccucggcaccgggccggaggccggccugcccuacggggccaacaaggacggcaucaucugggucgcgaccgagggcgcccugaacacccccaaggaccacaucgggacgcggaaccccgccaacaacgccgcgaucgugcuccagcugccgcagggcaccacccugcccaagggguucuacgccgagggcucccgcgggggcucccaggccagcucccggagcuccagccgcucccggaacagcucccgcaacagcacccccggcagcucccgggggacgagccccgcccgcauggccggcaacgggggcgacgcggcccucgcccugcugcuccuggaccggcugaaccagcucgaguccaagaugagcgggaagggccagcagcagcagggccagaccgugaccaagaaguccgccgccgaggcgagcaagaagccgcgccagaagcgcaccgccacgaaggccuacaacgucacccaggccuucgggcggcgcggccccgagcagacccaggggaacuucggcgaccaggagcugauccggcaggggaccgacuacaagcacuggccccagaucgcccaguucgcgcccuccgccagcgccuucuucggcaugucccgcaucggcauggaggugacgccgagcgggaccuggcugaccuacaccggcgccaucaagcucgacgacaaggaccccaacuucaaggaccaggugauccugcugaacaagcacaucgacgccuacaagacguucccgcccaccgagcccaagaaggacaagaagaagaaggcggacgagacccaggcccucccccagcggaagaagaagcagcagaccgucacgcugcugcccgccgccgaccucgacgacuucuccaagcagcugcagcagagcauguccagcgcggacuccacccaggccugaggacuagucccuguucccagagcccacuuuuuuuucuuuuuuugaaauaaaauagccugucuuucagaucucaaaggcucuuuucagagccaccaaaaaaaaaaaaaaaaaaaaaaaaaaaaaaaaaaaaaaaaaaaaaaaaaaaaaaaaaaaaaaaaaaaaaaaaaaaaaaaaaaaaaaaaaaaaaaaaaaaaa

SEQ ID NO: 19343 - RNA, 1532 nt, Artificial Sequence
  SARS-CoV-2__MT614486.1__nucleocapsid protein (N) mRNA gc
aggagagucccgcagucggcguccagcggcucugcuuguucgugugugugucguugcaggccuuauucaagcuuaccaugagcgacaacggcccccagaaccagcgcaacgccccgcggaucaccuucgggggccccuccgacagcaccggguccaaccagaacggcgagcgcagcggggcccgguccaagcagcgccggccccagggccugcccaacaacacggcgagcugguucaccgcccucacccagcacggcaaggaggaccugaaguucccgcgcgggcagggcgugcccaucaacaccaacuccagccccgacgaccagaucggguacuaccggcgcgccacgcggcgcauccggggcggggacggcaagaugaaggaccugagcccccgcugguacuucuacuaccucggcaccgggccggaggccggccugcccuacggggccaacaaggacggcaucaucugggucgcgaccgagggcgcccugaacacccccaaggaccacaucgggacgcggaaccccgccaacaacgccagcaucgugcuccagcugccgcagggcaccacccugcccaagggguucuacgcggagggcucccgcgggggcagccaggccuccagccgguccagcucccgcagccggaacuccagccgcaacagcacccccggcuccagccgggggacgucccccgcccgcauggccggcaacgggggcgacgccgcgcucgcccugcugcuccuggaccggcugaaccagcucgagagcaagauguccgggaagggccagcagcagcagggccagaccgugaccaagaaguccgccgccgaggccuccaagaagccgcgccagaagcgcaccgcgacgaaggccuacaacgucacccaggccuucgggcggcgcggccccgagcagacccaggggaacuucggcgaccaggagcugauccggcaggggaccgacuacaagcacuggccccagaucgcccaguucgcccccagcgcguccgccuucuucggcaugagccgcaucggcauggaggugacgccguccgggaccuggcugaccuacaccggcgccaucaagcucgacgacaaggaccccaacuucaaggaccaggugauccugcugaacaagcacaucgacgccuacaagacguucccgcccaccgagcccaagaaggacaagaagaagaaggccgacgagacccaggcgcucccccagcggcagaagaagcagcagaccgucacgcugcugcccgccgccgaccucgacgacuucagcaagcagcugcagcaguccaugagcuccgccgacagcacccaggcgugaggacuagucccuguucccagagcccacuuuuuuuucuuuuuuugaaauaaaauagccugucuuucagaucucaaaggcucuuuucagagccaccaaaaaaaaaaaaaaaaaaaaaaaaaaaaaaaaaaaaaaaaaaaaaaaaaaaaaaaaaaaaaaaaaaaaaaaaaaaaaaaaaaaaaaaaaaaaaaaaaaaaa

SEQ ID NO: 19344 - RNA, 1532 nt, Artificial Sequence
  SARS-CoV-2__MT614508.1__nucleocapsid protein (N) mRNA gc
aggagagucccgcagucggcguccagcggcucugcuuguucgugugugugucguugcaggccuuauucaagcuuaccaugagcgacaacggcccccagaaccagcgcaacgccccgcggaucaccuucgggggccccuccgacagcaccggguccaaccagaacggcgagcgcagcggggcccgguccaagcagcgccggccccagggccugcccaacaacacggcgagcugguucaccgcccucacccagcacggcaaggaggaccugaaguucccgcgcgggcagggcgugcccaucaacaccaacuccagccccgacgaccagaucggguacuaccggcgcgccacgcggcgcauccggggcggggacggcaagaugaaggaccugagcccccgcugguacuucuacuaccucggcaccgggccggaggccggccugcccuacggggccaacaaggacggcaucaucugggucgcgaccgagggcgcccugaacacccccaaggaccacaucgggacgcggaaccccgccaacaacgccgcgaucgugcuccagcugccgcagggcaccacccugcccaagggguucuacgccgagggcucccgcgggggcucccaggccagcucccggagcuccagccgcucccggaacagcucccgcaacagcacccccggcagcucccgggggacgagccccgcccgcauggccggcaacgggggcgacgcggcccucgcccugcugcuccuggaccggcugaaccagcucgaguccaagaugagcgggaagggccagcagcagcagggccagaccgugaccaagaaguccgccgccgaggcgagcaagaagccgcgccagaagcgcaccgccacgaaggccuacaacgucacccaggccuucgggcggcgcggccccgagcagacccaggggaacuucggcgaccacgagcugauccggcaggggaccgacuacaagcacuggccccagaucgcccaguucgcgcccuccgccagcgccuucuucggcaugucccgcaucggcauggaggugacgccgagcgggaccuggcugaccuacaccggcgccaucaagcucgacgacaaggaccccaacuucaaggaccaggugauccugcugaacaagcacaucgacgccuacaagacguucccgcccaccgagcccaagaaggacaagaagaagaaggcggacgagacccaggcccucccccagcggcagaagaagcagcagaccgucacgcugcugcccgccgccgaccucgacgacuucuccaagcagcugcagcagagcauguccagcgcggacuccacccaggccugaggacuagucccuguucccagagcccacuuuuuuuucuuuuuuugaaauaaaauagccugucuuucagaucucaaaggcucuuuucagagccaccaaaaaaaaaaaaaaaaaaaaaaaaaaaaaaaaaaaaaaaaaaaaaaaaaaaaaaaaaaaaaaaaaaaaaaaaaaaaaaaaaaaaaaaaaaaaaaaaaaaaa

SEQ ID NO: 19345 - RNA, 1532 nt, Artificial Sequence
  SARS-CoV-2__MT614531.1__nucleocapsid protein (N) mRNA gc
aggagagucccgcagucggcguccagcggcucugcuuguucgugugugugucguugcaggccuuauucaagcuuaccaugagcgacaacggcccccagaaccagcgcaacgccccgcggaucaccuucgggggccccuccgacagcaccggguccaaccagaacggcgagcgcagcggggcccgguccaagcagcgccggccccagggccugcccaacaacacggcgagcugguucaccgcccucacccagcacggcaaggaggaccugaaguucccgcgcgggcagggcgugcccaucaacaccaacuccagccccgacgaccagaucggguacuaccggcgcgccacgcggcgcauccggggcggggacggcaagaugaaggaccugagcccccgcugguacuucuacuaccucggcaccgggccggaggccggccugcccuacggggccaacaaggacggcaucaucugggucgcgaccgagggcgcccugaacacccccaaggaccacaucgggacgcggaaccccgccaacaacgccgcgaucgugcuccagcugccgcagggcaccacccugcccaagggguucuacgccgagggcucccgcgggggcucccaggccagcucccggagcuccagccgcucccggaacagcucccgcaacagcacccccggcagcucccgggggacgagccccgcccgcauggccggcaacgggggcgacgcggcccucgcccugcugcuccuggaccggcugaaccagcucgaguccaagaugagcgggaagggccagcagcagcagggccagaccgugaccaagaaguccgccgccgaggcgagcaagaagccgcgccagaagcgcaccgccacgaaggccuacaacgucacccaggccuucgggcggcgcggccccgagcagacccaggggaacuucggcgaccaggagcugauccggcaggggaccgacuacaagcacuggccccagaucgcccaguucgcgcccuccgccagcgccuucuucggcaugucccgcaucggcauggaggugacgccgagcgggaccuggcugaccuacaccggcgccaucaagcucgacgacaaggaccccaacuucaaggaccaggugauccugcugaacaagcacaucgacgccuacaagacguucccgcccaccgagcccaagaaggacaagaagaagaaggcggacgagacccacgcccucccccagcggcagaagaagcagcagaccgucacgcugcugcccgccgccgaccucgacgacuucuccaagcagcugcagcagagcauguccagcgcggacuccacccaggccugaggacuagucccuguucccagagcccacuuuuuuuucuuuuuuugaaauaaaauagccugucuuucagaucucaaaggcucuuuucagagccaccaaaaaaaaaaaaaaaaaaaaaaaaaaaaaaaaaaaaaaaaaaaaaaaaaaaaaaaaaaaaaaaaaaaaaaaaaaaaaaaaaaaaaaaaaaaaaaaaaaaaa

SEQ ID NO: 19346 - RNA, 1532 nt, Artificial Sequence
  SARS-CoV-2__MT621560.1__nucleocapsid protein (N) mRNA gc
aggagagucccgcagucggcguccagcggcucugcuuguucgugugugugucguugcaggccuuauucaagcuuaccaugagcgacaacggcccccagaaccagcgcaacgccccgcggaucaccuucgggggccccuccgacagcaccggguccaaccagaacggcgagcgcagcggggcccgguccaagcagcgccggccccagggccugcccaacaacacggcgagcugguucaccgcccucacccagcacggcaaggaggaccugaaguucccgcgcgggcagggcgugcccaucaacaccaacuccagccccgacgaccagaucggguacuaccggcgcgccacgcggcgcauccggggcggggacggcaagaugaaggaccugagcccccgcugguacuucuacuaccucggcaccgggccggaggccggccugcccuacggggccaacaaggacggcaucaucugggucgcgaccgagggcgcccugaacacccccaaggaccacaucgggacgcggaaccccgccaacaacgccgcgaucgugcuccagcugccgcagggcaccacccugcccaagggguucuacgccgagggcucccgcgggggcucccaggccagcucccggagcuccagccgcucccggaacagcucccgcaacagcacccccggcagcucccgggggacgagccccgcccgcauggccggcaacgggggcgacgcggcccucgcccugcugcuccuggaccggcugaaccagcucgaguccaagaugagcgggaagggccagcagcagcagggccagaccgugaccaagaaguccgccgccgaggcgagcaagaagccgcgcgagaagcgcaccgccacgaaggccuacaacgucacccaggccuucgggcggcgcggccccgagcagacccaggggaacuucggcgaccaggagcugauccggcaggggaccgacuacaagcacuggccccagaucgcccaguucgcgcccuccgccagcgccuucuucggcaugucccgcaucggcauggaggugacgccgagcgggaccuggcugaccuacaccggcgccaucaagcucgacgacaaggaccccaacuucaaggaccaggugauccugcugaacaagcacaucgacgccuacaagacguucccgcccaccgagcccaagaaggacaagaagaagaaggcggacgagacccaggcccucccccagcggcagaagaagcagcagaccgucacgcugcugcccgccgccgaccucgacgacuucuccaagcagcugcagcagagcauguccagcgcggacuccacccaggccugaggacuagucccuguucccagagcccacuuuuuuuucuuuuuuugaaauaaaauagccugucuuucagaucucaaaggcucuuuucagagccaccaaaaaaaaaaaaaaaaaaaaaaaaaaaaaaaaaaaaaaaaaaaaaaaaaaaaaaaaaaaaaaaaaaaaaaaaaaaaaaaaaaaaaaaaaaaaaaaaaaaaa

SEQ ID NO: 19347 - RNA, 1532 nt, Artificial Sequence
  SARS-CoV-2__MT510701.1__nucleocapsid protein (N) mRNA gc
aggagagucccgcagucggcguccagcggcucugcuuguucgugugugugucguugcaggccuuauucaagcuuaccaugagcgacaacggcccccagaaccagcgcaacgccccgcggaucaccuucgggggccccuccgacagcaccggguccaaccagaacggcgagcgcagcggggugcgguccaagcagcgccggccccagggccugcccaacaacacggccagcugguucaccgcgcucacccagcacggcaaggaggaccugaaguucccgcgcgggcagggcguccccaucaacaccaacuccagccccgacgaccagaucggguacuaccggcgcgccacgcggcgcauccggggcggggacggcaagaugaaggaccugagcccccgcugguacuucuacuaccucggcaccgggccggaggccggccugcccuacggggccaacaaggacggcaucaucuggguggccaccgagggcgcgcugaacacccccaaggaccacaucgggacgcggaaccccgccaacaacgccgccaucgugcuccagcugccgcagggcaccacccugcccaagggguucuacgcggagggcucccgcgggggcucccaggccagcucccggagcuccagccgcucccggaacagcucccgcaacagcacccccggcagcucccgggggacgagccccgcccgcauggccggcaacgggggcgacgccgcgcucgcccugcugcuccuggaccggcugaaccagcucgaguccaagaugagcgggaagggccagcagcagcagggccagaccgucaccaagaaguccgccgccgaggccagcaagaagccgcgccagaagcgcaccgcgacgaaggccuacaacgugacccaggccuucgggcggcgcggccccgagcagacccaggggaacuucggcgaccaggagcugauccggcaggggaccgacuacaagcacuggccccagaucgcccaguucgcccccuccgcgagcgccuucuucggcaugucccgcaucggcauggaggugcggccgagcgggacguggcugaccuacaccggcgccaucaagcucgacgacaaggaccccaacuucaaggaccaggucauccugcugaacaagcacaucgacgccuacaagaccuucccgcccacggagcccaagaaggacaagaagaagaaggccgacgagacccaggcgcucccccagcgccagaagaagcagcagaccgugacccugcugcccgccgccgaccucgacgacuucuccaagcagcugcagcagagcauguccagcgccgacuccacgcaggcgugaggacuagucccuguucccagagcccacuuuuuuuucuuuuuuugaaauaaaauagccugucuuucagaucucaaaggcucuuuucagagccaccaaaaaaaaaaaaaaaaaaaaaaaaaaaaaaaaaaaaaaaaaaaaaaaaaaaaaaaaaaaaaaaaaaaaaaaaaaaaaaaaaaaaaaaaaaaaaaaaaaaaa

SEQ ID NO: 19348 - RNA, 1523 nt, Artificial Sequence
  SARS-CoV-2__MT605818.1__nucleocapsid protein (N) mRNA gc
aggagagucccgcagucggcguccagcggcucugcuuguucgugugugugucguugcaggccuuauucaagcuuaccaugagcgacaacggcccccagaaccagcgcaacgccccgcggaucaccuucgggggccccuccgacagcaccggguccaaccagaacggcgagcgcagcggggcccgguccaagcagcgccggccccagggccugcccaacaacacggcgagcugguucaccgcccucacccagcacggcaaggaggaccugaaguucccgcgcgggcagggcgugcccaucaacaccaacuccagccccgacgaccagaucggguacuaccggcgcgccacgcggcgcauccggggcggggacggcaagaugaaggaccugagcccccgcugguacuucuacuaccucggcaccgggccggaggccggccugcccuacggggccaacaaggacggcaucaucugggucgcgaccgagggcgcccugaacacccccaaggaccacaucgggacgcggaaccccgccaacaacgccgcgaucgugcuccagcugccgcagggcaccacccugcccaagggguucuacgccgagggcagccgcgggggcucccaggccagcucccggagcuccagccgcucccggaacagcuccacccccggcagcagcaagcgcacgucccccgcccggauggccgggaacggcggggacgcggcccucgcccugcugcuccuggaccgccugaaccagcucgagagcaagauguccggcaaggggcagcagcagcagggccagaccgugaccaagaaguccgccgccgaggcguccaagaagccgcggcagaagcgcaccgccacgaaggccuacaacgucacccaggccuucggccgccgggggcccgagcagacccagggcaacuucggggaccaggagcugauccgccagggcaccgacuacaagcacuggccccagaucgcccaguucgcgcccagcgccuccgccuucuucgggaugagccggaucggcauggaggugacgccguccggcaccuggcugaccuacaccggggccaucaagcucgacgacaaggaccccaacuucaaggaccaggugauccugcugaacaagcacaucgacgccuacaagacguucccgcccaccgagcccaagaaggacaagaagaagaaggcggacgagacccaggcccucccccagcgccagaagaagcagcagaccgucacgcugcugcccgccgccgaccucgacgacuucagcaagcagcugcagcaguccaugagcuccgcggacagcacccaggccugaggacuagucccuguucccagagcccacuuuuuuuucuuuuuuugaaauaaaauagccugucuuucagaucucaaaggcucuuuucagagccaccaaaaaaaaaaaaaaaaaaaaaaaaaaaaaaaaaaaaaaaaaaaaaaaaaaaaaaaaaaaaaaaaaaaaaaaaaaaaaaaaaaaaaaaaaaaaaaaaaaaaa

SEQ ID NO: 19349 - RNA, 1532 nt, Artificial Sequence
  SARS-CoV-2__MT607248.1__nucleocapsid protein (N) mRNA gc
aggagagucccgcagucggcguccagcggcucugcuuguucgugugugugucguugcaggccuuauucaagcuuaccaugagcgacaacggcccccagaaccagcgcaacgccccgcggaucaccuucgggggccccuccgacagcaccggguccaaccagaacggcgagcgcagcggggcccgguccaagcagcgccggccccagggccugcccaacaacacggcgagcugguucaccgcccucacccagcacggcaaggaggaccugaaguucccgcgcgggcagggcgugcccaucaacaccaacuccagccccgacgaccagaucggguacuaccggcgcgccacgcggcgcauccggggcggggacggcaagaugaaggaccugagcccccgcugguacuucuacuaccucggcaccgggccggaggccggccugcccuacggggccaacaaggacggcaucaucugggucgcgaccgagggcgcccugaacacccccaaggaccacaucgggacgcggaaccccgccaacaacgccgcgaucgugcuccagcugccgcagggcaccaccuuccccaagggguucuacgccgagggcucccgcgggggcucccaggccagcucccggagcuccagccgcucccggaacagcucccgcaacagcacccccggcagcuccaagcggacgagccccgcccgcauggccgggaacggcggggacgcggcccuggcccuccugcugcucgaccggcugaaccagcuggaguccaagaugagcggcaaggggcagcagcagcagggccagaccgugaccaagaaguccgccgccgaggcgagcaagaagccgcgccagaagcgcaccgccacgaaggccuacaacgucacccaggccuucggccggcgcgggcccgagcagacccagggcaacuucggggaccaggagcucauccggcagggcaccgacuacaagcacuggccccagaucgcccaguucgcgcccuccgccagcgccuucuucgggaugucccgcaucggcauggaggugacgccgagcggcaccuggcugaccuacaccggggccaucaagcuggacgacaaggaccccaacuucaaggaccaggugauccuccugaacaagcacaucgacgccuacaagacguucccgcccaccgagcccaagaaggacaagaagaagaaggcggacgagacccaggcccugccccagcggcagaagaagcagcagaccgucacgcuccugcccgccgccgaccuggacgacuucuccaagcagcuccagcagagcauguccagcgcggacuccacccaggccugaggacuagucccuguucccagagcccacuuuuuuuucuuuuuuugaaauaaaauagccugucuuucagaucucaaaggcucuuuucagagccaccaaaaaaaaaaaaaaaaaaaaaaaaaaaaaaaaaaaaaaaaaaaaaaaaaaaaaaaaaaaaaaaaaaaaaaaaaaaaaaaaaaaaaaaaaaaaaaaaaaaaa

SEQ ID NO: 19350 - RNA, 1532 nt, Artificial Sequence
  SARS-CoV-2__MT607611.1__nucleocapsid protein (N) mRNA gc
aggagagucccgcagucggcguccagcggcucugcuuguucgugugugugucguugcaggccuuauucaagcuuaccaugagcgacaacggcccccagaaccagcgcaacgccccgcggaucaccuucgggggccccuccuacagcaccggguccaaccagaacggcgagcgcagcggggcccgguccaagcagcgccggccccagggccugcccaacaacacggcgagcugguucaccgcccucacccagcacggcaaggaggaccugaaguucccgcgcgggcagggcgugcccaucaacaccaacuccagccccgacgaccagaucggguacuaccggcgcgccacgcggcgcauccggggcggggacggcaagaugaaggaccugagcccccgcugguacuucuacuaccucggcaccgggccggaggccggccugcccuacggggccaacaaggacggcaucaucugggucgcgaccgagggcgcccugaacacccccaaggaccacaucgggacgcggaaccccgccaacaacgccgcgaucgugcuccagcugccgcagggcaccacccugcccaagggguucuacgccgagggcagccgcgggggcucccaggccagcucccggagcuccagccgcucccggaacagccuccgcaacuccacccccggcagcagccgggggacgucccccgcccgcauggccggcaacgggggcgacgcggcccuggcccugcuccugcuggaccggcucaaccagcuggagagcaagauguccgggaagggccagcagcagcagggccagaccgugaccaagaaguccgccgccgaggcguccaagaagccgcgccagaagcgcaccgccacgaaggccuacaacgucacccaggccuucgggcggcgcggccccgagcagacccaggggaacuucggcgaccaggagcugauccggcaggggaccgacuacaagcacuggccccagaucgcccaguucgcgcccagcgccuccgccuucuucggcaugagccgcaucggcauggaggugacgccguccgggaccuggcucaccuacaccggcgccaucaagcuggacgacaaggaccccaacuucaaggaccaggugauccugcucaacaagcacaucgacgccuacaagacguucccgcccaccgagcccaagaaggacaagaagaagaaggcggacgagacccaggcccugccccagcggcagaagaagcagcagaccgucacgcugcuccccgccgccgaccuggacgacuucagcaagcagcugcagcaguccaugagcuccgcggacagcacccaggccugaggacuagucccuguucccagagcccacuuuuuuuucuuuuuuugaaauaaaauagccugucuuucagaucucaaaggcucuuuucagagccaccaaaaaaaaaaaaaaaaaaaaaaaaaaaaaaaaaaaaaaaaaaaaaaaaaaaaaaaaaaaaaaaaaaaaaaaaaaaaaaaaaaaaaaaaaaaaaaaaaaaaa

SEQ ID NO: 19351 - RNA, 1532 nt, Artificial Sequence
  SARS-CoV-2__MT609566.1__nucleocapsid protein (N) mRNA gc
aggagagucccgcagucggcguccagcggcucugcuuguucgugugugugucguugcaggccuuauucaagcuuaccaugagcgacaacggcccccagaaccagcgcaacgccccgcggaucaccuucgggggccccuccgacagcaccggguccaaccagaacggcgagcgcagcggggcccgguccaagcagcgccggccccagggccugcccaacaacacggcgagcugguucaccgcccucacccagcacggcaaggaggaccugaaguucccgcgcgggcagggcgugcccaucaacaccaacuccagccccgacgaccagaucggguacuaccggcgcgccacgcggcgcauccggggcggggacggcaagaugaaggaccugagcccccgcugguacuucuacuaccucggcaccgggccggaggccggccugcccuacggggccaacaaggacggcaucaucugggucgcgaccgagggcgcccugaacacccccaaggaccacaucgggacgcggaaccccgccaacaacgccgcgaucgugcuccagcugccgcagggcaccacccugcccaagggguucuacgccgagggcucccgcgggggcucccaggccagcucccggagcuccagccgcucccggaacagcucccgcaacagcacccccggcagcucccgggggacgagccccgcccgcauggccggcaacgggggcgacgcggcccucgcccugcugcuccuggaccggcugaaccagcucgaguccaagaugagcgggaagggccagcagcagcagggccagaccgugaccaagaaguccgccgccgaggcgagcaagaagccgcgccagaagcgcaccgccacgaaggccuacaacgucacccaggccuucgggcggcgcggccccgagcagacccaggggaacuucggcgaccaggagcugauccggcaggggaccgacuacaagcacuggccccagaucgcccaguucgcgcccuccgccagcgccuucuucggcaugucccgcaucggcauggaggugacgccgagcgggaccuggcugaccuacaccggcgccaucaagcucgacgacaaggaccccaacuucaaggaccaggugauccugcugaacaagcacaucgacgccuacaagaucuucccgcccacggagcccaagaaggacaagaagaagaaggcggacgagacccaggcccucccccagcggcagaagaagcagcagaccgucacccugcugcccgccgccgaccucgacgacuucuccaagcagcugcagcagagcauguccagcgcggacuccacgcaggccugaggacuagucccuguucccagagcccacuuuuuuuucuuuuuuugaaauaaaauagccugucuuucagaucucaaaggcucuuuucagagccaccaaaaaaaaaaaaaaaaaaaaaaaaaaaaaaaaaaaaaaaaaaaaaaaaaaaaaaaaaaaaaaaaaaaaaaaaaaaaaaaaaaaaaaaaaaaaaaaaaaaaa

SEQ ID NO: 19352 - RNA, 1532 nt, Artificial Sequence
  SARS-CoV-2__MT601281.1__nucleocapsid protein (N) mRNA gc
aggagagucccgcagucggcguccagcggcucugcuuguucgugugugugucguugcaggccuuauucaagcuuaccaugagcgacaacggcccccagaaccagcgcaacgccccgcggaucaccuucgggggccccuccgacagcaccggguccaaccagaacggcgagcgcagcggggcccgguccaagcagcgccggccccagggccugcccaacaacacggcgagcugguucaccgcccucacccagcacggcaaggaggaccugaaguucccgcgcgggcagggcgugcccaucaacaccaacuccagccccgacgaccagaucggguacuaccggcgcgccacgcggcgcauccggggcggggacggcaagaugaaggaccugagcccccgcugguacuucuacuaccucggcaccgggccggaggccggccugcccuacggggccaacaaggacggcaucaucugggucgcgaccgagggcgcccugaacacccccaaggaccacaucgggacgcggaaccccgccaacaacgccgcgaucgugcuccagcugccgcagggcaccacccugcccaagggguucuacgccgagggcagccgcgggggcucccaggccagcucccggagcuccagccgcucccggaacagccuccgcaacuccacccccggcagcagccgggggacgucccccgcccgcauggccggcaacgggggcgacgcggcccuggcccugcuccugcuggaccggcucaaccagcuggagagcaagauguccgggaagggccagcagcagcagggccagaccgugaccaagaaguccgccgccgaggcguccaagaagccgcgccagaagcgcaccgccacgaaggccuacaacgucacccaggccuucgggcggcgcggccccgagcagacccaggggaacuucggcgaccaggagcugauccggcaggggaccgacuacaagcacuggccccagaucgcccaguucgcgcccagcgccuccgccuucuucggcaugagccgcaucggcauggaggugacgccguccgggaccuggcucaccuacaccggcgccaucaagcuggacgacaaggaccccaacuucaaggaccaggugauccugcucaacaagcacaucgacgccuacaagacguucccgcccaccgagcccaagaaggacaagaagaagaaggcggacgagacccaggcccugccccagcggcacaagaagcagcagaccgucacgcugcuccccgccgccgaccuggacgacuucagcaagcagcugcagcaguccaugagcuccgcggacagcacccaggccugaggacuagucccuguucccagagcccacuuuuuuuucuuuuuuugaaauaaaauagccugucuuucagaucucaaaggcucuuuucagagccaccaaaaaaaaaaaaaaaaaaaaaaaaaaaaaaaaaaaaaaaaaaaaaaaaaaaaaaaaaaaaaaaaaaaaaaaaaaaaaaaaaaaaaaaaaaaaaaaaaaaaa

SEQ ID NO: 19353 - RNA, 1532 nt, Artificial Sequence
  SARS-CoV-2__MT601290.1__nucleocapsid protein (N) mRNA gc
aggagagucccgcagucggcguccagcggcucugcuuguucgugugugugucguugcaggccuuauucaagcuuaccaugagcgacaacggcccccagaaccagcgcaacgccccgcggaucaccuucgggggccccuccgacagcaccggguccaaccagaacggcgagcgcagcggggcccgguccaagcagcgccggccccagggccugcccaacaacacggcgagcugguucaccgcccucacccagcacggcaaggaggaccugaaguucccgcgcgggcagggcgugcccaucaacaccaacuccagccccgacgaccagaucggguacuaccggcgcgccacgcggcgcauccggggcggggacggcaagaugaaggaccugagcccccgcugguacuucuacuaccucggcaccgggccggaggccggccugcccuacggggccaacaaggacggcaucaucugggucgcgaccgagggcgcccugaacacccccaaggaccacaucgggacgcggaaccccgccaacaacgccgcgaucgugcuccagcugccgcagggcaccacccugcccaagggguucuacgccgagggcagccgcgggggcacccaggccuccagccgguccagcucccgcagccggaacuccagccgcaacuccacgcccggcagcagcaagcggaccucccccgcccgcauggccgggaacggcggggacgcggcccucgcccugcugcuccuggaccggcugaaccagcucgagagcaagauguccggcaaggggcagcagcagcagggccagaccgugaccaagaaguccgccgccgaggcguccaagaagccgcgccagaagcgcacggccaccaaggccuacaacgucacccaggccuucggccggcgcgggcccgagcagauccagggcaacuucggggaccaggagcugauccggcagggcaccgacuacaagcacuggccccagaucgcccaguucgcgcccagcgccuccgccuucuucgggaugagccgcaucggcauggaggugacgccguccggcaccuggcugaccuacaccggggccaucaagcucgacgacaaggaccccaacuucaaggaccaggugauccugcugaacaagcacaucgacgccuacaagacguucccgcccaccgagcccaagaaggacaagaagaagaaggcggacgagacccaggcccucccccagcggcagaagaagcagcagaccgucacgcugcugcccgccgccgaccucgacgacuucagcaagcagcugcagcaguccaugagcuccgcggacagcacccaggccugaggacuagucccuguucccagagcccacuuuuuuuucuuuuuuugaaauaaaauagccugucuuucagaucucaaaggcucuuuucagagccaccaaaaaaaaaaaaaaaaaaaaaaaaaaaaaaaaaaaaaaaaaaaaaaaaaaaaaaaaaaaaaaaaaaaaaaaaaaaaaaaaaaaaaaaaaaaaaaaaaaaaa

SEQ ID NO: 19354 - RNA, 1532 nt, Artificial Sequence
  SARS-CoV-2__MT585039.1__nucleocapsid protein (N) mRNA gc
aggagagucccgcagucggcguccagcggcucugcuuguucgugugugugucguugcaggccuuauucaagcuuaccaugagcgacaacggcccccagaaccagcgcaacgccccgcggaucaccuucugcgggcccuccgacagcaccggcuccaaccagaacggggagcgcagcggcgcccgguccaagcagcgccggccccaggggcugcccaacaacacggcgagcugguucaccgcccucacccagcacggcaaggaggaccugaaguucccgcgcggccagggggugcccaucaacaccaacuccagccccgacgaccagaucggcuacuaccggcgcgccacgcggcgcauccgcgggggcgacgggaagaugaaggaccugagcccccggugguacuucuacuaccucggcaccggcccggaggccgggcugcccuacggcgccaacaaggacgggaucaucugggucgcgaccgagggcgcccugaacacccccaaggaccacaucggcacgcggaaccccgccaacaacgccgcgaucgugcuccagcugccgcaggggaccacccugcccaagggcuucuacgccgaggggucccgcggcgggucccaggccagcucccggagcuccagccgcucccggaacagcucccgcaacagcacccccggcagcucccggggcacgagccccgcccgcauggccgggaacggcggggacgcggcccucgcccugcugcuccuggaccggcugaaccagcucgaguccaagaugagcggcaaggggcagcagcagcagggccagaccgugaccaagaaguccgccgccgaggcgagcaagaagccgcgccagaagcgcaccgccacgaaggccuacaacgucacccaggccuucggccggcgcgggcccgagcagacccagggcaacuucggggaccaggagcugauccggcagggcaccgacuacaagcacuggccccagaucgcccaguucgcgcccuccgccagcgccuucuucgggaugucccgcaucggcauggaggugacgccgagcggcaccuggcugaccuacaccggggccaucaagcucgacgacaaggaccccaacuucaaggaccaggugauccugcugaacaagcacaucgacgccuacaagacguucccgcccaccgagcccaagaaggacaagaagaagaaggcggacgagacccaggcccucccccagcggcagaagaagcagcagaccgucacgcugcugcccgccgccgaccucgacgacuucuccaagcagcugcagcagagcauguccagcgcggacuccacccaggccugaggacuagucccuguucccagagcccacuuuuuuuucuuuuuuugaaauaaaauagccugucuuucagaucucaaaggcucuuuucagagccaccaaaaaaaaaaaaaaaaaaaaaaaaaaaaaaaaaaaaaaaaaaaaaaaaaaaaaaaaaaaaaaaaaaaaaaaaaaaaaaaaaaaaaaaaaaaaaaaaaaaaa

SEQ ID NO: 19355 - RNA, 1532 nt, Artificial Sequence
  SARS-CoV-2__MT585089.1__nucleocapsid protein (N) mRNA gc
aggagagucccgcagucggcguccagcggcucugcuuguucgugugugugucguugcaggccuuauucaagcuuaccaugagcgacaacggcccccagaaccagcgcaacgccccgcggaucaccuucgggggccccuccgacagcaccggguccaaccagaacggcgagcgcagcggggcccgguccaagcagcgccggccccagggccugcccaacaacacggcgagcugguucaccgcccucacccagcacggcaaggaggaccugaaguucccgcgcgggcagggcgugcccaucaacaccaacuccagccccgacgaccagaucggguacuaccggcgcgccacgcggcgcauccggggcggggacggcaagaugaaggaccugagcccccgcugguacuucuacuaccucggcaccgggccggaggccggccugcccuacggggccaacaaggacggcaucaucugggucgcgaccgagggcgcccugaacacccccaaggaccacaucgggacgcggaaccccgccaacaacgccgcgaucgugcuccagcugccgcagggcaccacccugcccaagggguucuacgccgagggcucccgcgggggcucccaggccagcucccggagcuccagccgcucccggaacagcucccgcaacagcacccccggcagcucccgggggacgagccccgccaagauggccggcaacgggggcgacgcggcccucgcccugcugcuccuggaccgccugaaccagcucgaguccaagaugagcgggaagggccagcagcagcagggccagaccgugaccaagaaguccgccgccgaggcgagcaagaagccgcggcagaagcgcaccgccacgaaggccuacaacgucacccaggccuucgggcgccggggccccgagcagacccaggggaacuucggcgaccaggagcugauccgccaggggaccgacuacaagcacuggccccagaucgcccaguucgcgcccuccgccagcgccuucuucggcaugucccggaucggcauggaggugacgccgagcgggaccuggcugaccuacaccggcgccaucaagcucgacgacaaggaccccaacuucaaggaccaggugauccugcugaacaagcacaucgacgccuacaagacguucccgcccaccgagcccaagaaggacaagaagaagaaggcggacgagacccaggcccucccccagcgccagaagaagcagcagaccgucacgcugcugcccgccgccgaccucgacgacuucuccaagcagcugcagcagagcauguccagcgcggacuccacccaggccugaggacuagucccuguucccagagcccacuuuuuuuucuuuuuuugaaauaaaauagccugucuuucagaucucaaaggcucuuuucagagccaccaaaaaaaaaaaaaaaaaaaaaaaaaaaaaaaaaaaaaaaaaaaaaaaaaaaaaaaaaaaaaaaaaaaaaaaaaaaaaaaaaaaaaaaaaaaaaaaaaaaaa

SEQ ID NO: 19356 - RNA, 1532 nt, Artificial Sequence
  SARS-CoV-2__MT479224.1__nucleocapsid protein (N) mRNA gc
aggagagucccgcagucggcguccagcggcucugcuuguucgugugugugucguugcaggccuuauucaagcuuaccaugagcgacaacggcccccagaaccagcgcaacgccccgcggaucaccuucgggggccccuccgacagcaccggguccaaccagaacggcgagcgcagcggggcccgguccaagcagcgccggccccagggccugcccaacaacacggcgagcugguucaccgcccucacccagcacggcaaggaggaccugaaguucccgcgcgggcagggcgugcccaucaacaccaacuccagccccgacgaccagaucggguacuaccggcgcgccacgcggcgcauccggggcggggacggcaagaugaaggaccugagcccccgcugguacuucuacuaccucggcaccgggccggaggccggccugcccuacggggccaacaaggacggcaucaucugggucgcgaccgagggcgcccugaacacccccaaggaccacaucgggacgcggaaccccgccaacaacgccgcgaucgugcuccagcugccgcagggcaccacccugcagaagggguucuacgccgagggcucccgcgggggcucccaggccagcucccggagcuccagccgcucccggaacagcucccgcaacagcacccccggcagcucccgggggacgagccccgcccgcauggccggcaacgggggcgacgcggcccucgcccugcugcuccuggaccggcugaaccagcucgaguccaagaugagcgggaagggccagcagcagcagggccagaccgugaccaagaaguccgccgccgaggcgagcaagaagccccgccagaagcgcaccgccacgaaggccuacaacgucacccaggccuucgggcggcgcggcccggagcagacccaggggaacuucggcgaccaggagcugauccggcaggggaccgacuacaagcacuggccccagaucgcccaguucgcgcccuccgccagcgccuucuucggcaugucccgcaucggcauggaggugacgcccagcgggaccuggcugaccuacaccggcgccaucaagcucgacgacaaggacccgaacuucaaggaccaggugauccugcugaacaagcacaucgacgccuacaagacguucccgcccaccgagcccaagaaggacaagaagaagaaggcggacgagacccaggcccucccccagcggcagaagaagcagcagaccgucacgcugcugcccgccgccgaccucgacgacuucuccaagcagcugcagcagagcauguccagcgcggacuccacccaggccugaggacuagucccuguucccagagcccacuuuuuuuucuuuuuuugaaauaaaauagccugucuuucagaucucaaaggcucuuuucagagccaccaaaaaaaaaaaaaaaaaaaaaaaaaaaaaaaaaaaaaaaaaaaaaaaaaaaaaaaaaaaaaaaaaaaaaaaaaaaaaaaaaaaaaaaaaaaaaaaaaaaaa

SEQ ID NO: 19357 - RNA, 1532 nt, Artificial Sequence
  SARS-CoV-2__MT499220.1__nucleocapsid protein (N) mRNA gc
aggagagucccgcagucggcguccagcggcucugcuuguucgugugugugucguugcaggccuuauucaagcuuaccaugagcgacaacggcccccagaaccagcgcaacgccccgcggaucaccuucgggggccccuccgacagcaccuucuccaaccagaacggggagcgcagcggcgcccgguccaagcagcgccggccccaggggcugcccaacaacacggcgagcugguucaccgcccucacccagcacggcaaggaggaccugaaguucccgcgcggccagggggugcccaucaacaccaacuccagccccgacgaccagaucggcuacuaccggcgcgccacgcggcgcauccgcgggggcgacgggaagaugaaggaccugagcccccggugguacuucuacuaccucggcaccggcccggaggccgggcugcccuacggcgccaacaaggacgggaucaucugggucgcgaccgagggcgcccugaacacccccaaggaccacaucggcacgcggaaccccgccaacaacgccgcgaucgugcuccagcugccgcaggggaccacccugcccaagggcuucuacgccgaggggucccgcggcgggucccaggccagcucccggagcuccagccgcucccggaacagcucccgcaacagcacccccggcagcucccggggcacgagccccgcccgcauggccgggaacggcggggacgcggcccucgcccugcugcuccuggaccggcugaaccagcucgaguccaagaugagcggcaaggggcagcagcagcagggccagaccgugaccaagaaguccgccgccgaggcgagcaagaagccgcgccagaagcgcaccgccacgaaggccuacaacgucacccaggccuucggccggcgcgggcccgagcagacccagggcaacuucggggaccaggagcugauccggcagggcaccgacuacaagcacuggccccagaucgcccaguucgcgcccuccgccagcgccuucuucgggaugucccgcaucggcauggaggugacgccgagcggcaccuggcugaccuacaccggggccaucaagcucgacgacaaggaccccaacuucaaggaccaggugauccugcugaacaagcacaucgacgccuacaagacguucccgcccaccgagcccaagaaggacaagaagaagaaggcggacgagacccaggcccucccccagcggcagaagaagcagcagaccgucacgcugcugcccgccgccgaccucgacgacuucuccaagcagcugcagcagagcauguccagcgcggacuccacccaggccugaggacuagucccuguucccagagcccacuuuuuuuucuuuuuuugaaauaaaauagccugucuuucagaucucaaaggcucuuuucagagccaccaaaaaaaaaaaaaaaaaaaaaaaaaaaaaaaaaaaaaaaaaaaaaaaaaaaaaaaaaaaaaaaaaaaaaaaaaaaaaaaaaaaaaaaaaaaaaaaaaaaaa

SEQ ID NO: 19358 - RNA, 1532 nt, Artificial Sequence
  SARS-CoV-2__MT576048.1__nucleocapsid protein (N) mRNA gc
aggagagucccgcagucggcguccagcggcucugcuuguucgugugugugucguugcaggccuuauucaagcuuaccaugagcgacaacggcccccagaaccagcgcaacgccccgcggaucaccuucgggggccccuccgacagcaccggguccaaccagaacggcgagcgcagcggggcccgguccaagcagcgccggccccagggccugcccaacaacacggcgagcugguucaccgcccucacccagcacggcaaggaggaccugaaguucccgcgcgggcagggcgugcccaucaacaccaacuccagccccgacgaccagaucggguacuaccggcgcgccacgcggcgcauccggggcggggacggcaagaugaaggaccugagcccccgcugguacuucuacuaccucggcaccgggccggaggccggccugcccuacggggccaacaaggacggcaucaucugggucgcgaccgagggcgcccugaacacccccaaguaccacaucgggacgcggaaccccgccaacaacgccgcgaucgugcuccagcugccgcagggcaccacccugcccaagggguucuacgccgagggcagccgcgggggcucccaggccagcucccggagcuccagccgcucccggaacagccuccgcaacuccacccccggcagcagccgggggacgucccccgcccgcauggccggcaacgggggcgacgcggcccuggcccugcuccugcuggaccggcucaaccagcuggagagcaagauguccgggaagggccagcagcagcagggccagaccgugaccaagaaguccgccgccgaggcguccaagaagccgcgccagaagcgcaccgccacgaaggccuacaacgucacccaggccuucgggcggcgcggccccgagcagacccaggggaacuucggcgaccaggagcugauccggcaggggaccgacuacaagcacuggccccagaucgcccaguucgcgcccagcgccuccgccuucuucggcaugagccgcaucggcauggaggugacgccguccgggaccuggcucaccuacaccggcgccaucaagcuggacgacaaggaccccaacuucaaggaccaggugauccugcucaacaagcacaucgacgccuacaagacguucccgcccaccgagcccaagaaggacaagaagaagaaggcggacgagacccaggcccugccccagcggcagaagaagcagcagaccgucacgcugcuccccgccgccgaccuggacgacuucagcaagcagcugcagcaguccaugagcuccgcggacagcacccaggccugaggacuagucccuguucccagagcccacuuuuuuuucuuuuuuugaaauaaaauagccugucuuucagaucucaaaggcucuuuucagagccaccaaaaaaaaaaaaaaaaaaaaaaaaaaaaaaaaaaaaaaaaaaaaaaaaaaaaaaaaaaaaaaaaaaaaaaaaaaaaaaaaaaaaaaaaaaaaaaaaaaaaa

SEQ ID NO: 19359 - RNA, 1532 nt, Artificial Sequence
  SARS-CoV-2__MT576057.1__nucleocapsid protein (N) mRNA gc
aggagagucccgcagucggcguccagcggcucugcuuguucgugugugugucguugcaggccuuauucaagcuuaccaugagcgacaacggcccccagaaccagcgcaacgccccgcggaucaccuucgggggccccuccgacagcaccggguccaaccagaacggcgagcgcagcggggcccgguccaagcagcgccggccccagggccugcccaacaacacggcgagcugguucaccgcccucacccagcacggcaaggaggaccugaaguucccgcgcgggcagggcgugcccaucaacaccaacuccagccccgacgaccagaucggguacuaccggcgcgccacgcggcgcauccggggcggggacggcaagaugaaggaccugagcccccgcugguacuucuacuaccucggcaccgggccggaggccggccugcccuacggggccaacaaggacggcaucaucugggucgcgaccgagggcgcccugaacacccccaaggaccacaucgggacgcggaaccccgccaacaacgccgcgaucgugcuccagcugccgcagggcaccacccugcccaagggguucuacgccgagggcagccgcgggggcucccaggccagcucccggagcuccagccgcucccggaacagccuccgcaacuccacccccggcagcagccgggggacgucccccgcccgcauggccggcaacgggggcgacgcggcccuggcccugcuccugcuggaccggcucaaccagcuggagagcaagauguccgggaagggccagcagcagcagggccagaccgugaccaagaaguccgccgccgaggcguccaagaagccgcgccagaagcgcaccgccacgaaggccuacaacgucacccaggccuucgggcggcgcggccccgagcagacccaggggaacuucggcgaccaggagcugauccggcaggggaccgacuacaaguacuggccccagaucgcccaguucgcgcccagcgccuccgccuucuucggcaugagccgcaucggcauggaggugacgccguccgggaccuggcucaccuacaccggcgccaucaagcuggacgacaaggaccccaacuucaaggaccaggugauccugcucaacaagcacaucgacgccuacaagacguucccgcccaccgagcccaagaaggacaagaagaagaaggcggacgagacccaggcccugccccagcggcagaagaagcagcagaccgucacgcugcuccccgccgccgaccuggacgacuucagcaagcagcugcagcaguccaugagcuccgcggacagcacccaggccugaggacuagucccuguucccagagcccacuuuuuuuucuuuuuuugaaauaaaauagccugucuuucagaucucaaaggcucuuuucagagccaccaaaaaaaaaaaaaaaaaaaaaaaaaaaaaaaaaaaaaaaaaaaaaaaaaaaaaaaaaaaaaaaaaaaaaaaaaaaaaaaaaaaaaaaaaaaaaaaaaaaaa

SEQ ID NO: 19360 - RNA, 1532 nt, Artificial Sequence
  SARS-CoV-2__MT520263.1__nucleocapsid protein (N) mRNA gc
aggagagucccgcagucggcguccagcggcucugcuuguucgugugugugucguugcaggccuuauucaagcuuaccaugagcgacaacggcccccagaaccagcgcaacgccccgcggaucaccuucgggggccccuccgacagcaccggguccaaccagaacggcgagcgcagcggggcccgguccaagcagcgccggccccagggccugcccaacaacacggcgagcugguucaccgcccucacccagcacggcaaggaggaccugaaguucccgcgcgggcagggcgugcccaucaacaccaacuccagccccgacgaccagaucggguacuaccggcgcgccacgcggcgcauccggggcggggacggcaagaugaaggaccugagcccccgcugguacuucuacuaccucggcaccgggccggaggccggccugcccuacggggccaacaaggacggcaucaucugggucgcgaccgagggcgcccugaacacccccaaggaccacaucgggacgcggaaccccgccaacaacgccgcgaucgugcuccagcugccgcagggcaccacccugcccaagggguucuacgccgagggcucccgcgggggcucccaggccagcucccggagcuccagccgcucccggaacagcucccgcaacagcacccccggcagcucccgggggacgagccccgcccgcauggccggcaacgggggcgacgcggcccucgcccugcugcuccuggaccggcugaaccaccucgaguccaagaugagcgggaagggccagcagcagcagggccagaccgugaccaagaaguccgccgccgaggcgagcaagaagccgcgccagaagcgcaccgccacgaaggccuacaacgucacccaggccuucgggcggcgcggccccgagcagacccaggggaacuucggcgaccaggagcugauccggcaggggaccgacuacaagcacuggccccagaucgcccaguucgcgcccuccgccagcgccuucuucggcaugucccgcaucggcauggaggugacgccgagcgggaccuggcugaccuacaccggcgccaucaagcucgacgacaaggaccccaacuucaaggaccaggugauccugcugaacaagcacaucgacgccuacaagacguucccgcccaccgagcccaagaaggacaagaagaagaaggcggacgagacccaggcccucccccagcggcagaagaagcagcagaccgucacgcugcugcccgccgccgaccucgacgacuucuccaagcagcugcagcagagcauguccagcgcggacuccacccaggccugaggacuagucccuguucccagagcccacuuuuuuuucuuuuuuugaaauaaaauagccugucuuucagaucucaaaggcucuuuucagagccaccaaaaaaaaaaaaaaaaaaaaaaaaaaaaaaaaaaaaaaaaaaaaaaaaaaaaaaaaaaaaaaaaaaaaaaaaaaaaaaaaaaaaaaaaaaaaaaaaaaaaa

SEQ ID NO: 19361 - RNA, 1532 nt, Artificial Sequence
  SARS-CoV-2__MT520301.1__nucleocapsid protein (N) mRNA gc
aggagagucccgcagucggcguccagcggcucugcuuguucgugugugugucguugcaggccuuauucaagcuuaccaugagcgacaacggcccccagaaccagcgcaacgccccgcggaucaccuucgggggccccuccgacagcaccggguccaaccagaacggcgagcgcagcggggcccgguccaagcagugccgcccccagggccugcccaacaacacggcgagcugguucaccgcccucacccagcacggcaaggaggaccugaaguucccgcgggggcagggcgugcccaucaacaccaacuccagccccgacgaccagaucggguacuaccgccgggccacgcgccggauccgcggcggggacggcaagaugaaggaccugagcccccggugguacuucuacuaccucggcaccgggccggaggccggccugcccuacggggccaacaaggacggcaucaucugggucgcgaccgagggcgcccugaacacccccaaggaccacaucgggacgcgcaaccccgccaacaacgccgcgaucgugcuccagcugccgcagggcaccacccugcccaagggguucuacgccgagggcucccgcgggggcucccaggccagcucccggagcuccagccggucccgcaacagcucccggaacagcacccccggcagcucccgcgggacgagccccgcccggauggccggcaacgggggcgacgcggcccucgcccugcugcuccuggaccgccugaaccagcucgaguccaagaugagcgggaagggccagcagcagcagggccagaccgugaccaagaaguccgccgccgaggcgagcaagaagccgcggcagaagcgcaccgccacgaaggccuacaacgucacccaggccuucgggcgccggggccccgagcagacccaggggaacuucggcgaccaggagcugauccgccaggggaccgacuacaagcacuggccccagaucgcccaguucgcgcccuccgccagcgccuucuucggcaugucccggaucggcauggaggugacgccgagcgggaccuggcugaccuacaccggcgccaucaagcucgacgacaaggaccccaacuucaaggaccaggugauccugcugaacaagcacaucgacgccuacaagacguucccgcccaccgagcccaagaaggacaagaagaagaaggcggacgagacccaggcccucccccagcgccagaagaagcagcagaccgucacgcugcugcccgccgccgaccucgacgacuucuccaagcagcugcagcagagcauguccagcgcggacuccacccaggccugaggacuagucccuguucccagagcccacuuuuuuuucuuuuuuugaaauaaaauagccugucuuucagaucucaaaggcucuuuucagagccaccaaaaaaaaaaaaaaaaaaaaaaaaaaaaaaaaaaaaaaaaaaaaaaaaaaaaaaaaaaaaaaaaaaaaaaaaaaaaaaaaaaaaaaaaaaaaaaaaaaaaa

SEQ ID NO: 19362 - RNA, 1532 nt, Artificial Sequence
  SARS-CoV-2__MT520331.1__nucleocapsid protein (N) mRNA gc
aggagagucccgcagucggcguccagcggcucugcuuguucgugugugugucguugcaggccuuauucaagcuuaccaugagcgacaacggcccccagaaccagcgcaacgccccgcggaucaccuucgggggccccuccgacagcaccggguccaaccagaacggcgagcgcagcggggcccgguccaagcagcgccggccccagggccugcccaacaacacggcgagcugguucaccgcccucacccagcacggcaaggaggaccugaaguucccgcgcgggcagggcgugcccaucaacaccaacuccagccccgacgaccagaucggguacuaccggcgcgccacgcggcgcauccggggcggggacggcaagaugaaggaccugagcccccgcugguacuucuacuaccucggcaccgggccggaggccggccugcccuacggggccaacaaggacggcaucaucugggucgcgaccgagggcgcccugaacacccccaaggaccacaucgggacgcggaaccccgccaacaacgccgcgaucgugcuccagcugccgcagggcaccacccugcccaagggguucuacgccgagggcucccgcgggggcucccaggccagcucccggagcuccagccgcucccggaacagcucccgcaacagcacccccggcagcucccgggggacgagccccgcccgcauggccggcaacgggggcgacgcggcccucgcccugcugcuccuggaccggcugaaccagcucgaguccaagaugagcgggaagggccagcagcagcagggccagaccgugaccaagaaguccgccgccgaggcggccaagaagccgcgccagaagcgcaccgccacgaaggccuacaacgucacccaggccuucgggcggcgcggccccgagcagacccaggggaacuucggcgaccaggagcugauccggcaggggaccgacuacaagcacuggccccagaucgcgcaguucgcccccagcgccuccgccuucuucggcaugagccgcaucggcauggaggugacgccguccgggaccuggcugaccuacaccggcgccaucaagcucgacgacaaggaccccaacuucaaggaccaggugauccugcugaacaagcacaucgacgcguacaagacguucccgcccaccgagcccaagaaggacaagaagaagaaggccgacgagacccaggcccucccccagcggcagaagaagcagcagaccgucacgcugcugcccgccgcggaccucgacgacuucagcaagcagcugcagcaguccaugagcuccgccgacagcacccaggccugaggacuagucccuguucccagagcccacuuuuuuuucuuuuuuugaaauaaaauagccugucuuucagaucucaaaggcucuuuucagagccaccaaaaaaaaaaaaaaaaaaaaaaaaaaaaaaaaaaaaaaaaaaaaaaaaaaaaaaaaaaaaaaaaaaaaaaaaaaaaaaaaaaaaaaaaaaaaaaaaaaaaa

SEQ ID NO: 19363 - RNA, 1532 nt, Artificial Sequence
  SARS-CoV-2__MT520343.1__nucleocapsid protein (N) mRNA gc
aggagagucccgcagucggcguccagcggcucugcuuguucgugugugugucguugcaggccuuauucaagcuuaccaugagcgacaacggcccccagaaccagcgcaacgccccgcggaucaccuucgggggccccuccuacagcaccggguccaaccagaacggcgagcgcagcggggcccgguccaagcagcgccggccccagggccugcccaacaacacggcgagcugguucaccgcccucacccagcacggcaaggaggaccugaaguucccgcgcgggcagggcgugcccaucaacaccaacuccagccccgacgaccagaucggguacuaccggcgcgccacgcggcgcauccggggcggggacggcaagaugaaggaccugagcccccgcugguacuucuacuaccucggcaccgggccggaggccggccugcccuacggggccaacaaggacggcaucaucugggucgcgaccgagggcgcccugaacacccccaaggaccacaucgggacgcggaaccccgccaacaacgccgcgaucgugcuccagcugccgcagggcaccacccugcccaagggguucuacgccgagggcucccgcgggggcucccaggccagcucccggagcuccagccgcucccggaacagcucccgcaacagcacccccggcagcucccgggggacgagccccgcccgcauggccggcaacgggggcgacgcggcccucgcccugcugcuccuggaccggcugaaccagcucgaguccaagaugagcgggaagggccagcagcagcagggccagaccgugaccaagaaguccgccgccgaggcgagcaagaagccgcgccagaagcgcaccgccacgaaggccuacaacgucacccaggccuucgggcggcgcggccccgagcagacccaggggaacuucggcgaccaggagcugauccggcaggggaccgacuacaagcacuggccccagaucgcccaguucgcgcccuccgccagcgccuucuucggcaugucccgcaucggcauggaggugacgccgagcgggaccuggcugaccuacaccggcgccaucaagcucgacgacaaggaccccaacuucaaggaccaggugauccugcugaacaagcacaucgacgccuacaagacguucccgcccaccgagcccaagaaggacaagaagaagaaggcggacgagacccaggcccucccccagcggcagaagaagcagcagaccgucacgcugcugcccgccgccgaccucgacgacuucuccaagcagcugcagcagagcauguccagcgcggacuccacccaggccugaggacuagucccuguucccagagcccacuuuuuuuucuuuuuuugaaauaaaauagccugucuuucagaucucaaaggcucuuuucagagccaccaaaaaaaaaaaaaaaaaaaaaaaaaaaaaaaaaaaaaaaaaaaaaaaaaaaaaaaaaaaaaaaaaaaaaaaaaaaaaaaaaaaaaaaaaaaaaaaaaaaaa

SEQ ID NO: 19364 - RNA, 1532 nt, Artificial Sequence
  SARS-CoV-2__MT520498.1__nucleocapsid protein (N) mRNA gc
aggagagucccgcagucggcguccagcggcucugcuuguucgugugugugucguugcaggccuuauucaagcuuaccaugagcgacaacggcccccagaaccagcgcaacgccccgcggaucaccuucgggggccccuccgacagcaccggguccaaccagaacggcgagcgcagcggggcccgguccaagcagcgccggccccagggccugcccaacaacacggcgagcugguucaccgcccucacccagcacggcaaggaggaccugaaguucccgcgcgggcagggcgugcccaucaacaccaacuccagccccgacgaccagaucggguacuaccggcgcgccacgcggcgcauccggggcggggacggcaagaugaaggaccugagcccccgcugguacuucuacuaccucggcaccgggccggaggccggccugcccuacggggccaacaaggacggcaucaucugggucgcgaccgagggcgcccugaacacccccaaggaccacaucgggacgcggaaccccgccaacaacgccgcgaucgugcuccagcugccgcagggcaccacccugcccaagggguucuacgccgagggcucccgcgggggcucccaggccagcucccggagcuccagccgcucccggaacagcucccgcaacagcacccccggcagcucccgggggacgagccccgcccgcauggccggcaacgggggcgacgcggcccucgcccugcugcuccuggaccggcugaaccagcucgaguccaagaugagcgugaaggggcagcagcagcagggccagaccgucaccaagaaguccgccgccgaggcgagcaagaagccgcgccagaagcgcaccgccacgaaggccuacaacgugacccaggccuucggccggcgcgggcccgagcagacccagggcaacuucggggaccaggagcugauccggcagggcaccgacuacaagcacuggccccagaucgcccaguucgcgcccuccgccagcgccuucuucgggaugucccgcaucggcauggaggugacgccgagcggcaccuggcugaccuacaccggggccaucaagcucgacgacaaggaccccaacuucaaggaccaggucauccugcugaacaagcacaucgacgccuacaagacguucccgcccaccgagcccaagaaggacaagaagaagaaggcggacgagacccaggcccucccccagcggcagaagaagcagcagaccgugacgcugcugcccgccgccgaccucgacgacuucuccaagcagcugcagcagagcauguccagcgcggacuccacccaggccugaggacuagucccuguucccagagcccacuuuuuuuucuuuuuuugaaauaaaauagccugucuuucagaucucaaaggcucuuuucagagccaccaaaaaaaaaaaaaaaaaaaaaaaaaaaaaaaaaaaaaaaaaaaaaaaaaaaaaaaaaaaaaaaaaaaaaaaaaaaaaaaaaaaaaaaaaaaaaaaaaaaaa

SEQ ID NO: 19365 - RNA, 1532 nt, Artificial Sequence
  SARS-CoV-2__MT560706.1__nucleocapsid protein (N) mRNA gc
aggagagucccgcagucggcguccagcggcucugcuuguucgugugugugucguugcaggccuuauucaagcuuaccaugagcgacaacggcacccagaaccagcgcaacgcgccccggaucaccuucgggggcccguccgacagcacgggguccaaccagaacggcgagcgcagcggggcccgguccaagcagcgccggccccagggccugcccaacaacaccgccagcugguucaccgcccucacccagcacggcaaggaggaccugaaguucccccgcgggcagggcgugccgaucaacacgaacuccagccccgacgaccagaucggguacuaccggcgcgccacccggcgcauccggggcggggacggcaagaugaaggaccugagcccccgcugguacuucuacuaccucggcaccgggcccgaggccggccugccguacggggccaacaaggacggcaucaucugggucgcgaccgagggcgcccugaacacgcccaaggaccacaucgggacccggaaccccgccaacaacgccgcgaucgugcuccagcugccccagggcaccacccugccgaagggguucuacgccgagggcucccgcgggggcucccaggccagcucccggagcuccagccgcucccggaacagcucccgcaacagcacgcccggcagcucccgggggaccagccccgcccgcauggccggcaacgggggcgacgcggcccucgcccugcugcuccuggaccggcugaaccagcucgaguccaagaugagcgggaagggccagcagcagcagggccagaccgugaccaagaaguccgccgccgaggcgagcaagaagccccgccagaagcgcacggccaccaaggccuacaacgucacccaggccuucgggcggcgcggcccggagcagacccaggggaacuucggcgaccaggagcugauccggcaggggacggacuacaagcacuggccccagaucgcccaguucgcgcccuccgccagcgccuucuucggcaugucccgcaucggcauggaggugacccccagcgggaccuggcugaccuacacgggcgccaucaagcucgacgacaaggacccgaacuucaaggaccaggugauccugcugaacaagcacaucgacgccuacaagaccuucccgcccaccgagcccaagaaggacaagaagaagaaggcggacgagacccaggcccucccccagcggcagaagaagcagcagacggucacccugcugcccgccgccgaccucgacgacuucuccaagcagcugcagcagagcauguccagcgcggacuccacccaggccugaggacuagucccuguucccagagcccacuuuuuuuucuuuuuuugaaauaaaauagccugucuuucagaucucaaaggcucuuuucagagccaccaaaaaaaaaaaaaaaaaaaaaaaaaaaaaaaaaaaaaaaaaaaaaaaaaaaaaaaaaaaaaaaaaaaaaaaaaaaaaaaaaaaaaaaaaaaaaaaaaaaaa

SEQ ID NO: 19366 - RNA, 1532 nt, Artificial Sequence
  SARS-CoV-2__MT566435.1__nucleocapsid protein (N) mRNA gc
aggagagucccgcagucggcguccagcggcucugcuuguucgugugugugucguugcaggccuuauucaagcuuaccaugagcgacaacggcccccagaaccagcgcaacgccccgcggaucaccuucgggggccccuccgacagcaccggguccaaccagaacggcgagcgcagcggggcccgguccaagcagcgccggccccagggccugcccaacaacacggcgagcugguucaccgcccucacccagcacggcaaggaggaccugaaguucccgcgcgggcagggcgugcccaucaacaccaacuccagccccgacgaccagaucggguacuaccggcgcgccacgcggcgcauccggggcggggacggcaagaugaaggaccugagcccccgcugguacuucuacuaccucggcaccgggccggaggccggccugcccuacggggccaacaaggacggcaucaucugggucgcgaccgagggcgcccugaacacccccaaggaccacaucgggacgcggaaccccgccaacaacgccgcgaucgugcuccagcugccgcagggcaccacccugcccaagggguucuacgccgagggcucccgcgggggcucccaggccagcucccggagcuccagccgcucccggaacagcucccgcaacagcacccccggcagcuccaagcggacgagccccgcccgcauggccgggaacggcggggacgcggcccucgcccugcugcuccuggaccggcugaaccagcucgaguccaagaugagcggcaaggggcagcagcagcagggccagaccgugaccaagaaguccgccgccgaggcgagcaagaagccgcgccagaagcgcaccgccacgaaggccuacaacgucacccaggccuucggccggcgcgggcccgagcagacccagggcaacuucggggaccaggagcugauccggcagggcaccgacuacaagcacuggccccagaucgcccaguucgcgcccuccgccagcgccuucuucgggaugucccgcaucggcauggaggugacgccgagcggcaccuggcugaccuacaccggggccaucaagcucgacgacaaggaccccaacuucaaggaccaggugauccugcugaacaagcacaucgacgccuacaagacguucccgcccaccgagcccaagaaggacaagaagaagaaggcgggcgagacccaggcccucccccagcggcagaagaagcagcagaccgucacgcugcugcccgccgccgaccucgacgacuucuccaagcagcugcagcagagcauguccagcgcggacuccacccaggccugaggacuagucccuguucccagagcccacuuuuuuuucuuuuuuugaaauaaaauagccugucuuucagaucucaaaggcucuuuucagagccaccaaaaaaaaaaaaaaaaaaaaaaaaaaaaaaaaaaaaaaaaaaaaaaaaaaaaaaaaaaaaaaaaaaaaaaaaaaaaaaaaaaaaaaaaaaaaaaaaaaaaa

SEQ ID NO: 19367 - RNA, 1532 nt, Artificial Sequence
  SARS-CoV-2__MT557568.1__nucleocapsid protein (N) mRNA gc
aggagagucccgcagucggcguccagcggcucugcuuguucgugugugugucguugcaggccuuauucaagcuuaccaugagcgacaacggcccccagaaccagcgcaacgccccgcggaucaccuucgggggccccuccgacagcaccggguccaaccagaacggcgagcgcagcggggcccuguccaagcagcggcgcccccagggccuccccaacaacacggcgagcugguucaccgcccugacccagcacggcaaggaggaccugaaguucccgcgggggcagggcgugcccaucaacaccaacuccagccccgacgaccagaucggguacuaccgccgggccacgcgccggauccgcggcggggacggcaagaugaaggaccucagcccccggugguacuucuacuaccugggcaccgggccggaggccggccugcccuacggggccaacaaggacggcaucaucugggucgcgaccgagggcgcccucaacacccccaaggaccacaucgggacgcgcaaccccgccaacaacgccgcgaucgugcugcagcugccgcagggcaccacccuccccaagggguucuacgccgagggcagccgcgggggcucccaggccagcucccggagcuccagccggucccgcaacagcucccggaacagcacccccggcagcaaccgcgggacgucccccgcccggauggccggcaacgggggcgacgcggcccuggcccugcuccugcuggaccgccucaaccagcuggagagcaagauguccgggaagggccagcagcagcagggccagaccgugaccaagaaguccgccgccgaggcguccaagaagccgcggcagaagcgcaccgccacgaaggccuacaacgucacccaggccuucgggcgccggggccccgagcagacccaggggaacuucggcgaccaggagcugauccgccaggggaccgacuacaagcacuggccccagaucgcccaguucgcgcccagcgccuccgccuucuucggcaugagccggaucggcauggaggugacgccguccgggaccuggcucaccuacaccggcgccaucaagcuggacgacaaggaccccaacuucaaggaccaggugauccugcucaacaagcacaucgacgccuacaagacguucccgcccaccgagcccaagaaggacaagaagaagaaggcggacgagacccaggcccugccccagcgccagaagaagcagcagaccgucacgcugcuccccgccgccgaccuggacgacuucagcaagcagcugcagcaguccaugagcuccgcggacagcacccaggccugaggacuagucccuguucccagagcccacuuuuuuuucuuuuuuugaaauaaaauagccugucuuucagaucucaaaggcucuuuucagagccaccaaaaaaaaaaaaaaaaaaaaaaaaaaaaaaaaaaaaaaaaaaaaaaaaaaaaaaaaaaaaaaaaaaaaaaaaaaaaaaaaaaaaaaaaaaaaaaaaaaaaa

SEQ ID NO: 19368 - RNA, 1532 nt, Artificial Sequence
  SARS-CoV-2__MT558660.1__nucleocapsid protein (N) mRNA gc
aggagagucccgcagucggcguccagcggcucugcuuguucgugugugugucguugcaggccuuauucaagcuuaccaugagcgacaacggcccccagaaccagcgcaacgccccgcggaucaccuucgggggccccuccgacagcaccggguccaaccagaacggcgagcgcagcggggcccgguccaagcagcgccggccccagggccugcccaacaacacggcgagcugguucaccgcccucacccagcacggcaaggaggaccugaaguucccgcgcgggcagggcgugcccaucaacaccaacuccagccccgacgaccagaucggguacuaccggcgcgccacgcggcgcauccggggcggggacggcaagaugaaggaccugagcccccgcugguacuucuacuaccucggcaccgggccggaggccggccugcccuacggggccaacaaguacggcaucaucugggucgcgaccgagggcgcccugaacacccccaaggaccacaucgggacgcggaaccccgccaacaacgccgcgaucgugcuccagcugccgcagggcaccacccugcccaagggguucuacgccgagggcucccgcgggggcucccaggccagcucccggagcuccagccgcucccggaacagcucccgcaacagcacccccggcagcucccgggggacgagccccgcccgcauggccggcaacgggggcgacgcggcccucgcccugcugcuccuggaccggcugaaccagcucgaguccaagaugagcgggaagggccagcagcagcagggccagaccgugaccaagaaguccgccgccgaggcgagcaagaagccgcgccagaagcgcaccgccacgaaggccuacaacgucacccaggccuucgggcggcgcggccccgagcagacccaggggaacuucggcgaccaggagcugauccggcaggggaccgacuacaagcacuggccccagaucgcccaguucgcgcccuccgccagcgccuucuucggcaugucccgcaucggcauggaggugacgccgagcgggaccuggcugaccuacaccggcgccaucaagcucgacgacaaggaccccaacuucaaggaccaggugauccugcugaacaagcacaucgacgccuacaagacguucccgcccaccgagcccaagaaggacaagaagaagaaggcggacgagacccaggcccucccccagcggcagaagaagcagcagaccgucacgcugcugcccgccgccgaccucgacgacuucuccaagcagcugcagcagagcauguccagcgcggacuccacccaggccugaggacuagucccuguucccagagcccacuuuuuuuucuuuuuuugaaauaaaauagccugucuuucagaucucaaaggcucuuuucagagccaccaaaaaaaaaaaaaaaaaaaaaaaaaaaaaaaaaaaaaaaaaaaaaaaaaaaaaaaaaaaaaaaaaaaaaaaaaaaaaaaaaaaaaaaaaaaaaaaaaaaaa

SEQ ID NO: 19369 - RNA, 1532 nt, Artificial Sequence
  SARS-CoV-2__MT535490.1__nucleocapsid protein (N) mRNA gc
aggagagucccgcagucggcguccagcggcucugcuuguucgugugugugucguugcaggccuuauucaagcuuaccaugagcgacaacggcccccagaaccagcgcaacgccccgcggaucaccuucgggggccccuccgacagcaccggguccaaccagaacggcgagcgcagcggggcccgguccaagcagcgccggccccagggccugcccaacaacacggcgagcugguucaccgcccucacccagcacggcaaggaggaccugaaguucccgcgcgggcagggcgugcccaucaacaccaacuccagccccgacgaccagaucggguacuaccggcgcgccacgcggcgcauccggggcggggacggcaagaugaaggaccugagcccccgcugguacuucuacuaccucggcaccgggccggaggccggccugcccuacggggccaacaaggacggcaucaucugggucgcgaccgagggcgcccugaacacccccaaggaccacaucgggacgcggaaccccgccaacaacgccgcgaucgugcuccagcugccgcagggcaccacccugcccaagggguucuacgccgagggcucccgcgggggcucccaggccagcucccggagcuccagccgcucccggaacagcucccgcaacagcacccccggcagcucccgggggacgagccccgcccgcauggccgugaacggcggggacgcggcccucgcccugcugcuccuggaccggcugaaccagcucgaguccaagaugagcggcaaggggcagcagcagcagggccagaccgucaccaagaaguccgccgccgaggcgagcaagaagccgcgccagaagcgcaccgccacgaaggccuacaacgugacccaggccuucggccggcgcgggcccgagcagacccagggcaacuucggggaccaggagcugauccggcagggcaccgacuacaagcacuggccccagaucgcccaguucgcgcccuccgccagcgccuucuucgggaugucccgcaucggcauggaggugacgccgagcggcaccuggcugaccuacaccggggccaucaagcucgacgacaaggaccccaacuucaaggaccaggucauccugcugaacaagcacaucgacgccuacaagacguucccgcccaccgagcccaagaaggacaagaagaagaaggcggacgagacccaggcccucccccagcggcagaagaagcagcagaccgugacgcugcugcccgccgccgaccucgacgacuucuccaagcagcugcagcagagcauguccagcgcggacuccacccaggccugaggacuagucccuguucccagagcccacuuuuuuuucuuuuuuugaaauaaaauagccugucuuucagaucucaaaggcucuuuucagagccaccaaaaaaaaaaaaaaaaaaaaaaaaaaaaaaaaaaaaaaaaaaaaaaaaaaaaaaaaaaaaaaaaaaaaaaaaaaaaaaaaaaaaaaaaaaaaaaaaaaaaa

SEQ ID NO: 19370 - RNA, 1532 nt, Artificial Sequence
  SARS-CoV-2__MT535500.1__nucleocapsid protein (N) mRNA gc
aggagagucccgcagucggcguccagcggcucugcuuguucgugugugugucguugcaggccuuauucaagcuuaccaugagcgacaacggcccccagaaccagcgcaacgccccgcggaucaccuucgggggccccuccgacagcaccggguccaaccagaacggcgaccgcagcggggcccgguccaagcagcgccggccccagggccugcccaacaacacggcgagcugguucaccgcccucacccagcacggcaaggaggaccugaaguucccgcgcgggcagggcgugcccaucaacaccaacuccagccccgacgaccagaucggguacuaccggcgcgccacgcggcgcauccggggcggggacggcaagaugaaggaccugagcccccgcugguacuucuacuaccucggcaccgggccggaggccggccugcccuacggggccaacaaggacggcaucaucugggucgcgaccgagggcgcccugaacacccccaaggaccacaucgggacgcggaaccccgccaacaacgccgcgaucgugcuccagcugccgcagggcaccacccugcccaagggguucuacgccgagggcucccgcgggggcucccaggccagcucccggagcuccagccgcucccggaacagcucccgcaacagcacccccggcagcucccgggggacgagccccgcccgcauggccggcaacgggggcgacgcggcccucgcccugcugcuccuggaccggcugaaccagcucgaguccaagaugagcgggaagggccagcagcagcagggccagaccgugaccaagaaguccgccgccgaggcgagcaagaagccgcgccagaagcgcaccgccacgaaggccuacaacgucacccaggccuucgggcggcgcggccccgagcagacccaggggaacuucggcgaccaggagcugauccggcaggggaccgacuacaagcacuggccccagaucgcccaguucgcgcccuccgccagcgccuucuucggcaugucccgcaucggcauggaggugacgccgagcgggaccuggcugaccuacaccggcgccaucaagcucgacgacaaggaccccaacuucaaggaccaggugauccugcugaacaagcacaucgacgccuacaagacguucccgcccaccgagcccaagaaggacaagaagaagaaggcggacgagacccaggcccucccccagcggcagaagaagcagcagaccgucacgcugcugcccgccgccgaccucgacgacuucuccaagcagcugcagcagagcauguccagcgcggacuccacccaggccugaggacuagucccuguucccagagcccacuuuuuuuucuuuuuuugaaauaaaauagccugucuuucagaucucaaaggcucuuuucagagccaccaaaaaaaaaaaaaaaaaaaaaaaaaaaaaaaaaaaaaaaaaaaaaaaaaaaaaaaaaaaaaaaaaaaaaaaaaaaaaaaaaaaaaaaaaaaaaaaaaaaaa

SEQ ID NO: 19371 - RNA, 1532 nt, Artificial Sequence
  SARS-CoV-2__MT536964.1__nucleocapsid protein (N) mRNA gc
aggagagucccgcagucggcguccagcggcucugcuuguucgugugugugucguugcaggccuuauucaagcuuaccaugagcgacaacggcccccagaaccagcgcaacgccccgcggaucaccuucgggggccccuccgacagcaccggguccaaccagaacggcgagcgcagcggggcccgguccaagcagcgccggccccagggccugcccaacaacacggcgagcugguucaccgcccucacccagcacggcaaggaggaccugaaguucccgcgcgggcagggcgugcccaucaacaccaacuccagccccgacgaccagaucggguacuaccggcgcgccacgcggcgcauccggggcggggacggcaagaugaaggaccugagcccccgcugguacuucuacuaccucggcaccgggccggaggccggccugcccuacggggccaacaaggacggcaucaucugggucgcgaccgagggcgcccugaccacgcccaaggaccacaucgggacccggaaccccgccaacaacgccgcgaucgugcuccagcugccgcagggcaccacccugcccaagggguucuacgccgagggcucccgcgggggcucccaggccagcucccggagcuccagccgcucccggaacagcucccgcaacagcacgcccggcagcucccgggggaccagccccgcccgcauggccggcaacgggggcgacgcggcccucgcccugcugcuccuggaccggcugaaccagcucgaguccaagaugagcgggaagggccagcagcagcagggccagaccgugaccaagaaguccgccgccgaggcgagcaagaagccgcgccagaagcgcacggccaccaaggccuacaacgucacccaggccuucgggcggcgcggccccgagcagacccaggggaacuucggcgaccaggagcugauccggcaggggacggacuacaagcacuggccccagaucgcccaguucgcgcccuccgccagcgccuucuucggcaugucccgcaucggcauggaggugaccccgagcgggaccuggcugaccuacacgggcgccaucaagcucgacgacaaggaccccaacuucaaggaccaggugauccugcugaacaagcacaucgacgccuacaagaccuucccgcccaccgagcccaagaaggacaagaagaagaaggcggacgagacccaggcccucccccagcggcagaagaagcagcagacggucacccugcugcccgccgccgaccucgacgacuucuccaagcagcugcagcagagcauguccagcgcggacuccacccaggccugaggacuagucccuguucccagagcccacuuuuuuuucuuuuuuugaaauaaaauagccugucuuucagaucucaaaggcucuuuucagagccaccaaaaaaaaaaaaaaaaaaaaaaaaaaaaaaaaaaaaaaaaaaaaaaaaaaaaaaaaaaaaaaaaaaaaaaaaaaaaaaaaaaaaaaaaaaaaaaaaaaaaa

SEQ ID NO: 19372 - RNA, 1532 nt, Artificial Sequence
  SARS-CoV-2__MT511067.1__nucleocapsid protein (N) mRNA gc
aggagagucccgcagucggcguccagcggcucugcuuguucgugugugugucguugcaggccuuauucaagcuuaccaugagcgacaacggcccccagaaccagcgcaacgccccgcggaucaccuucgggggccccuccgacagcaccggguccaaccagaacggcgagcgcagcggggcccgguccaagcagcgccggccccagggccugcccaacaacacggcgagcugguucaccgcccucacccagcacggcaaggaggaccugaaguucccgcgcgggcagggcgugcccaucaacaccaacuccagccccgacgaccagaucggguacuaccggcgcgccacgcggcgcauccggggcggggacggcaagaugaaggaccugagcccccgcugguacuucuacuaccucggcaccgggccggaggccggccugcccuacggggccaacaaggacggcaucaucugggucgcgaccgagggcgcccugaacacccccaaggaccacaucgggacgcggaaccccgccaacaacgccgcgaucgugcuccagcugccgcagggcaccacccugcccaagggguucuacgccgagggcucccgcgggggcucccaggccagcucccggagcuccagccgcucccggaacagcucccgcaacagcacccccggcagcucccgggggacgagccccgcccgcauggccggcaacgggggcgacgcggcccucgcccugcugcuccuggaccggcugaaccagcucgaguccaagaugagcgggaagggccagcagcagcagggccagaccgugaccaagaaguccgccgccgaggcgagcaagaagccgcgccagaagcgcaccgccacgaaggccuacaacgucacccaggccuucgggcggcgcggccccgagcagacccaggggaacuucggcgaccaggagcugauccggcaggggaccgacuacaagcacuggccccagaucgcccaguucgcgcccuccgccagcgccuucuucggcaugucccgcaucggcauggaggugacgccgagcgggaccuggcugaccuacaccggcgccaucaagcucgacgacaaggaccccaacuucaaggaccaggugauccugcugaacaagcacaucgacgccuacaagacguucccgcccaccgagcccaagaaggacaagaagaagaaggcggacgagacccaggcccucccccagcggcagaagaagcagcagaccgucacgcugcugcccgccgccgaccucgacuacuucuccaagcagcugcagcagagcauguccagcgcggacuccacccaggccugaggacuagucccuguucccagagcccacuuuuuuuucuuuuuuugaaauaaaauagccugucuuucagaucucaaaggcucuuuucagagccaccaaaaaaaaaaaaaaaaaaaaaaaaaaaaaaaaaaaaaaaaaaaaaaaaaaaaaaaaaaaaaaaaaaaaaaaaaaaaaaaaaaaaaaaaaaaaaaaaaaaaa

SEQ ID NO: 19373 - RNA, 1532 nt, Artificial Sequence
  SARS-CoV-2__MT509959.1__nucleocapsid protein (N) mRNA gc
aggagagucccgcagucggcguccagcggcucugcuuguucgugugugugucguugcaggccuuauucaagcuuaccaugagcgacaacggcacccagaaccagcgcaacgcccugcggaucaccuucgggggccccuccgacagcacgggguccaaccagaacggcgagcgcagcggggcccgguccaagcagcgccggccgcagggccuccccaacaacaccgcgagcugguucaccgcccugacccagcacggcaaggaggaccugaaguucccccgcgggcagggcgugcccaucaacacgaacuccagcccggacgaccagaucggguacuaccggcgcgccacccggcgcauccggggcggggacggcaagaugaaggaccucagcccccgcugguacuucuacuaccugggcaccgggcccgaggccggccugcccuacggggccaacaaggacggcaucaucugggucgcgaccgagggcgcccucaacacgccgaaggaccacaucgggacccggaaccccgccaacaacgccgcgaucgugcugcagcugccccagggcaccacccuccccaagggguucuacgccgagggcucccgcgggggcucccaggccagcucccggagcuccagccgcucccggaacagcucccgcaacagcacgccgggcagcucccgggggaccagccccgcccgcauggccggcaacgggggcgacgcggcccuggcccugcuccugcuggaccggcucaaccagcuggaguccaagaugagcgggaagggccagcagcagcagggccagaccgugaccaagaaguccgccgccgaggcgagcaagaagccccgccagaagcgcacggccaccaaggccuacaacgucacccaggccuucgggcggcgcggccccgagcagacccaggggaacuucggcgaccaggagcugauccggcaggggacggacuacaagcacuggccgcagaucgcccaguucgcgcccuccgccagcgccuucuucggcaugucccgcaucggcauggaggugacccccagcgggaccuggcucaccuacacgggcgccaucaagcuggacgacaaggaccccaacuucaaggaccaggugauccugcucaacaagcacaucgacgccuacaagaccuucccgcccaccgagcccaagaaggacaagaagaagaaggcggacgagacccaggcccugccccagcggcagaagaagcagcagacggucacccugcucccggccgccgaccuggacgacuucuccaagcagcugcagcagagcauguccagcgcggacuccacccaggccugaggacuagucccuguucccagagcccacuuuuuuuucuuuuuuugaaauaaaauagccugucuuucagaucucaaaggcucuuuucagagccaccaaaaaaaaaaaaaaaaaaaaaaaaaaaaaaaaaaaaaaaaaaaaaaaaaaaaaaaaaaaaaaaaaaaaaaaaaaaaaaaaaaaaaaaaaaaaaaaaaaaaa

SEQ ID NO: 19374 - RNA, 1532 nt, Artificial Sequence
  SARS-CoV-2__MT509497.1__nucleocapsid protein (N) mRNA gc
aggagagucccgcagucggcguccagcggcucugcuuguucgugugugugucguugcaggccuuauucaagcuuaccaugagcgacaacggcccccagaaccagcgcaacgcccugcggaucaccuucgggggcccguccgacagcaccggguccaaccagaacggcgagcgcagcggggcccgguccaagcagcgccggccccagggccuccccaacaacacggcgagcugguucaccgcccugacccagcacggcaaggaggaccugaaguucccccgcgggcagggcgugccgaucaacaccaacuccagccccgacgaccagaucggguacuaccggcgcgccacgcggcgcauccggggcggggacggcaagaugaaggaccucagcccccgcugguacuucuacuaccugggcaccgggcccgaggccggccugccguacggggccaacaaggacggcaucaucugggucgcgaccgagggcgcccucaacacccccaaggaccacaucgggacgcggaaccccagcaacaacgccgccaucgugcugcagcugccccagggcaccacccucccgaagggguucuacgcggagggcucccgcgggggcagccaggccuccagccgguccagcucccgcagccggaacuccagccgcaacagcacccccggcuccagccgggggacgucccccgcccgcauggccggcaacgggggcgacgccgcgcuggcccugcuccugcuggaccggcucaaccagcuggagagcaagauguccgggaagggccagcagcagcagggccagaccgugaccaagaaguccgccgccgaggccuccaagaagccccgccagaagcgcaccgcgacgaaggccuacaacgucacccaggccuucgggcggcgcggcccggagcagacccaggggaacuucggcgaccaggagcugauccggcaggggaccgacuacaagcacuggccccagaucgcccaguucgcccccagcgcguccgccuucuucggcaugagccgcaucggcauggaggugacgcccuccgggaccuggcucaccuacaccggcgccaucaagcuggacgacaaggacccgaacuucaaggaccaggugauccugcucaacaagcacaucgacgccuacaagacguucccgcccaccgagcccaagaaggacaagaagaagaaggccgacgagacccaggcgcugccccagcggcagaagaagcagcagaccgucacgcugcuccccgccgccgaccuggacgacuucagcaagcagcugcagcaguccaugagcuccgccgacagcacccaggcgugaggacuagucccuguucccagagcccacuuuuuuuucuuuuuuugaaauaaaauagccugucuuucagaucucaaaggcucuuuucagagccaccaaaaaaaaaaaaaaaaaaaaaaaaaaaaaaaaaaaaaaaaaaaaaaaaaaaaaaaaaaaaaaaaaaaaaaaaaaaaaaaaaaaaaaaaaaaaaaaaaaaaa

SEQ ID NO: 19375 - RNA, 1532 nt, Artificial Sequence
  SARS-CoV-2__MT509498.1__nucleocapsid protein (N) mRNA gc
aggagagucccgcagucggcguccagcggcucugcuuguucgugugugugucguugcaggccuuauucaagcuuaccaugagcgacaacggcccccagaaccagcgcaacgccccgcggaucaccuucgggggccccuccgacagcaccggguccaaccagaacggcgagcgcagcggggcccgguccaagcagcgccggccccagggccugcccaacaacacggcgagcugguucaccgcccucacccagcacggcaaggaggaccugaaguucccgcgcgggcagggcgugcccaucaacaccaacuccagccccgacgaccagaucggguacuaccggcgcgccacgcggcgcauccggggcggggacggcaagaugaaggaccugagcccccgcugguacuucuacuaccucggcaccgggccggaggccggccugcccuacggggccaacaaggacggcaucaucugggucgcgaccgagggcgcccugaacacccccaaggaccacaucgggacgcggaaccccgccaacaacgccgcgaucgugcuccagcugccgcagggcaccacccugcccaagggguucuacgccgagggcagccgcgggggcucccaggccagcucccggagcuccagccgcucccggaacagccuccgcaacuccacccccggcagcagccgggggacgucccccgcccgcauggccggcaacgggggcgacgcggcccuggcccugcuccugcuggaccggcucaaccagcuggagagcaagauguccgggaagggccagcagcagcagggccagaccgugaccaagaaguccgccgccgaggcguccaagaagccgcgccagaagcgcaccgccacgaaggccuacaacgucacccaggccuucgggcggcgcggccccgagcagacccaggggaacuucggcgaccaggagcugauccggcaggggaccgacuacaagcacuggccccagaucgcccaguucgcgcccagcgccuccgccuucuucggcaugagccgcaucggcauggaggugacgccguccgggaccuggcucaccuacaccggcgccaucaagcuggacgacaaggaccccaacuucaaguaccaggugauccugcucaacaagcacaucgacgccuacaagacguucccgcccaccgagcccaagaaggacaagaagaagaaggcggacgagacccaggcccugccccagcggcagaagaagcagcagaccgucacgcugcuccccgccgccgaccuggacgacuucagcaagcagcugcagcaguccaugagcuccgcggacagcacccaggccugaggacuagucccuguucccagagcccacuuuuuuuucuuuuuuugaaauaaaauagccugucuuucagaucucaaaggcucuuuucagagccaccaaaaaaaaaaaaaaaaaaaaaaaaaaaaaaaaaaaaaaaaaaaaaaaaaaaaaaaaaaaaaaaaaaaaaaaaaaaaaaaaaaaaaaaaaaaaaaaaaaaaa

SEQ ID NO: 19376 - RNA, 1532 nt, Artificial Sequence
  SARS-CoV-2__MT506566.1__nucleocapsid protein (N) mRNA gc
aggagagucccgcagucggcguccagcggcucugcuuguucgugugugugucguugcaggccuuauucaagcuuaccaugagcgacaacggcccccagaaccagcgcaacgccccgcacaucaccuucgggggccccuccgacagcaccggguccaaccagaacggcgagcggagcggggcccgcuccaagcagcggcgcccccagggccugcccaacaacacggcgagcugguucaccgcccucacccagcacggcaaggaggaccugaaguucccgcgggggcagggcgugcccaucaacaccaacuccagccccgacgaccagaucggguacuaccgccgggccacgcgccggauccgcggcggggacggcaagaugaaggaccugagcccccggugguacuucuacuaccucggcaccgggccggaggccggccugcccuacggggccaacaaggacggcaucaucugggucgcgaccgagggcgcccugaacacccccaaggaccacaucgggacgcgcaaccccgccaacaacgccgcgaucgugcuccagcugccgcagggcaccacccugcccaagggguucuacgccgagggcucccgcgggggcucccaggccagcucccggagcuccagccggucccgcaacagcucccggaacagcacccccggcagcucccgcgggacgagccccgcccggauggccggcaacgggggcgacgcggcccucgcccugcugcuccuggaccgccugaaccagcucgaguccaagaugagcgggaagggccagcagcagcagggccagaccgugaccaagaaguccgccgccgaggcgagcaagaagccgcggcagaagcgcaccgccacgaaggccuacaacgucacccaggccuucgggcgccggggccccgagcagacccaggggaacuucggcgaccaggagcugauccgccaggggaccgacuacaagcacuggccccagaucgcccaguucgcgcccuccgccagcgccuucuucggcaugucccggaucggcauggaggugacgccgagcgggaccuggcugaccuacaccggcgccaucaagcucgacgacaaggaccccaacuucaaggaccaggugauccugcugaacaagcacaucgacgccuacaagacguucccgcccaccgagcccaagaaggacaagaagaagaaggcggacgagacccaggcccucccccagcgccagaagaagcagcagaccgucacgcugcugcccgccgccgaccucgacgacuucuccaagcagcugcagcagagcauguccagcgcggacuccacccaggccugaggacuagucccuguucccagagcccacuuuuuuuucuuuuuuugaaauaaaauagccugucuuucagaucucaaaggcucuuuucagagccaccaaaaaaaaaaaaaaaaaaaaaaaaaaaaaaaaaaaaaaaaaaaaaaaaaaaaaaaaaaaaaaaaaaaaaaaaaaaaaaaaaaaaaaaaaaaaaaaaaaaaa

SEQ ID NO: 19377 - RNA, 1532 nt, Artificial Sequence
  SARS-CoV-2__MT502774.1__nucleocapsid protein (N) mRNA gc
aggagagucccgcagucggcguccagcggcucugcuuguucgugugugugucguugcaggccuuauucaagcuuaccaugagcgacaacggcccccagaaccagcgcaacgccccgcggaucaccuucgggggccccuccgacagcaccggguccaaccagaacggcgagcgcagcggggcccgguccaagcagcgccggccccagggccugcccaacaacacggcgagcugguucaccgcccucacccagcacggcaaggaggaccugaaguucccgcgcgggcagggcgugcccaucaacaccaacuccagccccgacgaccagaucggguacuaccggcgcgccacgcggcgcauccggggcggggacggcaagaugaaggaccugagcccccgcugguacuucuacuaccucggcaccgggccggaggccggccugcccuacggggccaacaaggacggcaucaucugggucgcgaccgagggcgcccugaacacccccaaggaccacaucgggacgcggaaccccgccaacaacgccgcgaucgugcuccagcugccgcagggcaccacccugcccaagggguucuacgccgagggcagccgcgggggcucccaggccagcucccggagcuccagccgcucccggaacagcucccgcaacagcacccccggcagcaaccgggggacgucccccgcccgcauggccggcaacgggggcgacgcggcccucgcccugcugcuccuggaccggcugaaccagcucgagagcaagauguccgggaagggccagcagcagcagggccagaccgugaccaagaaguccgccgccgaggcguccaagaagccgcgccagaagcgcaccgccacgaaggccuacaacgucacccaggccuucgggcggcgcggccccgagcagacccaggggaacuucggcgaccaggagcugauccggcaggggaccgacuacaagcacuggccccagaucgcccaguucgcgcccagcgccuccgccuucuucggcaugagccgcaucggcauggaggugacgccguccgggaccuggcugaccuacaccggcgccaucaagcucgacgacaaggaccccaacuucaaggaccaggugauccugcugaacaagcacaucgacgccuacaagacguucccgcccaccgagcccaagaaggacaagaacaagaaggcggacgagacccaggcccucccccagcggcagaagaagcagcagaccgucacgcugcugcccgccgccgaccucgacgacuucagcaagcagcugcagcaguccaugagcuccgcggacagcacccaggccugaggacuagucccuguucccagagcccacuuuuuuuucuuuuuuugaaauaaaauagccugucuuucagaucucaaaggcucuuuucagagccaccaaaaaaaaaaaaaaaaaaaaaaaaaaaaaaaaaaaaaaaaaaaaaaaaaaaaaaaaaaaaaaaaaaaaaaaaaaaaaaaaaaaaaaaaaaaaaaaaaaaaa

SEQ ID NO: 19378 - RNA, 1532 nt, Artificial Sequence
  SARS-CoV-2__MT496974.1__nucleocapsid protein (N) mRNA gc
aggagagucccgcagucggcguccagcggcucugcuuguucgugugugugucguugcaggccuuauucaagcuuaccaugagcgacaacggcccccagaaccagcgcaacgccccgcggaucaccuucgggggccccuccgacagcaccggguccaaccagaacggcgagcgcagcggggcccgguccaagcagcgccggccccagggccugcccaacaacacggcgagcugguucaccgcccucacccagcacggcaaggaggaccugaaguucccgcgcgggcagggcgugcccaucaacaccaacuccagccccgacgaccagaucggguacuaccggcgcgccacgcggcgcauccggggcggggacggcaagaugaaggaccugagcccccgcugguacuucuacuaccucggcaccgggccggaggccggccugcccuacggggccaacaaggacggcaucaucugggucgcgaccgagggcgcccugaacacccccaaggaccacaucgggacgcggaaccccgccaacaacgccgcgaucgugcuccagcugccgcagggcaccacccugcccaagggguucuacgccgagggcagccgcgggggcucccaggccagcucccggagcuccagccgcucccggaacagccuccgcaacuccacccccggcagcagccgggggacgucccccgcccgcauggccggcaacgggggcgacgcggcccuggcccugcuccugcuggaccggcucaaccagcuggagagcaagauguccgggaagggccagcagcagcagggccagaccgugaccaagaaguccgccgccgaggcguccaagaagccgcgccagaagcgcaccgccacgaaggccuacaacgucacccaggccuucgggcggcgcggccccgagcagacccaggggaacuucggcgaccaggagcugauccggcaggggaccgacuacaagcacuggccccagaucgcccaguucgcgcccagcgccuccgccuucuucggcaugagccgcaucggcauggaggugacgccguccgggaccuggcucaccuacaccggcgccaucaagcuggacgacaaggaccccaacuucaaggaccaggugauccugcucaacaagcacaucgacgccuacaagaucuucccgcccacggagcccaagaaggacaagaagaagaaggcggacgagacccaggcccugccccagcggcagaagaagcagcagaccgucacccugcuccccgccgccgaccuggacgacuucagcaagcagcugcagcaguccaugagcuccgcggacagcacgcaggccugaggacuagucccuguucccagagcccacuuuuuuuucuuuuuuugaaauaaaauagccugucuuucagaucucaaaggcucuuuucagagccaccaaaaaaaaaaaaaaaaaaaaaaaaaaaaaaaaaaaaaaaaaaaaaaaaaaaaaaaaaaaaaaaaaaaaaaaaaaaaaaaaaaaaaaaaaaaaaaaaaaaaa

SEQ ID NO: 19379 - RNA, 1532 nt, Artificial Sequence
  SARS-CoV-2__MT496976.1__nucleocapsid protein (N) mRNA gc
aggagagucccgcagucggcguccagcggcucugcuuguucgugugugugucguugcaggccuuauucaagcuuaccaugagcgacaacggcccccagaaccagcgcaacgccccgcggaucaccuucgggggccccuccgacagcaccggguccaaccagaacggcgagcgcagcggggcccgguccaagcagcgccggccccagggccugcccaacaacacggcgagcugguucaccgcccucacccagcacggcaaggaggaccugaaguucccgcgcgggcagggcgugcccaucaacaccaacuccagccccgacgaccagaucggguacuaccggcgcgccacgcggcgcauccggggcggggacggcaagaugaaggaccugagcccccgcugguacuucuacuaccucggcaccgggccggaggccggccugcccuacggggccaacaaggacggcaucaucugggucgcgaccgagggcgcccugaacacccccaaggaccacaucgggacgcggaaccccgccaacaacgccgcgaucgugcuccagcugccgcagggcaccacccugcccaagggguucuacgccgagggcucccgcgggggcucccaggccagcucccggagcuccagccgcucccucaacagcucccggaacagcacccccggcagcucccgcgggacgagccccgcccggauggccggcaacgggggcgacgcggcccuggcccugcuccugcuggaccgccucaaccagcuggaguccaagaugagcgggaagggccagcagcagcagggccagaccgugaccaagaaguccgccgccgaggcgagcaagaagccgcggcagaagcgcaccgccacgaaggccuacaacgucacccaggccuucgggcgccggggccccgagcagacccaggggaacuucggcgaccaggagcugauccgccaggggaccgacuacaagcacuggccccagaucgcccaguucgcgcccuccgccagcgccuucuucggcaugucccggaucggcauggaggugacgccgagcgggaccuggcucaccuacaccggcgccaucaagcuggacgacaaggaccccaacuucaaggaccaggugauccugcucaacaagcacaucgacgccuacaagacguucccgcccaccgagcccaagaaggacaagaagaagaaggcggacgagacccaggcccugccccagcgccagaagaagcagcagaccgucacgcugcuccccgccgccgaccuggacgacuucuccaagcagcugcagcagagcauguccagcgcggacuccacccaggccugaggacuagucccuguucccagagcccacuuuuuuuucuuuuuuugaaauaaaauagccugucuuucagaucucaaaggcucuuuucagagccaccaaaaaaaaaaaaaaaaaaaaaaaaaaaaaaaaaaaaaaaaaaaaaaaaaaaaaaaaaaaaaaaaaaaaaaaaaaaaaaaaaaaaaaaaaaaaaaaaaaaaa

SEQ ID NO: 19380 - RNA, 1532 nt, Artificial Sequence
  SARS-CoV-2__MT496984.1__nucleocapsid protein (N) mRNA gc
aggagagucccgcagucggcguccagcggcucugcuuguucgugugugugucguugcaggccuuauucaagcuuaccaugagcgacaacggcccccagaaccagcgcaacgccccgcggaucaccuucgggggccccuccgacagcaccggguccaaccagaacggcgagcgcagcggggcccgguccaagcagcgccggccccagggccugcccaacaacacggcgagcugguucaccgcccucacccagcacggcaaggaggaccugaaguucccgcgcgggcagggcgugcccaucaacaccaacuccagccccgacgaccagaucggguacuaccggcgcgccacgcggcgcauccggggcggggacggcaagaugaaggaccugagcccccgcugguacuucuacuaccucggcaccgggccggaggccggccugcccuacggggccaacaaggacggcaucaucugggucgcgaccgagggcgcccugaacacccccaaggaccacaucgggacgcggaaccccgccaacaacgccgcgaucgugcuccagcugccgcagggcaccacccugcccaagggguucuacgccgagggcucccgcgggggcucccaggccagcucccggagcuccagccgcucccggaacagcucccgcaacagcacccccggcagcucccgggggacgagccccgcccgcauggccggcaacgggggcgacgcggcccucgcccugcugcuccuggaccggcugaaccagcucgaguccaagaugagcgggaagggccagcagcagcagggccagaccgugaccaagaaguccgccgccgaggcgagcaagaagccgcgccagaagcgcaccgccacgaaggccuacaacgucacccaggccuucgggcggcgcggccccgagcagacccaggggaacuucggcgaccaggagcugauccggcaggggaccgacuacaagcacuggucccagaucgcccaguucgcgcccagcgccuccgccuucuucggcaugagccgcaucggcauggaggugacgcccuccgggaccuggcugaccuacaccggcgccaucaagcucgacgacaaggacccgaacuucaaggaccaggugauccugcugaacaagcacaucgacgccuacaagacguucccgcccaccgagcccaagaaggacaagaagaagaaggcggacgagacccaggcccucccccagcggcagaagaagcagcagaccgucacgcugcugcccgccgccgaccucgacgacuucagcaagcagcugcagcaguccaugagcuccgcggacagcacccaggccugaggacuagucccuguucccagagcccacuuuuuuuucuuuuuuugaaauaaaauagccugucuuucagaucucaaaggcucuuuucagagccaccaaaaaaaaaaaaaaaaaaaaaaaaaaaaaaaaaaaaaaaaaaaaaaaaaaaaaaaaaaaaaaaaaaaaaaaaaaaaaaaaaaaaaaaaaaaaaaaaaaaaa

SEQ ID NO: 19381 - RNA, 1532 nt, Artificial Sequence
  SARS-CoV-2__MT496986.1__nucleocapsid protein (N) mRNA gc
aggagagucccgcagucggcguccagcggcucugcuuguucgugugugugucguugcaggccuuauucaagcuuaccaugagcgacaacggcccccagaaccagcgcaacgccccgcggaucaccuucgggggccccuccgacagcaccggguccaaccagaacggcgagcgcagcggggcccgguccaagcagcgccggccccagggccugcccaacaacacggcgagcugguucaccgcccucacccagcacggcaaggaggaccugaaguucccgcgcgggcagggcgugcccaucaacaccaacuccagccccgacgaccagaucggguacuaccggcgcgccacgcggcgcauccggggcggggacggcaagaugaaggaccugagcccccgcugguacuucuacuaccucggcaccgggccggaggcccggcugcccuacggcgccaacaaggacgggaucaucugggucgcgaccgagggcgcccugaacacccccaaggaccacaucggcacgcgcaaccccgccaacaacgccgcgaucgugcuccagcugccgcaggggaccacccugcccaagggcuucuacgccgaggggagccggggcgggucccaggccagcucccgcagcuccagccggucccgcaacagccuccggaacuccacccccggcagcagccgcggcacgucccccgcccggauggccgggaacggcggggacgcggcccuggcccugcuccugcuggaccgccucaaccagcuggagagcaagauguccggcaaggggcagcagcagcagggccagaccgugaccaagaaguccgccgccgaggcguccaagaagccgcgccagaagcggaccgccacgaaggccuacaacgucacccaggccuucggccgccgggggcccgagcagacccagggcaacuucggggaccaggagcugauccgccagggcaccgacuacaagcacuggccccagaucgcccaguucgcgcccagcgccuccgccuucuucgggaugagccggaucggcauggaggugacgccguccggcaccuggcucaccuacaccggggccaucaagcuggacgacaaggaccccaacuucaaggaccaggugauccugcucaacaagcacaucgacgccuacaagacguucccgcccaccgagcccaagaaggacaagaagaagaaggcggacgagacccaggcccugccccagcgccagaagaagcagcagaccgucacgcugcuccccgccgccgaccuggacgacuucagcaagcagcugcagcaguccaugagcuccgcggacagcacccaggccugaggacuagucccuguucccagagcccacuuuuuuuucuuuuuuugaaauaaaauagccugucuuucagaucucaaaggcucuuuucagagccaccaaaaaaaaaaaaaaaaaaaaaaaaaaaaaaaaaaaaaaaaaaaaaaaaaaaaaaaaaaaaaaaaaaaaaaaaaaaaaaaaaaaaaaaaaaaaaaaaaaaaa

SEQ ID NO: 19382 - RNA, 1532 nt, Artificial Sequence
  SARS-CoV-2__MT477845.1__nucleocapsid protein (N) mRNA gc
aggagagucccgcagucggcguccagcggcucugcuuguucgugugugugucguugcaggccuuauucaagcuuaccaugagcgacaacggcccccagaaccagcgcaacgccccgcggaucaccuucgggggccccuccgacagcaccggguccaaccagaacggcgagcgcagcggggcccgguccaagcagcgccggccccagggccugcccaacaacacggcgagcugguucaccgcccucacccagcacggcaaggaggaccugaaguucccgcgcgggcagggcgugcccaucaacaccaacuccagccccgacgaccagaucggguacuaccggcgcgccacgcggcgcauccggggcggggacggcaagaugaaggaccugagcccccgcugguacuucuacuaccucggcaccgggccggaggccggccugcccuacggggccaacaaggacggcaucaucugggucgcgaccgagggcgcccugaacacccccaaggaccacaucgggacgcggaaccccgccaacaacgccgcgaucgugcuccagcugccgcagggcaccacccugcccaagggguucuacgccgagggcucccgcgggggcucccaggccagcucccggagcuccagccgcucccucaacagcucccggaacagcacccccggcagcuccaagcgcacgagccccgcccggauggccgggaacggcggggacgcggcccuggcccugcuccugcuggaccgccucaaccagcuggaguccaagaugagcggcaaggggcagcagcagcagggccagaccgugaccaagaaguccgccgccgaggcgagcaagaagccgcggcagaagcgcaccgccacgaaggccuacaacgucacccaggccuucggccgccgggggcccgagcagacccagggcaacuucggggaccaggagcugauccgccagggcaccgacuacaagcacuggccccagaucgcccaguucgcgcccuccgccagcgccuucuucgggaugucccggaucggcauggaggugacgccgagcggcaccuggcucaccuacaccggggccaucaagcuggacgacaaggaccccaacuucaaggaccaggugauccugcucaacaagcacaucgacgccuacaagacguucccgcccaccgagcccaagaaggacaagaagaagaaggcggacgagacccaggcccugccccagcgccagaagaagcagcagaccgucacgcugcuccccgccgccgaccuggacgacuucuccaagcagcugcagcagagcauguccagcgcggacuccacccaggccugaggacuagucccuguucccagagcccacuuuuuuuucuuuuuuugaaauaaaauagccugucuuucagaucucaaaggcucuuuucagagccaccaaaaaaaaaaaaaaaaaaaaaaaaaaaaaaaaaaaaaaaaaaaaaaaaaaaaaaaaaaaaaaaaaaaaaaaaaaaaaaaaaaaaaaaaaaaaaaaaaaaaa

SEQ ID NO: 19383 - RNA, 1532 nt, Artificial Sequence
  SARS-CoV-2__MT472625.1__nucleocapsid protein (N) mRNA gc
aggagagucccgcagucggcguccagcggcucugcuuguucgugugugugucguugcaggccuuauucaagcuuaccaugagcgacaacggcccccagaaccagcgcaacgccccgcggaucaccuucgggggccccuccgacagcaccggguccaaccagaacggcgagcgcagcggggcccgguccaagcagcgccggccccagggccugcccaacaacacggcgagcugguucaccgcccucacccagcacggcaaggaggaccugaaguucccgcgcgggcagggcgugcccaucaacaccaacuccagccccgacgaccagaucggguacuaccggcgcgccacgcggcgcauccggggcggggacggcaagaugaaggaccugagcccccgcugguacuucuacuaccucggcaccgggccggaggccggccugcccuacggggccaacaaggacggcaucaucugggucgcgaccgagggcgcccugaacacccccaaggaccacaucgggacgcggaaccccgccaacaacgccgcgaucgugcuccagcugccgcagggcaccacccugcccaagggguucuacgccgagggcucccgcgggggcucccaggccagcucccggagcuccagccgcucccggaacagcucccgcaacagcacccccggcagcucccgggggacgagccccgcccgcauggccggcaacgggggcgacgcggcccucgcccugcugcuccuggaccggcugaaccagcucgaguccaagaugagcgggaagggccagcagcagcagggccagaccgugaccaagaaguccgccgccgaggcgagcaagaagccgcgccagaagcgcaccgccacgaaggccuacaacgucacccaggccuucgggcggcgcggccccgagcagacccaggggaacuucggcgaccaggagcugauccggcaggggaccgacuacaagcacuggccccagaucgcccaguucgcgcccuccgccagcgccuucuucggcaugucccgcaucggcauggaggugacgccgagcgggaccuggcugaccuacaccggcgccaucaagcucgacgacaaggaccccaacuucaaggaccaggugauccugcugaacaagcacaucgacgccuacaagacguucccgcccaccgagcccaagaaggacaagaagaagaaggcggacgagacccaggcccucccccagcggcagaagaagcagcagaccgucacgcugcugcccgccgccgagcucgacgacuucuccaagcagcugcagcagagcauguccagcgcggacuccacccaggccugaggacuagucccuguucccagagcccacuuuuuuuucuuuuuuugaaauaaaauagccugucuuucagaucucaaaggcucuuuucagagccaccaaaaaaaaaaaaaaaaaaaaaaaaaaaaaaaaaaaaaaaaaaaaaaaaaaaaaaaaaaaaaaaaaaaaaaaaaaaaaaaaaaaaaaaaaaaaaaaaaaaaa

SEQ ID NO: 19384 - RNA, 1532 nt, Artificial Sequence
  SARS-CoV-2__MT358640.1__nucleocapsid protein (N) mRNA gc
aggagagucccgcagucggcguccagcggcucugcuuguucgugugugugucguugcaggccuuauucaagcuuaccaugagcgacaacggcccccagaaccagcgcaacgccccgcggaucaccuucgggggccccuccgacagcaccggguccaaccagaacggcgagcgcagcggggcccgguccaagcagcgccggccccagggccugcccaacaacacggcgagcugguucaccgcccucacccagcacggcaaggaggaccugaaguucccgcgcgggcagggcgugcccaucaacaccaacuccagccccgacgaccagaucggguacuaccggcgcgccacgcggcgcauccggggcggggacggcaagaugaaggaccugagcccccgcugguacuucuacuaccucggcaccgggccggaggccggccugcccuacggggccaacaaggacggcaucaucugggucgcgaccgagggcgcccugaacacccccaaggaccacaucgggacgcggaaccccgccaacaacgccgcgaucgugcuccagcugccgcagggcaccacccugcccaagggguucuacgccgagggcucccgcgggggcucccaggccagcucccggagcuccagccgcucccggaacagcucccgcaacagcacccccggcagcuccaagcggacgagccccgcccgcauggccgggaacggcggggacgcggcccucgcccugcugcuccuggaccggcugaaccaguucgaguccaagaugagcggcaaggggcagcagcagcagggccagaccgugaccaagaaguccgccgccgaggcgagcaagaagccgcgccagaagcgcaccgccacgaaggccuacaacgucacccaggccuucggccggcgcgggcccgagcagacccagggcaacuucggggaccaggagcucauccggcagggcaccgacuacaagcacuggccccagaucgcccaguucgcgcccuccgccagcgccuucuucgggaugucccgcaucggcauggaggugacgccgagcggcaccuggcugaccuacaccggggccaucaagcuggacgacaaggaccccaacuucaaggaccaggugauccuccugaacaagcacaucgacgccuacaagacguucccgcccaccgagcccaagaaggacaagaagaagaaggcggacgagacccaggcccugccccagcggcagaagaagcagcagaccgucacgcuccugcccgccgccgaccuggacgacuucuccaagcagcuccagcagagcauguccagcgcggacuccacccaggccugaggacuagucccuguucccagagcccacuuuuuuuucuuuuuuugaaauaaaauagccugucuuucagaucucaaaggcucuuuucagagccaccaaaaaaaaaaaaaaaaaaaaaaaaaaaaaaaaaaaaaaaaaaaaaaaaaaaaaaaaaaaaaaaaaaaaaaaaaaaaaaaaaaaaaaaaaaaaaaaaaaaaa

SEQ ID NO: 19385 - RNA, 1532 nt, Artificial Sequence
  SARS-CoV-2__MT459857.1__nucleocapsid protein (N) mRNA gc
aggagagucccgcagucggcguccagcggcucugcuuguucgugugugugucguugcaggccuuauucaagcuuaccaugagcgacaacggcccccagaaccagcgcaacgccccgcggaucaccuucgggggccccuccgacagcaccggguccaaccagaacggcgagcgcagcggggcccgguccaagcagcgccggccccagggccugcccaacaacacggcgagcugguucaccgcccucacccagcacggcaaggaggaccugaaguucccgcgcgggcagggcgugcccaucaacaccaacuccagccccgacgaccagaucggguacuaccggcgcgccacgcggcgcauccggggcggggacggcaagaugaaggaccugagcccccgcugguacuucuacuaccucggcaccgggccggaggccggccugcccuacggggccaacaaggacggcaucaucugggucgcgaccgagggcgcccugaacacccccaaggaccacaucgggacgcggaaccccgccaacaacgccgcgaucgugcuccagcugccgcagggcaccacccugcccaagggguucuacgccgagggcucccgcgggggcucccaggccagcucccggagcuccagccgcucccggaacagcucccgcaacagcacccccggcagcuccaagcggaucagccccgcccgcauggccgggaacggcggggacgcggcccucgcccugcugcuccuggaccggcugaaccagcucgaguccaagaugagcggcaaggggcagcagcagcagggccagacggugaccaagaaguccgccgccgaggcgagcaagaagccgcgccagaagcgcaccgccaccaaggccuacaacgucacgcaggccuucggccggcgcgggcccgagcagacccagggcaacuucggggaccaggagcugauccggcagggcaccgacuacaagcacuggccccagaucgcccaguucgcgcccuccgccagcgccuucuucgggaugucccgcaucggcauggaggugaccccgagcggcacguggcugaccuacaccggggccaucaagcucgacgacaaggaccccaacuucaaggaccaggugauccugcugaacaagcacaucgacgccuacaagaccuucccgcccacggagcccaagaaggacaagaagaagaaggcggacgagacccaggcccucccccagcggcagaagaagcagcagaccgucacccugcugcccgccgccgaccucgacgacuucuccaagcagcugcagcagagcauguccagcgcggacuccacgcaggccugaggacuagucccuguucccagagcccacuuuuuuuucuuuuuuugaaauaaaauagccugucuuucagaucucaaaggcucuuuucagagccaccaaaaaaaaaaaaaaaaaaaaaaaaaaaaaaaaaaaaaaaaaaaaaaaaaaaaaaaaaaaaaaaaaaaaaaaaaaaaaaaaaaaaaaaaaaaaaaaaaaaaa

SEQ ID NO: 19386 - RNA, 1532 nt, Artificial Sequence
  SARS-CoV-2__MT459903.1__nucleocapsid protein (N) mRNA gc
aggagagucccgcagucggcguccagcggcucugcuuguucgugugugugucguugcaggccuuauucaagcuuaccaugagcgacaacggcccccagaaccagcgcaacgccccgcggaucaccuucgggggccccuccgacagcaccggguccaaccagaacggcgagcgcagcggggcccgguccaagcagcgccggccccagggccugcccaacaacacggcgagcugguucaccgcccucacccagcacggcaaggaggaccugaaguucccgcgcgggcagggcgugcccaucaacaccaacuccagccccgacgaccagaucggguacuaccggcgcgccacgcggcgcauccggggcggggacggcaagaugaaggaccugagcccccgcugguacuucuacuaccucggcaccgggccggaggccggccugcccuacggggccaacaaggacggcaucaucugggucgcgaccgagggcgcccugaacacccccaaggaccacaucgggacgcggaaccccgccaacaacgccgcgaucgugcuccagcugccgcagggcaccacccugcccaagggguucuacgccgagggcucccgcgggggcucccaggccagcucccggagcuccagccgcucccggaacagcucccgcaacagcacccccggcagcuccaagcggacgagccccgcccgcauggccgggaacggcggggacgcggcccucgcccugcugcuccuggaccggcugaaccagcucgaguccaagaugagcggcaaggggcagcagcagcagggccagaccgugaccaagaaguccgccgccgaggcgagcaagaagccgcgccagaagcgcaccgccacgaaggccuacaacgucacccaggccuucggccggcgcgggcccgagcagacccagggcaacuucggggaccaggagcugauccggcagggcaccgacuacaagcacuggccccagaucgcccaguucgcgcccuccgccagcgccuucuucgggaugucccgcaucggcauggaggugacgccgagcggcaccuggcugaccuacaccggggccaucaagcucgacgacaaggaccccaacuucaaggaccaggugauccugcugaacaagcacaucgacgccuacaagacguuccggcccaccgagcccaagaaggacaagaagaagaaggcggacgagacccaggcccucccgcagcgccagaagaagcagcagaccgucacgcugcugcccgccgccgaccucgacgacuucuccaagcagcugcagcagagcauguccagcgcggacuccacccaggccugaggacuagucccuguucccagagcccacuuuuuuuucuuuuuuugaaauaaaauagccugucuuucagaucucaaaggcucuuuucagagccaccaaaaaaaaaaaaaaaaaaaaaaaaaaaaaaaaaaaaaaaaaaaaaaaaaaaaaaaaaaaaaaaaaaaaaaaaaaaaaaaaaaaaaaaaaaaaaaaaaaaaa

SEQ ID NO: 19387 - RNA, 1532 nt, Artificial Sequence
  SARS-CoV-2__MT459987.1__nucleocapsid protein (N) mRNA gc
aggagagucccgcagucggcguccagcggcucugcuuguucgugugugugucguugcaggccuuauucaagcuuaccaugagcgacaacggcccccagaaccagcgcaacgcccugcggaucaccuucgggggcccguccgacagcaccggguccaaccagaacggcgagcgcagcggggcccgguccaagcagcgccggccccagggccuccccaacaacacggcgagcugguucaccgcccugacccagcacggcaaggaggaccugaaguucccccgcgggcagggcgugccgaucaacaccaacuccagccccgacgaccagaucggguacuaccggcgcgccacgcggcgcauccggggcggggacggcaagaugaaggaccucagcccccgcugguacuucuacuaccugggcaccgggcccgaggccggccugccguacggggccaacaaggacggcaucaucugggucgcgaccgagggcgcccucaacacccccaaggaccacaucgggacgcggaaccccgccaacaacgccgcgaucgugcugcagcugccccagggcaccacccucccgaagggguucuacgccgagggcucccgcgggggcucccaggccagcucccggagcuccagccgcucccggaacagcucccgcaacagcacccccggcagcucccgggggacgagccccgcccgcauggccggcaacgggggcgacgcggcccuggcccugcuccugcuggaccggcucaaccagcuggaguccaagaugagcgggaagggccagcagcagcagggccagaccgugaccaagaaguccgccgccgaggcgagcaagaagccccgccagaagcgcaccgccacgaaggccuacaacgucacccaggccuucgggcggcgcggcccggagcagacccaggggaacuucggcgaccaggagcugauccggcaggggaccuacuacaagcacuggccccagaucgcccaguucgcgcccuccgccagcgccuucuucggcaugucccgcaucggcauggaggugacgcccagcgggaccuggcucaccuacaccggcgccaucaagcuggacgacaaggacccgaacuucaaggaccaggugauccugcucaacaagcacaucgacgccuacaagacguucccgcccaccgagcccaagaaggacaagaagaagaaggcggacgagacccaggcccugccccagcggcagaagaagcagcagaccgucacgcugcuccccgccgccgaccuggacgacuucuccaagcagcugcagcagagcauguccagcgcggacuccacccaggccugaggacuagucccuguucccagagcccacuuuuuuuucuuuuuuugaaauaaaauagccugucuuucagaucucaaaggcucuuuucagagccaccaaaaaaaaaaaaaaaaaaaaaaaaaaaaaaaaaaaaaaaaaaaaaaaaaaaaaaaaaaaaaaaaaaaaaaaaaaaaaaaaaaaaaaaaaaaaaaaaaaaaa

SEQ ID NO: 19388 - RNA, 1532 nt, Artificial Sequence
  SARS-CoV-2__MT461610.1__nucleocapsid protein (N) mRNA gc
aggagagucccgcagucggcguccagcggcucugcuuguucgugugugugucguugcaggccuuauucaagcuuaccaugagcgacaacggcccccagaaccagcgcaacgccccgcggaucaccuucgggggccccuccgacagcaccggguccaaccagaacggcgagcgcagcggggcccgguccaagcagcgccggccccagggccugcccaacaacacggcgagcugguucaccgcccucacccagcacggcaaggaggaccugaaguucccgcgcgggcagggcgugcccaucaacaccaacuccagccccuacgaccagaucggguacuaccggcgcgccacgcggcgcauccggggcggggacggcaagaugaaggaccugagcccccgcugguacuucuacuaccucggcaccgggccggaggccggccugcccuacggggccaacaaggacggcaucaucugggucgcgaccgagggcgcccugaacacccccaaggaccacaucgggacgcggaaccccgccaacaacgccgcgaucgugcuccagcugccgcagggcaccacccugcccaagggguucuacgccgagggcucccgcgggggcucccaggccagcucccggagcuccagccgcucccggaacagcucccgcaacagcacccccggcagcucccgggggacgagccccgcccgcauggccggcaacgggggcgacgcggcccucgcccugcugcuccuggaccggcugaaccagcucgaguccaagaugagcgggaagggccagcagcagcagggccagaccgugaccaagaaguccgccgccgaggcgagcaagaagccgcgccagaagcgcaccgccacgaaggccuacaacgucacccaggccuucgggcggcgcggccccgagcagacccaggggaacuucggcgaccaggagcugauccggcaggggaccgacuacaagcacuggccccagaucgcccaguucgcgcccuccgccagcgccuucuucggcaugucccgcaucggcauggaggugacgccgagcgggaccuggcugaccuacaccggcgccaucaagcucgacgacaaggaccccaacuucaaggaccaggugauccugcugaacaagcacaucgacgccuacaagacguucccgcccaccgagcccaagaaggacaagaagaagaaggcggacgagacccaggcccucccccagcggcagaagaagcagcagaccgucacgcugcugcccgccgccgaccucgacgacuucuccaagcagcugcagcagagcauguccagcgcggacuccacccaggccugaggacuagucccuguucccagagcccacuuuuuuuucuuuuuuugaaauaaaauagccugucuuucagaucucaaaggcucuuuucagagccaccaaaaaaaaaaaaaaaaaaaaaaaaaaaaaaaaaaaaaaaaaaaaaaaaaaaaaaaaaaaaaaaaaaaaaaaaaaaaaaaaaaaaaaaaaaaaaaaaaaaaa

SEQ ID NO: 19389 - RNA, 1532 nt, Artificial Sequence
  SARS-CoV-2__MT461663.1__nucleocapsid protein (N) mRNA gc
aggagagucccgcagucggcguccagcggcucugcuuguucgugugugugucguugcaggccuuauucaagcuuaccaugagcgacaacggcccccagaaccagcgcaacgccccgcggaucaccuucgggggccccuccgacagcaccggguccaaccagaacggcgagcgcagcggggcccgguccaagcagcgccggccccagggccugcccaacaacacggcgagcugguucaccgcccucacccagcacggcaaggaggaccugaaguucccgcgcgggcagggcgugcccaucaacaccaacuccagccccgacgaccagaucggguacuaccggcgcgccacgcggcgcauccggggcggggacggcaagaugaaggaccugagcccccgcugguacuucuacuaccucggcaccgggccggaggccggccugcccuacggggccaacaaggacggcaucaucugggucgcgaccgagggcgcccugaacacccccaaggaccacaucgggacgcggaaccccgccaacaacgccgcgaucgugcuccagcugccgcagggcaccacccugcccaagggguucuacgccgagggcagccgcgggggcucccaggccagcucccggagcuccagccgcucccggaacaucagccgcaacuccacccccggcagcagcaagcggacgucccccgcccgcauggccgggaacggcggggacgcggcccucgcccugcugcuccuggaccggcugaaccagcucgagagcaagauguccggcaaggggcagcagcagcagggccagaccgugaccaagaaguccgccgccgaggcguccaagaagccgcgccagaagcgcaccgccacgaaggccuacaacgucacccaggccuucggccggcgcgggcccgagcagacccagggcaacuucggggaccaggagcugauccggcagggcaccgacuacaagcacuggccccagaucgcccaguucgcgcccagcgccuccgccuucuucgggaugagccgcaucggcauggaggugacgccguccggcaccuggcugaccuacaccggggccaucaagcucgacgacaaggaccccaacuucaaggaccaggugauccugcugaacaagcacaucgacgccuacaagacguucccgcccaccgagcccaagaaggacaagaagaagaaggcggacgagacccaggcccucccccagcggcagaagaagcagcagaccgucacgcugcugcccgccgccgaccucgacgacuucagcaagcagcugcagcaguccaugagcuccgcggacagcacccaggccugaggacuagucccuguucccagagcccacuuuuuuuucuuuuuuugaaauaaaauagccugucuuucagaucucaaaggcucuuuucagagccaccaaaaaaaaaaaaaaaaaaaaaaaaaaaaaaaaaaaaaaaaaaaaaaaaaaaaaaaaaaaaaaaaaaaaaaaaaaaaaaaaaaaaaaaaaaaaaaaaaaaaa

SEQ ID NO: 19390 - RNA, 1532 nt, Artificial Sequence
  SARS-CoV-2__MT450889.1__nucleocapsid protein (N) mRNA gc
aggagagucccgcagucggcguccagcggcucugcuuguucgugugugugucguugcaggccuuauucaagcuuaccaugagcgacaacggcccccagaaccagcgcaacgccccgcggaucaccuucgggggccccuccgacagcaccggguccaaccagaacggcgagcgcagcggggcccgguccaagcagcgccggccccagggccugcccaacaacacggcgagcugguucaccgcccucacccagcacggcaaggaggaccugaaguucccgcgcgggcagggcgugcccaucaacaccaacuccagccccgacgaccagaucggguacuaccggcgcgccacgcggcgcauccggggcggggacggcaagaugaaggaccugagcccccgcugguacuucuacuaccucggcaccgggccggaggccggccugcccuacggggccaacaaggacggcaucaucugggucgcgaccgagggcgcccugaacacccccaaggaccacaucgggacgcggaaccccgccaacaacgccgcgaucgugcuccagcugccgcagggcaccacccugcccaagggguucuacgccgagggcucccgcgggggcucccaggccagcucccggagcuccagccgcucccggaacagcucccgcaacagcacccccggcagcucccgggggacgagccccgcccgcauggccggcaacgggggcgacgcggcccucgcccugcugcuccuggaccggcugaaccagcucgaguccaagaugagcgggaagggccagcagcagcagggccagaccgugaccaagaaguccgccgccgaggcgagcaagaagccgcgccagaagcgcaccgccacgaaggccuacaacgucacccaggccuucgggcggcgcggccccgagcagacccaggggaacuucggcgaccaggagcugauccggcaggggaccgacuacaagcacuggccccagaucgcccaguucgcgcccuccgccagcgccuucuucggcaugucccgcaucggcauggaggugacgccgagcgggaccuggcugaccuacaccggcgccaucaagcucgacgacaaggaccccaacuucaaggaccaggugauccugcugaacaagcacaucgacgccuacaagacguucccgcccaccgagcccaagaaggacaagaagaagaaggcggacgagacccaggcccucccccagcggcacaagaagcagcagaccgucacgcugcugcccgccgccgaccucgacgacuucuccaagcagcugcagcagagcauguccagcgcggacuccacccaggccugaggacuagucccuguucccagagcccacuuuuuuuucuuuuuuugaaauaaaauagccugucuuucagaucucaaaggcucuuuucagagccaccaaaaaaaaaaaaaaaaaaaaaaaaaaaaaaaaaaaaaaaaaaaaaaaaaaaaaaaaaaaaaaaaaaaaaaaaaaaaaaaaaaaaaaaaaaaaaaaaaaaaa

SEQ ID NO: 19391 - RNA, 1532 nt, Artificial Sequence
  SARS-CoV-2__MT451874.1__nucleocapsid protein (N) mRNA gc
aggagagucccgcagucggcguccagcggcucugcuuguucgugugugugucguugcaggccuuauucaagcuuaccaugagcgacaacggcccccagaaccagcgcaacgcccugcggaucaccuucgggggcccguccgacagcaccggguccaaccagaacggcgagcgcagcggggcccgguccaagcagcgccggccccagggccuccccaacaacacggcgagcugguucaccgcccugacccagcacggcaaggaggaccugaaguucccccgcgggcagggcgugccgaucaacaccaacuccagccccgacgaccagaucggguacuaccggcgcgccacgucccggauccgcggcggggacggcaagaugaaggaccucagcccccggugguacuucuacuaccugggcaccgggcccgaggccggccugccguacggggccaacaaggacggcaucaucugggucgcgaccgagggcgcccucaacacccccaaggaccacaucgggacgcgcaaccccgccaacaacgccgcgaucgugcugcagcugccccagggcaccacccucccgaagggguucuacgccgagggcucccgcgggggcagccaggccuccagccgguccagcucccggagccgcaacuccagccggaacagcacccccggcuccagccgcgggacgucccccgcccggauggccggcaacgggggcgacgcggcccuggcccugcuccugcuggaccgccucaaccagcuggagagcaagauguccgggaagggccagcagcagcagggccagaccgugaccaagaaguccgccgccgaggcgagcaagaagccccggcagaagcgcaccgccacgaaggccuacaacgucacccaggccuucgggcgccggggcccggagcagacccaggggaacuucggcgaccaggagcugauccgccaggggaccgacuacaagcacuggccccagaucgcccaguucgcgcccagcgccuccgccuucuucggcaugagccggaucggcauggaggugacgcccuccgggaccuggcucaccuacaccggcgccaucaagcuggacgacaaggacccgaacuucaaggaccaggugauccugcucaacaagcacaucgacgccuacaagacguucccgcccaccgagcccaagaaggacaagaagaagaaggcggacgagacccaggcccugccccagcgccagaagaagcagcagaccgucacgcugcuccccgccgccgaccuggacgacuucagcaagcagcugcagcaguccaugagcuccgcggacagcacccaggccugaggacuagucccuguucccagagcccacuuuuuuuucuuuuuuugaaauaaaauagccugucuuucagaucucaaaggcucuuuucagagccaccaaaaaaaaaaaaaaaaaaaaaaaaaaaaaaaaaaaaaaaaaaaaaaaaaaaaaaaaaaaaaaaaaaaaaaaaaaaaaaaaaaaaaaaaaaaaaaaaaaaaa

SEQ ID NO: 19392 - RNA, 1532 nt, Artificial Sequence
  SARS-CoV-2__MT451887.1__nucleocapsid protein (N) mRNA gc
aggagagucccgcagucggcguccagcggcucugcuuguucgugugugugucguugcaggccuuauucaagcuuaccaugagcgacaacggcccccagaaccagcgcaacgccccgcggaucaccuucgggggccccuccgacagcaccggguccaaccagaacggcgagcgcagcggggcccgguccaagcagcgccggccccagggccugcccaacaacacggcgagcugguucaccgcccucacccagcacggcaaggaggaccugaaguucccgcgcgggcagggcgugcccaucaacaccaacuccagccccgacgaccagaucggguacuaccggcgcgccacgcggcgcauccggggcggggacggcaagaugaaggaccugagcccccgcugguacuucuacuaccucggcaccgggccggaggccggccugcccuacggggccaacaaggacggcaucaucugggucgcgaccgagggcgcccugaacacccccaaggaccacaucgggacgcggaaccccgccaacaacgccgcgaucgugcuccagcugccgcagggcaccacccugcccaagggguucuacgccgagggcucccgcgggggcucccaggccagcucccggagcuccagccgcucccggaacagcucccgcaacagcacccccggcagcucccgggggacgagccccgcccgcauggccggcaacgggggcgacgcggcccucgcccugcugcuccuggaccggcugaaccagcucgaguccaagaugagcugcaaggggcagcagcagcagggccagaccgugaccaagaaguccgccgccgaggcgagcaagaagccgcgccagaagcgcaccgccacgaaggccuacaacgucacccaggccuucggccggcgcgggcccgagcagacccagggcaacuucggggaccaggagcugauccggcagggcaccgacuacaagcacuggccccagaucgcccaguucgcgcccuccgccagcgccuucuucgggaugucccgcaucggcauggaggugacgccgagcggcaccuggcugaccuacaccggggccaucaagcucgacgacaaggaccccaacuucaaggaccaggugauccugcugaacaagcacaucgacgccuacaagacguucccgcccaccgagcccaagaaggacaagaagaagaaggcggacgagacccaggcccucccccagcggcagaagaagcagcagaccgucacgcugcugcccgccgccgaccucgacgacuucuccaagcagcugcagcagagcauguccagcgcggacuccacccaggccugaggacuagucccuguucccagagcccacuuuuuuuucuuuuuuugaaauaaaauagccugucuuucagaucucaaaggcucuuuucagagccaccaaaaaaaaaaaaaaaaaaaaaaaaaaaaaaaaaaaaaaaaaaaaaaaaaaaaaaaaaaaaaaaaaaaaaaaaaaaaaaaaaaaaaaaaaaaaaaaaaaaaa

SEQ ID NO: 19393 - RNA, 1532 nt, Artificial Sequence
  SARS-CoV-2__MT450966.1__nucleocapsid protein (N) mRNA gc
aggagagucccgcagucggcguccagcggcucugcuuguucgugugugugucguugcaggccuuauucaagcuuaccaugagcgacaacggcccccagaaccagcgcaacgccccgcggaucaccuucgggggccccuccgacagcaccggguccaaccagaacggcgagcgcagcggggcccgguccaagcagcgccggccccagggccugcccaacaacacggcgagcugguucaccgcccucacccagcacggcaaggaggaccugaaguucccgcgcgggcagggcgugcccaucaacaccaacuccagccccgacgaccagaucggguacuaccggcgcgccacgcggcgcauccggggcggggacggcaagaugaaggaccugagcccccgcugguacuucuacuaccucggcaccgggccggaggccggccugcccuacggggccaacaaggacggcaucaucugggucgcgaccgagggcgcccugaacacccccaaggaccacaucgggacgcggaaccccgccaacaacgccgcgaucgugcuccagcugccgcagggcaccacccugcccaagggguucuacgccgagggcucccgcgggggcucccaggccagcucccggagcuccagccgcucccggaacagcucccgcaacagcacccccggcagcucccgggggacgagccccgcccgcauggccggcaacgggggcgacgcggcccucgcccugcugcuccuggaccggcugaaccagcucgaguccaagaugagcgggaagggccagcagcagcagggccagaccgugaccaagaaguccgccgccgaggcgagcaagaagccgcgccagaagcgcaccgccacgaaggccuacaacgucauccaggccuucgggcggcgcggccccgagcagacccaggggaacuucggcgaccaggagcugauccggcaggggaccgacuacaagcacuggccccagaucgcccaguucgcgcccuccgccagcgccuucuucggcaugucccgcaucggcauggaggugaccccgagcgggacguggcugaccuacaccggcgccaucaagcucgacgacaaggaccccaacuucaaggaccaggugauccugcugaacaagcacaucgacgccuacaagaccuucccgcccacggagcccaagaaggacaagaagaagaaggcggacgagacccaggcccucccccagcggcagaagaagcagcagaccgucacccugcugcccgccgccgaccucgacgacuucuccaagcagcugcagcagagcauguccagcgcggacuccacgcaggccugaggacuagucccuguucccagagcccacuuuuuuuucuuuuuuugaaauaaaauagccugucuuucagaucucaaaggcucuuuucagagccaccaaaaaaaaaaaaaaaaaaaaaaaaaaaaaaaaaaaaaaaaaaaaaaaaaaaaaaaaaaaaaaaaaaaaaaaaaaaaaaaaaaaaaaaaaaaaaaaaaaaaa

SEQ ID NO: 19394 - RNA, 1532 nt, Artificial Sequence
  SARS-CoV-2__MT451143.1__nucleocapsid protein (N) mRNA gc
aggagagucccgcagucggcguccagcggcucugcuuguucgugugugugucguugcaggccuuauucaagcuuaccaugagcgacaacggcccccagaaccagcgcaacgccccgcggaucaccuucgggggccccuccgacagcaccggguccaaccagaacggcgagcgcagcggggcccgguccaagcagcgccggccccagggccugcccaacaacacggcgagcugguucaccgcccucacccagcaccgcaaggaggaccugaaguucccgcggggccagggggugcccaucaacaccaacuccagccccgacgaccagaucggcuacuaccgccgggccacgcgccggauccgcgggggcgacgggaagaugaaggaccugagcccccggugguacuucuacuaccucggcaccggcccggaggccgggcugcccuacggcgccaacaaggacgggaucaucugggucgcgaccgagggcgcccugaacacccccaaggaccacaucggcacgcgcaaccccgccaacaacgccgcgaucgugcuccagcugccgcaggggaccacccugcccaagggcuucuacgccgaggggucccggggcgggucccaggccagcucccgcagcuccagccggucccgcaacagcucccggaacagcacccccggcagcucccgcggcacgagccccgcccggauggccgggaacggcggggacgcggcccucgcccugcugcuccuggaccgccugaaccagcucgaguccaagaugagcggcaaggggcagcagcagcagggccagaccgugaccaagaaguccgccgccgaggcgagcaagaagccgcgccagaagcggaccgccacgaaggccuacaacgucacccaggccuucggccgccgggggcccgagcagacccagggcaacuucggggaccaggagcugauccgccagggcaccgacuacaagcacuggccccagaucgcccaguucgcgcccuccgccagcgccuucuucgggaugucccggaucggcauggaggugacgccgagcggcaccuggcugaccuacaccggggccaucaagcucgacgacaaggaccccaacuucaaggaccaggugauccugcugaacaagcacaucgacgccuacaagacguucccgcccaccgagcccaagaaggacaagaagaagaaggcggacgagacccaggcccucccccagcgccagaagaagcagcagaccgucacgcugcugcccgccgccgaccucgacgacuucuccaagcagcugcagcagagcauguccagcgcggacuccacccaggccugaggacuagucccuguucccagagcccacuuuuuuuucuuuuuuugaaauaaaauagccugucuuucagaucucaaaggcucuuuucagagccaccaaaaaaaaaaaaaaaaaaaaaaaaaaaaaaaaaaaaaaaaaaaaaaaaaaaaaaaaaaaaaaaaaaaaaaaaaaaaaaaaaaaaaaaaaaaaaaaaaaaaa

SEQ ID NO: 19395 - RNA, 1532 nt, Artificial Sequence
  SARS-CoV-2__MT451189.1__nucleocapsid protein (N) mRNA gc
aggagagucccgcagucggcguccagcggcucugcuuguucgugugugugucguugcaggccuuauucaagcuuaccaugagcgacaacggcccccagaaccagcgcaacgccccgcggaucaccuucgggggccccuccgacagcaccggguccaaccagaacggcgagcgcagcggggcccgguccaagcagcgccggccccagggccugcccaacaacacggcgagcugguucaccgcccucacccagcacggcaaggaggaccugaaguucccgcgcgggcagggcgugcccaucaacaccaacuccagccccgacgaccagaucggguacuaccggcgcgccacgcggcgcauccggggcggggacggcaagaugaaggaccugagcccccgcugguacuucuacuaccucggcaccgggccggaggccggccugcccuacggggccaacaaggacggcaucaucugggucgcgaccgagggcgcccugaacacccccaaggaccacaucgggacgcggaaccccgccaacaacgccgcgaucgugcuccagcugccgcagggcaccacccugcccaagggguucuacgccgagggcucccgcgggggcucccaggccagcucccggagcuccagccgcucccggaacagcucccgcaacagcauccccggcagcuccaagcggaccagccccgcccgcauggccgggaacggcggggacgcggcccucgcccugcugcuccuggaccggcugaaccagcucgaguccaagaugagcggcaaggggcagcagcagcagggccagacggugaccaagaaguccgccgccgaggcgagcaagaagccgcgccagaagcgcaccgccaccaaggccuacaacgucacgcaggccuucggccggcgcgggcccgagcagacccagggcaacuucggggaccaggagcugauccggcagggcaccgacuacaagcacuggccccagaucgcccaguucgcgcccuccgccagcgccuucuucgggaugucccgcaucggcauggaggugaccccgagcggcacguggcugaccuacaccggggccaucaagcucgacgacaaggaccccaacuucaaggaccaggugauccugcugaacaagcacaucgacgccuacaagaccuucccgcccacggagcccaagaaggacaagaagaagaaggcggacgagacccaggcccucccccagcggcagaagaagcagcagaccgucacccugcugcccgccgccgaccucgacgacuucuccaagcagcugcagcagagcauguccagcgcggacuccacgcaggccugaggacuagucccuguucccagagcccacuuuuuuuucuuuuuuugaaauaaaauagccugucuuucagaucucaaaggcucuuuucagagccaccaaaaaaaaaaaaaaaaaaaaaaaaaaaaaaaaaaaaaaaaaaaaaaaaaaaaaaaaaaaaaaaaaaaaaaaaaaaaaaaaaaaaaaaaaaaaaaaaaaaaa

SEQ ID NO: 19396 - RNA, 1532 nt, Artificial Sequence
  SARS-CoV-2__MT451245.1__nucleocapsid protein (N) mRNA gc
aggagagucccgcagucggcguccagcggcucugcuuguucgugugugugucguugcaggccuuauucaagcuuaccaugagcgacaacggcccccagaaccagcgcaacgccccgcggaucaccuucgggggccccuccgacagcaccggguccaaccagaacggcgagcgcagcggggcccgguccaagcagcgccggccccagggccugcccaacaacacggcgagcugguucaccgcccucacccagcacggcaaggaggaccugaaguucccgcgcgggcagggcgugcccaucaacaccaacuccagccccgacgaccagaucggguacuaccggcgcgccacgcggcgcauccggggcggggacggcaagaugaaggaccugagcccccgcugguacuucuacuaccucggcaccgggccggaggccggccugcccuacggggccaacaaggacggcaucaucugggucgcgaccgagggcgcccugaacacccccaaggaccacaucgggacgcggaaccccgccaacaacgccgcgaucgugcuccagcugccgcagggcaccacccugcccaagggguucuacgccgagggcagccgcgggggcggccaggccuccagccgguccagcucccgcagccggaacuccagccgcaacuccacccccgggagcagcaagcggacgucccccgcccgcauggccggcaacgggggcgacgcggcccucgcccugcugcuccuggaccggcugaaccagcucgagagcaagauguccgggaagggccagcagcagcagggccagaccgugaccaagaaguccgccgccgaggcguccaagaagccgcgccagaagcgcaccgccacgaaggccuacaacgucacccaggccuucgggcggcgcggccccgagcagacccaggggaacuucggcgaccaggagcugauccggcaggggaccgacuacaagcacuggccccagaucgcccaguucgcgcccagcgccuccgccuucuucggcaugagccgcaucggcauggaggugacgccguccgggaccuggcugaccuacaccggcgccaucaagcucgacgacaaggaccccaacuucaaggaccaggugauccugcugaacaagcacaucgacgccuacaagacguucccgcccaccgagcccaagaaggacaagaagaagaaggcggacgagacccaggcccucccccagcggcagaagaagcagcagaccgucacgcugcugcccgccgccgaccucgacgacuucagcaagcagcugcagcaguccaugagcuccgcggacagcacccaggccugaggacuagucccuguucccagagcccacuuuuuuuucuuuuuuugaaauaaaauagccugucuuucagaucucaaaggcucuuuucagagccaccaaaaaaaaaaaaaaaaaaaaaaaaaaaaaaaaaaaaaaaaaaaaaaaaaaaaaaaaaaaaaaaaaaaaaaaaaaaaaaaaaaaaaaaaaaaaaaaaaaaaa

SEQ ID NO: 19397 - RNA, 1532 nt, Artificial Sequence
  SARS-CoV-2__MT451258.1__nucleocapsid protein (N) mRNA gc
aggagagucccgcagucggcguccagcggcucugcuuguucgugugugugucguugcaggccuuauucaagcuuaccaugagcgacaacggcccccagaaccagcgcaacgccccgcggaucaccuucgggggccccuccgacagcaccggguccaaccagaacggcgagcgcagcggggcccgguccaagcagcgccggccccagggccugcccaacaacacggcgagcugguucaccgcccucacccagcacggcaaggaggaccugaaguucccgcgcgggcagggcgugcccaucaacaccaacuccagccccgacgaccagaucggguacuaccggcgcgccacgcggcgcauccggggcggggacggcaagaugaaggaccugagcccccgcugguacuucuacuaccucggcaccgggccggaggccggccugcccuacggggccaacaaggacggcaucaucugggucgcgaccgagggcgcccugaacacccccaaggaccacaucgggacgcggaaccccgccaacaacgccgcgaucgugcuccagcugccgaagggcaccacccugcccaagggguucuacgccgagggcagccgcgggggcucccaggccagcucccggagcuccagccgcucccggaacagcucccgcaaccucacccccggcagcagccgggggacgucccccgcccgcauggccggcaacgggggcgacgcggcccuggcccugcuccugcuggaccggcucaaccagcuggagagcaagauguccgggaagggccagcagcagcagggccagaccgugaccaagaaguccgccgccgaggcguccaagaagccgcgccagaagcgcaccgccacgaaggccuacaacgucacccaggccuucgggcggcgcggccccgagcagacccaggggaacuucggcgaccaggagcugauccggcaggggaccgacuacaagcacuggccccagaucgcccaguucgcgcccagcgccuccgccuucuucggcaugagccgcaucggcauggaggugacgccguccgggaccuggcucaccuacaccggcgccaucaagcuggacgacaaggaccccaacuucaaggaccaggugauccugcucaacaagcacaucgacgccuacaagacguucccgcccaccgagcccaagaaggacaagaagaagaaggcggacgagacccaggcccugccccagcggcagaagaagcagcagaccgucacgcugcuccccgccgccgaccuggacgacuucagcaagcagcugcagcaguccaugagcuccgcggacagcacccaggccugaggacuagucccuguucccagagcccacuuuuuuuucuuuuuuugaaauaaaauagccugucuuucagaucucaaaggcucuuuucagagccaccaaaaaaaaaaaaaaaaaaaaaaaaaaaaaaaaaaaaaaaaaaaaaaaaaaaaaaaaaaaaaaaaaaaaaaaaaaaaaaaaaaaaaaaaaaaaaaaaaaaaa

SEQ ID NO: 19398 - RNA, 1532 nt, Artificial Sequence
  SARS-CoV-2__MT451476.1__nucleocapsid protein (N) mRNA gc
aggagagucccgcagucggcguccagcggcucugcuuguucgugugugugucguugcaggccuuauucaagcuuaccaugagcgacaacggcccccagaaccagcgcaacgccccgcggaucaccuucgggggccccuccgacagcaccggguccaaccagaacggcgagcgcagcggggcccgguccaagcagcgccggccccagggccugcccaacaacacggcgagcugguucaccgcccucacccagcacggcaaggaggaccugaaguucccgcgcgggcagggcgugcccaucaacaccaacuccagccccgacgaccagaucggguacuaccggcgcgccacgcggcgcauccggggcggggacggcaagaugaaggaccugagcccccgcugguacuucuacuaccucggcaccgggccggaggccggccugcccuacggggccaacaaggacggcaucaucugggucgcgaccgagggcgcccugaacacccccaaggaccacaucgggacgcggaaccccgccaacaacgccgcgaucgugcuccagcugccgcagggcaccacccugcccaagggguucuacgccgagggcucccgcgggggcucccaggccagcucccggagcuccagccgcucccggaacagcucccgcaacagcacccccggcagcucccgggggacgagccccgcccgcauggccggcaacgggggcgacgcggcccucgcccugcugcuccuggaccggcuguaccagcucgaguccaagaugagcgggaagggccagcagcagcagggccagaccgugaccaagaaguccgccgccgaggcgagcaagaagccgcgccagaagcgcaccgccacgaaggccuacaacgucacccaggccuucgggcggcgcggccccgagcagacccaggggaacuucggcgaccaggagcugauccggcaggggaccgacuacaagcacuggccccagaucgcccaguucgcgcccuccgccagcgccuucuucggcaugucccgcaucggcauggaggugacgccgagcgggaccuggcugaccuacaccggcgccaucaagcucgacgacaaggaccccaacuucaaggaccaggugauccugcugaacaagcacaucgacgccuacaagacguucccgcccaccgagcccaagaaggacaagaagaagaaggcggacgagacccaggcccucccccagcggcagaagaagcagcagaccgucacgcugcugcccgccgccgaccucgacgacuucuccaagcagcugcagcagagcauguccagcgcggacuccacccaggccugaggacuagucccuguucccagagcccacuuuuuuuucuuuuuuugaaauaaaauagccugucuuucagaucucaaaggcucuuuucagagccaccaaaaaaaaaaaaaaaaaaaaaaaaaaaaaaaaaaaaaaaaaaaaaaaaaaaaaaaaaaaaaaaaaaaaaaaaaaaaaaaaaaaaaaaaaaaaaaaaaaaaa

SEQ ID NO: 19399 - RNA, 1532 nt, Artificial Sequence
  SARS-CoV-2__MT444626.1__nucleocapsid protein (N) mRNA gc
aggagagucccgcagucggcguccagcggcucugcuuguucgugugugugucguugcaggccuuauucaagcuuaccaugagcgacaacggcccccagaaccagcgcaacgccccgcggaucaccuucgggggccccuccgacagcaccggguccaaccagaacggcgagcgcagccuggcccgguccaagcagcgccggccccaggggcuccccaacaacacggcgagcugguucaccgcccugacccagcacggcaaggaggaccugaaguucccgcgcggccagggggugcccaucaacaccaacuccagccccgacgaccagaucggcuacuaccggcgcgccacgcggcgcauccgcgggggcgacgggaagaugaaggaccucagcccccggugguacuucuacuaccugggcaccggcccggaggccgggcugcccuacggcgccaacaaggacgggaucaucugggucgcgaccgagggcgcccucaacacccccaaggaccacaucggcacgcggaaccccgccaacaacgccgcgaucgugcugcagcugccgcaggggaccacccuccccaagggcuucuacgccgaggggucccgcggcgggucccaggccagcucccggagcuccagccgcucccggaacagcucccgcaacagcacccccggcagcucccggggcacgagccccgcccgcauggccgggaacggcggggacgcggcccuggcccugcuccugcuggaccggcucaaccagcuggaguccaagaugagcggcaaggggcagcagcagcagggccagaccgugaccaagaaguccgccgccgaggcgagcaagaagccgcgccagaagcgcaccgccacgaaggccuacaacgucacccaggccuucggccggcgcgggcccgagcagacccagggcaacuucggggaccaggagcugauccggcagggcaccgacuacaagcacuggccccagaucgcccaguucgcgcccuccgccagcgccuucuucgggaugucccgcaucggcauggaggugacgccgagcggcaccuggcucaccuacaccggggccaucaagcuggacgacaaggaccccaacuucaaggaccaggugauccugcucaacaagcacaucgacgccuacaagacguucccgcccaccgagcccaagaaggacaagaagaagaaggcggacgagacccaggcccugccccagcggcagaagaagcagcagaccgucacgcugcuccccgccgccgaccuggacgacuucuccaagcagcugcagcagagcauguccagcgcggacuccacccaggccugaggacuagucccuguucccagagcccacuuuuuuuucuuuuuuugaaauaaaauagccugucuuucagaucucaaaggcucuuuucagagccaccaaaaaaaaaaaaaaaaaaaaaaaaaaaaaaaaaaaaaaaaaaaaaaaaaaaaaaaaaaaaaaaaaaaaaaaaaaaaaaaaaaaaaaaaaaaaaaaaaaaaa

SEQ ID NO: 19400 - RNA, 1532 nt, Artificial Sequence
  SARS-CoV-2__MT447172.1__nucleocapsid protein (N) mRNA gc
aggagagucccgcagucggcguccagcggcucugcuuguucgugugugugucguugcaggccuuauucaagcuuaccaugagcgacaacggcccccagaaccagcgcaacgccccgcggaucaccuucgggggccccuccgacagcaccggguccaaccagaacggcgagcgcagcggggcccgguccaagcagcgccggccccagggccugcccaacaacacggcgagcugguucaccgcccucacccagcacggcaaggaggaccugaaguucccgcgcgggcagggcgugcccaucaacaccaacuccagccccgacgaccagaucggguacuaccggcgcgccacgcggcgcauccggggcggggacggcaagaugaaggaccugagcccccgcugguacuucuacuaccucggcaccgggccggaggucggccugcccuacggggccaacaaggacggcaucaucuggguggccaccgagggcgcgcugaacacccccaaggaccacaucgggacgcggaaccccgccaacaacgccgccaucgugcuccagcugccgcagggcaccacccugcccaagggguucuacgcggagggcucccgcgggggcucccaggccagcucccggagcuccagccgcucccggaacagcucccgcaacagcacccccggcagcucccgggggacgagccccgcccgcauggccggcaacgggggcgacgccgcgcucgcccugcugcuccuggaccggcugaaccagcucgaguccaagaugagcgggaagggccagcagcagcagggccagaccgucaccaagaaguccgccgccgaggccagcaagaagccgcgccagaagcgcaccgcgacgaaggccuacaacgugacccaggccuucgggcggcgcggccccgagcagacccaggggaacuucggcgaccaggagcugauccggcaggggaccgacuacaagcacuggccccagaucgcccaguucgcccccuccgcgagcgccuucuucggcaugucccgcaucggcauggaggugacgccgcuggggaccuggcucaccuacaccggcgccaucaagcuggacgacaaggaccccaacuucaaggaccaggucauccugcucaacaagcacaucgacgccuacaagacguucccgcccaccgagcccaagaaggacaagaagaagaaggccgacgagacccaggcgcugccccagcggcagaagaagcagcagaccgugacgcugcuccccgccgccgaccuggacgacuucagcaagcagcugcagcaguccaugagcuccgccgacagcacccaggcgugaggacuagucccuguucccagagcccacuuuuuuuucuuuuuuugaaauaaaauagccugucuuucagaucucaaaggcucuuuucagagccaccaaaaaaaaaaaaaaaaaaaaaaaaaaaaaaaaaaaaaaaaaaaaaaaaaaaaaaaaaaaaaaaaaaaaaaaaaaaaaaaaaaaaaaaaaaaaaaaaaaaaa

SEQ ID NO: 19401 - RNA, 1523 nt, Artificial Sequence
  SARS-CoV-2__MT434815.1__nucleocapsid protein (N) mRNA gc
aggagagucccgcagucggcguccagcggcucugcuuguucgugugugugucguugcaggccuuauucaagcuuaccaugagcgacaacggcccccagaaccagcgcaacgccccgcggaucaccuucgggggccccuccgacagcaccggguccaaccagaacggcgagcgcagcggggcccgguccaagcagcgccggccccagggccugcccaacaacacggcgagcugguucaccgcccucacccagcacggcaaggaggaccugaaguucccgcgcgggcagggcgugcccaucaacaccaacuccagccccgacgaccagaucggguacuaccggcgcgccacgcggcgcauccggggcggggacggcaagaugaaggaccugagcccccgcugguacuucuacuaccucggcaccgggccggaggccggccugcccuacggggccaacaaggacggcaucaucugggucgcgaccgagggcgcccugaacacccccaaggaccacaucgggacgcggaaccccgccaacaacgccgcgaucgugcuccagcugccgcagggcaccacccugcccaagggguucuacgccgagggcucccgcgggggcucccaggccagcucccggagcuccagccgcucccggaacagcucccgcaacagcacccccggcagcucccgggggacgagccccgcccgcauggccggcaacgggggcgacgcggcccucgcccugcugcuccuggaccggcugaaccagcucgaguccaagaugagcgggaagggccagcagcagcagggccagaccgugaccaagaaguccgccgccgaggcgagcaagaagccgcgccagaagcgcaccgccacgaaggccuacaacgucacccaggccuucgggcggcgcggccccgagcagacccaggggaacuucggcgaccaggagcugauccggcaggggaccgacuacaagcacuggccccagaucgcccaguucgcgcccuccgccagcgccuucuucggcaugucccgcaucggcauggaggugacgccgagcgggaccuggcugaccuacaccggcgccaucaagcucgacgacaaggaccccaacuucaaggaccaggugauccugcugaacaagcacaucgacgccuacaagacguucccgcccaccgagcccaagaaggacaagaagaagaaggcggacgagacccaggcccucccccagcggcagaagaagcagacccugcugcccgccgccgaccucgacgacuucuccaagcagcugcagcagagcauguccagcgcggacuccacgcaggccugaggacuagucccuguucccagagcccacuuuuuuuucuuuuuuugaaauaaaauagccugucuuucagaucucaaaggcucuuuucagagccaccaaaaaaaaaaaaaaaaaaaaaaaaaaaaaaaaaaaaaaaaaaaaaaaaaaaaaaaaaaaaaaaaaaaaaaaaaaaaaaaaaaaaaaaaaaaaaaaaaaaaa

SEQ ID NO: 19402 - RNA, 1532 nt, Artificial Sequence
  SARS-CoV-2__MT412280.1__nucleocapsid protein (N) mRNA gc
aggagagucccgcagucggcguccagcggcucugcuuguucgugugugugucguugcaggccuuauucaagcuuaccaugagcgacaacggcccccagaaccagcgcaacgccccgcggaucaccuucgggggccccuccgacagcaccggguccaaccagaacggcgagcgcagcggggcccgguccaagcagcgccggccccagggccugcccaacaacacggcgagcugguucaccgcccucacccagcacggcaaggaggaccugaaguucccgcgcgggcagggcgugcccaucaacaccaacuccagccccgacgaccagaucggguacuaccggcgcgccacgcggcgcauccggggcggggacggcaagaugaaggaccugagcccccgcugguacuucuacuaccucggcaccgggccggaggccggccugcccuacggggccaacaaggacggcaucaucugggucgcgaccgagggcgcccugaacacccccaaggaccacaucgggacgcggaaccccgccaacaacgccgcgaucgugcuccagcugccgcagggcaccacccugcccaagggguucuacgccgagggcucccgcgggggcucccaggccagcucccggagcuccagccgcucccggaacagcucccgcaacagcacccccggcagcucccgggggacgagccccgcccgcauggccggcaacgggggcgacgcggcccucgcccugcugcuccuggaccggcugaaccagcucgaguccaagaugagcgggaagggccagcagcagcagggccagaccgugaccaagaaguccgccgccgaggcgagcaagaagccgcgccagaagcgcaccgccacgaaggccuacaacgucacccaggccuucgggcggcgcggccccgagcagacccaggggaacuucggcgaccaggagcugauccggcuggggaccgacuacaagcacuggccccagaucgcccaguucgcgcccuccgccagcgccuucuucggcaugucccgcaucggcauggaggugacgccgagcgggaccuggcucaccuacaccggcgccaucaagcuggacgacaaggaccccaacuucaaggaccaggugauccugcucaacaagcacaucgacgccuacaagacguucccgcccaccgagcccaagaaggacaagaagaagaaggcggacgagacccaggcccugccccagcggcagaagaagcagcagaccgucacgcugcuccccgccgccgaccuggacgacuucuccaagcagcugcagcagagcauguccagcgcggacuccacccaggccugaggacuagucccuguucccagagcccacuuuuuuuucuuuuuuugaaauaaaauagccugucuuucagaucucaaaggcucuuuucagagccaccaaaaaaaaaaaaaaaaaaaaaaaaaaaaaaaaaaaaaaaaaaaaaaaaaaaaaaaaaaaaaaaaaaaaaaaaaaaaaaaaaaaaaaaaaaaaaaaaaaaaa

SEQ ID NO: 19403 - RNA, 1532 nt, Artificial Sequence
  SARS-CoV-2__MT412284.1__nucleocapsid protein (N) mRNA gc
aggagagucccgcagucggcguccagcggcucugcuuguucgugugugugucguugcaggccuuauucaagcuuaccaugagcgacaacggcccccagaaccagcgcaacgccccgcggaucaccuucgggggccccuccgacagcaccggguccaaccagaacggcgagcgcagcggggcccgguccaagcagcgccggccccagggccugcccaacaacacggcgagcugguucaccgcccucacccagcacggcaaggaggaccugaaguucccgcgcgggcagggcgugcccaucaacaccaacuccagccccgacgaccagaucggguacuaccggcgcgccacgcggcgcauccggggcggggacggcaagaugaaggaccugagcccccgcugguacuucuacuaccucggcaccgggccggaggccggccugcccuacggggccaacaaggacggcaucaucugggucgcgaccgagggcgcccugaacacccccaaggaccacaucgggacgcggaaccccgccaacaacgccgcgaucgugcuccagcugccgcagggcaccacccugcccaagggguucuacgccgagggcucccgcgggggcucccaggccagcucccggagcuccagccgcucccggaacagcucccgcaacagcacccccggcagcucccgggggacgagccccgcccgcauggccggcaacgggggcgacgcggcccucgcccugcugcuccuggaccggcugaaccagcucgaguccaagaugagcgggaagggccagcagcagcagggccagaccgugaccaagaaguccgccgccgaggcgagcaagaagccgcgccagaagcgcaccgccacgaaggccuacaacgucacccaggccuucgggcggcgcggccccgagcagacccaggggaacuucggcgaccaggagcugauccggcaggggaccgacuacaagcacuggccccagaucgcccaguucgcgcuguccgccagcgccuucuucggcaugucccgcaucggcauggaggugacgcccagcgggaccuggcucaccuacaccggcgccaucaagcuggacgacaaggacccgaacuucaaggaccaggugauccugcucaacaagcacaucgacgccuacaagacguucccgcccaccgagcccaagaaggacaagaagaagaaggcggacgagacccaggcccugccccagcggcagaagaagcagcagaccgucacgcugcuccccgccgccgaccuggacgacuucuccaagcagcugcagcagagcauguccagcgcggacuccacccaggccugaggacuagucccuguucccagagcccacuuuuuuuucuuuuuuugaaauaaaauagccugucuuucagaucucaaaggcucuuuucagagccaccaaaaaaaaaaaaaaaaaaaaaaaaaaaaaaaaaaaaaaaaaaaaaaaaaaaaaaaaaaaaaaaaaaaaaaaaaaaaaaaaaaaaaaaaaaaaaaaaaaaaa

SEQ ID NO: 19404 - RNA, 1532 nt, Artificial Sequence
  SARS-CoV-2__MT412294.1__nucleocapsid protein (N) mRNA gc
aggagagucccgcagucggcguccagcggcucugcuuguucgugugugugucguugcaggccuuauucaagcuuaccaugagcgacaacggcccccagaaccagcgcaacgccccgcggaucaccuucgggggccccuccgacagcaccggguccaaccagaacggcgagcgcagcggggcccgguccaagcagcgccggccccagggccugcccaacaacacggcgagcugguucaccgcccucacccagcacggcaaggaggaccugaaguucccgcgcgggcagggcgugcccaucaacaccaacuccagccccgacgaccagaucggguacuaccggcgcgccacgcggcgcauccggggcggggacggcaagaugaaggaccugagcccccgcugguacuucuacuaccucggcaccgggccggaggccggccugcccuacggggccaacaaggacggcaucaucugggucgcgaccgagggcgcccugaacacccccaaggaccacaucgggacgcggaaccccgccaacaacgccgcgaucgugcuccagcugccgcagggcaccacccugcccaagggguucuacgccgagggcucccgcgggggcucccaggccagcucccggagcuccagccgcucccggaacagcucccgcaacagcacccccggcagcucccgggggacgagccccgccaccauggccggcaacgggggcgacgcggcccucgcccugcugcuccuggaccgccugaaccagcucgaguccaagaugagcgggaagugccagcagcagcagggccagaccgugaccaagaaguccgccgccgaggcgagcaagaagccgcggcagaagcgcacggccaccaaggccuacaacgucacccaggccuucggccgccgggggcccgagcagacccagggcaacuucggggaccaggagcugauccgccagggcacggacuacaagcacuggccccagaucgcccaguucgcgcccuccgccagcgccuucuucgggaugucccggaucggcauggaggugaccccgagcggcaccuggcugaccuacacgggggccaucaagcucgacgacaaggaccccaacuucaaggaccaggugauccugcugaacaagcacaucgacgccuacaagaccuucccgcccaccgagcccaagaaggacaagaagaagaaggcggacgagacccaggcccucccccagcgccagaagaagcagcagacggucacccugcugcccgccgccgaccucgacgacuucuccaagcagcugcagcagagcauguccagcgcggacuccacccaggccugaggacuagucccuguucccagagcccacuuuuuuuucuuuuuuugaaauaaaauagccugucuuucagaucucaaaggcucuuuucagagccaccaaaaaaaaaaaaaaaaaaaaaaaaaaaaaaaaaaaaaaaaaaaaaaaaaaaaaaaaaaaaaaaaaaaaaaaaaaaaaaaaaaaaaaaaaaaaaaaaaaaaa

SEQ ID NO: 19405 - RNA, 1532 nt, Artificial Sequence
  SARS-CoV-2__MT415320.1__nucleocapsid protein (N) mRNA gc
aggagagucccgcagucggcguccagcggcucugcuuguucgugugugugucguugcaggccuuauucaagcuuaccaugagcgacaacggcccccagaaccagcgcaacgccccgcggaucaccuucgggggccccuccgacagcaccggguccaaccagaacggcgagcgcagcggggcccgguccaagcagcgccggccccagggccugcccaacaacacggcgagcugguucaccgcccucacccagcacggcaaggaggaccugaaguucccgcgcgggcagggcgugcccaucaacaccaacuccagccccgacgaccagaucggguacuaccggcgcgccacgcggcgcauccggggcggggacggcaagaugaaggaccugagcccccgcugguacuucuacuaccucggcaccgggccggaggccggccugcccuacggggccaacaaggacggcaucaucugggucgcgaccgagggcgcccugaacacccccaaggaccacaucgggacgcggaaccccgccaacaacgccgcgaucgugcuccagcugccgcagggcaccacccugcccaagggguucuacgccgagggcucccgcgggggcucccaggccagcucccggagcuccagccgcucccggaacagcucccgcaacagcacccccggcagcucccgggggacgagccccgcccgcauggccggcaacgggggcgacgcggcccucgcccugcugcuccuggaccggcugaaccagcucgaguccaagaugagcgggaagggccagcagcagcagggccagaccgugaccaagaaguccgccgccgaggcgagcaagaagccgcgccagaagcgcaccgccacgaaggccuacaacgucacccaggccuucgggcggcgcggccccgagcagacccaggggaacuucggcgaccaggagcugauccggcaggggaccgacuacaagcacuggccccagaucgcccaguucgcgcccuccgccagcgccuucuucggcaugucccgcaucggcauggaggugacgccgagcgggaccuggcugaccuacaccggcgccaucaagcucgacgacaaggacuccaacuucaaggaccaggugauccugcugaacaagcacaucgacgccuacaagacguucccgcccaccgagcccaagaaggacaagaagaagaaggcggacgagacccaggcccucccccagcggcagaagaagcagcagaccgucacgcugcugcccgccgccgaccucgacgacuucagcaagcagcugcagcaguccaugagcuccgcggacagcacccaggccugaggacuagucccuguucccagagcccacuuuuuuuucuuuuuuugaaauaaaauagccugucuuucagaucucaaaggcucuuuucagagccaccaaaaaaaaaaaaaaaaaaaaaaaaaaaaaaaaaaaaaaaaaaaaaaaaaaaaaaaaaaaaaaaaaaaaaaaaaaaaaaaaaaaaaaaaaaaaaaaaaaaaa

SEQ ID NO: 19406 - RNA, 1532 nt, Artificial Sequence
  SARS-CoV-2__MT385444.1__nucleocapsid protein (N) mRNA gc
aggagagucccgcagucggcguccagcggcucugcuuguucgugugugugucguugcaggccuuauucaagcuuaccaugagcgacaacggcccccagaaccagcgcaacgccccgcggaucaccuucgggggccccuccgacagcaccggguccaaccagaacggcgagcgcagcggggcccgguccaagcagcugcgcccccagggccuccccaacaacacggcgagcugguucaccgcccugacccagcacggcaaggaggaccugaaguucccgcgggggcagggcgugcccaucaacaccaacuccagccccgacgaccagaucggguacuaccgccgggccacgcgccggauccgcggcggggacggcaagaugaaggaccucagcccccggugguacuucuacuaccugggcaccgggccggaggccggccugcccuacggggccaacaaggacggcaucaucugggucgcgaccgagggcgcccucaacacccccaaggaccacaucgggacgcgcaaccccgccaacaacgccgcgaucgugcugcagcugccgcagggcaccacccuccccaagggguucuacgccgagggcucccgcgggggcucccaggccagcucccggagcuccagccggucccgcaacagcucccggaacagcacccccggcagcucccgcgggacgagccccgcccggauggccggcaacgggggcgacgcggcccuggcccugcuccugcuggaccgccucaaccagcuggaguccaagaugagcgggaagggccagcagcagcagggccagaccgugaccaagaaguccgccgccgaggcgagcaagaagccgcggcagaagcgcaccgccacgaaggccuacaacgucacccaggccuucgggcgccggggccccgagcagacccaggggaacuucggcgaccaggagcugauccgccaggggaccgacuacaagcacuggccccagaucgcccaguucgcgcccuccgccagcgccuucuucggcaugucccggaucggcauggaggugacgccgagcgggaccuggcucaccuacaccggcgccaucaagcuggacgacaaggaccccaacuucaaggaccaggugauccugcucaacaagcacaucgacgccuacaagacguucccgcccaccgagcccaagaaggacaagaagaagaaggcggacgagacccaggcccugccccagcgccagaagaagcagcagaccgucacgcugcuccccgccgccgaccuggacgacuucuccaagcagcugcagcagagcauguccagcgcggacuccacccaggccugaggacuagucccuguucccagagcccacuuuuuuuucuuuuuuugaaauaaaauagccugucuuucagaucucaaaggcucuuuucagagccaccaaaaaaaaaaaaaaaaaaaaaaaaaaaaaaaaaaaaaaaaaaaaaaaaaaaaaaaaaaaaaaaaaaaaaaaaaaaaaaaaaaaaaaaaaaaaaaaaaaaaa

SEQ ID NO: 19407 - RNA, 1532 nt, Artificial Sequence
  SARS-CoV-2__MT375432.1__nucleocapsid protein (N) mRNA gc
aggagagucccgcagucggcguccagcggcucugcuuguucgugugugugucguugcaggccuuauucaagcuuaccaugagcgacaacggcccccagaaccagcgcaacgccccgcggaucaccuucgggggccccuccgacagcaccggguccaaccagaacggcgagcgcagcggggcccgguccaagcagcgccggccccagggccugcccaacaacacggcgagcugguucaccgcccucacccagcacggcaaggaggaccugaaguucccgcgcgggcagggcgugcccaucaacaccaacuccagccccgacgaccagaucggguacuaccggcgcuccacgcggcgcauccggggcggggacggcaagaugaaggaccugagcccccgcugguacuucuacuaccucggcaccgggccggaggccggccugcccuacggggccaacaaggacggcaucaucugggucgccaccgagggcgcgcugaacacccccaaggaccacaucgggacgcggaaccccgccaacaacgccgccaucgugcuccagcugccgcagggcaccacccugcccaagggguucuacgcggagggcucccgcgggggcagccaggccuccagccgguccagcucccgcagccggaacuccagccgcaacagcacccccggcuccagccgggggacgucccccgcccgcauggccggcaacgggggcgacgccgcgcucgcccugcugcuccuggaccggcugaaccagcucgagagcaagauguccgggaagggccagcagcagcagggccagaccgugaccaagaaguccgccgccgaggccagcaagaagccgcgccagaagcgcaccgcgacgaaggccuacaacgucacccaggccuucgggcggcgcggccccgagcagacccaggggaacuucggcgaccaggagcugauccggcaggggaccgacuacaagcacuggccccagaucgcccaguucgcccccagcgcguccgccuucuucggcaugagccgcaucggcauggaggugacgccguccgggaccuggcugaccuacaccggcgccaucaagcucgacgacaaggaccccaacuucaaggaccaggugauccugcugaacaagcacaucgacgccuacaagacguucccgcccaccgagcccaagaaggacaagaagaagaaggccgacgagacccaggcgcucccccagcggcagaagaagcagcagaccgucacgcugcugcccgccgccgaccucgacgacuucagcaagcagcugcagcaguccaugagcuccgccgacagcacccaggcgugaggacuagucccuguucccagagcccacuuuuuuuucuuuuuuugaaauaaaauagccugucuuucagaucucaaaggcucuuuucagagccaccaaaaaaaaaaaaaaaaaaaaaaaaaaaaaaaaaaaaaaaaaaaaaaaaaaaaaaaaaaaaaaaaaaaaaaaaaaaaaaaaaaaaaaaaaaaaaaaaaaaaa

SEQ ID NO: 19408 - RNA, 1532 nt, Artificial Sequence
  SARS-CoV-2__MT374106.1__nucleocapsid protein (N) mRNA gc
aggagagucccgcagucggcguccagcggcucugcuuguucgugugugugucguugcaggccuuauucaagcuuaccaugagcgacaacggcccccagaaccagcgcaacgccccgcggaucaccuucgggggccccuccgacagcaccggguccaaccagaacggcgagcgcagcggggcccgguccaagcagcgccggccccagggccugcccaacaacacggcgagcugguucaccgcccucacccagcacggcaaggaggaccugaaguucccgcgcgggcagggcgugcccaucaacaccaacuccagccccgacgaccagaucggguacuaccggcgcgccacgcggcgcauccggggcggggacggcaagaugaaggaccugagcccccgcugguacuucuacuaccucggcaccgggccggaggccggccugcccuacggggccaacaaggacggcaucaucugggucgcgaccgagggcgcccugaacacccccaaggaccacaucgggacgcggaaccccgccaacaacgccgcgaucgugcuccagcugccgcagggcaccacccugcccaagggguucuacgccgagggcagccgcgggggcucccaggccagcucccggagcagcccccgcucccggaacuccagccgcaacuccacccccggcagcagccgggggacguccccggcccgcauggccggcaacgggggcgacgcggcccucgcccugcugcuccuggaccggcugaaccagcucgagagcaagauguccgggaagggccagcagcagcagggccagaccgugaccaagaaguccgccgccgaggcguccaagaagccccgccagaagcgcaccgccacgaaggccuacaacgucacccaggccuucgggcggcgcggccccgagcagacccaggggaacuucggcgaccaggagcugauccggcaggggaccgacuacaagcacuggccccagaucgcccaguucgcgccgagcgccuccgccuucuucggcaugagccgcaucggcauggaggugacgcccuccgggaccuggcugaccuacaccggcgccaucaagcucgacgacaaggaccccaacuucaaggaccaggugauccugcugaacaagcacaucgacgccuacaagacguucccgcccaccgagcccaagaaggacaagaagaagaaggcggacgagacccaggcccucccccagcggcagaagaagcagcagaccgucacgcugcugcccgccgccgaccucgacgacuucagcaagcagcugcagcaguccaugagcuccgcggacagcacccaggccugaggacuagucccuguucccagagcccacuuuuuuuucuuuuuuugaaauaaaauagccugucuuucagaucucaaaggcucuuuucagagccaccaaaaaaaaaaaaaaaaaaaaaaaaaaaaaaaaaaaaaaaaaaaaaaaaaaaaaaaaaaaaaaaaaaaaaaaaaaaaaaaaaaaaaaaaaaaaaaaaaaaaa

SEQ ID NO: 19409 - RNA, 1532 nt, Artificial Sequence
  SARS-CoV-2__MT252737.1__nucleocapsid protein (N) mRNA gc
aggagagucccgcagucggcguccagcggcucugcuuguucgugugugugucguugcaggccuuauucaagcuuaccaugagcgacaacggcccccagaaccagcgcaacgccccgcggaucaccuucgggggccccuccgacagcaccggguccaaccagaacggcgagcgcagcggggcccgguccaagcagcgccggccccagggccugcccaacaacacggcgagcugguucaccgcccucacccagcacggcaaggaggaccugaaguucccgcgcgggcagggcgugcccaucaacaccaacuccagccccgacgaccagaucggguacuaccggcgcgccacgcggcgcauccggggcggggacggcaagaugaaggaccugagcccccgcugguacuucuacuaccucggcaccgggccggaggccggccugcccuacggggccaacaaggacggcaucaucugggucgcgaccgagggcgcccugaacacccccaaggaccacaucgggacgcggaaccccgccaacaacgccgcgaucgugcuccagcugccgcagggcaccacccugcccaagggguucuacgccgagggcucccgcgggggcucccaggccagcucccggagcuccagccgcucccggaacagcucccgcaacagcacccccggcagcucccgggggacgagccccgcccgcauggccggcaacgggggcgacgcggcccucgcccugcugcuccuggaccggcugaaccagcucgaguccaagaugagcgggaagggccagcagcagcagggccagaccgugaccaagaaguccgccgccgaggcgagcaagaagccgcgccagaagcgcaccgccacgaaggccuacaacgucacccaggccuucgggcggcgcggccccgagcagacccaggggaacuucggcgaccaggagcugauccggcaggggaccgacuacaagcacuggccccagaucgcccaguucgcgcccuccgccagcgccuucuucggcaugucccgcaucggcauggaggugacgccgagcgggaccuggcugaccuacaccggcgccaucaagcucgacgacaaggaccccaacuucaaggaccaggugauccugcugaacaagcacaucgacgccuacaagacguucccgcccaccgagcccaagaaggacaagaagaagaaggcggacgagacccaggcccucccccagcggcagaagaagcagcagaucgucacccugcugcccgccgccgaccucgacgacuucuccaagcagcugcagcagagcauguccagcgcggacuccacgcaggccugaggacuagucccuguucccagagcccacuuuuuuuucuuuuuuugaaauaaaauagccugucuuucagaucucaaaggcucuuuucagagccaccaaaaaaaaaaaaaaaaaaaaaaaaaaaaaaaaaaaaaaaaaaaaaaaaaaaaaaaaaaaaaaaaaaaaaaaaaaaaaaaaaaaaaaaaaaaaaaaaaaaaa

SEQ ID NO: 19410 - RNA, 1532 nt, Artificial Sequence
  SARS-CoV-2__MT371047.1__nucleocapsid protein (N) mRNA gc
aggagagucccgcagucggcguccagcggcucugcuuguucgugugugugucguugcaggccuuauucaagcuuaccaugagcgacaacggcccccagaaccagcgcaacgccccgcggaucaccuucgggggccccuccgacagcaccggguccaaccagaacggcgagcgcagcggggcccgguccaagcagcgccggccccagggccugcccaacaacacggcgagcugguucaccgcccucacccagcacggcaaggaggaccugaaguucccgcgcgggcagggcgugcccaucaacaccaacuccagccccgacgaccagaucggguacuaccggcgcgccacgcggcgcauccggggcggggacggcaagaugaaggaccugagcccccgcugguacuucuacuaccucggcaccgggccggaggccggccugcccuacggggccaacaaggacggcaucaucugggucgcgaccgagggcgcccugaacacccccaaggaccacaucgggacgcggaaccccgccaacaacgccgcgaucgugcuccagcugccgcagggcaccacccugcccaagggguucuacgccgagggcucccgcgggggcucccaggccagcucccggagcuccagccgcucccggaacagcucccgcaacagcacccccggcagcucccgggggacgagccccgcccgcauggccggcaacgggggcgacgcggcccucgcccugcugcuccuggaccggcugaaccagcucgaguccaagaugagcgggaagggccagcagcagcagggccagaccgugaccaagaaguccgccgccgaggcgagcaagaagccgcgccagaagcgcaccgccacgaaggccuacaacgucacccaggccuucgggcggcgcggccccgagcagacccaggggaacuucggcgaccaggagcugauccggcaggggaccgacuacaagcacuggccccagaucgcccaguucgcgcccuccgccagcgccuucuucggcaugucccgcaucggcauggaggugacgccgagcgggaccuggcugaccuacaccggcgccaucaagcucgacgacaaggaccccaacuucaaggaccaggugauccugcugaacaagcacaucgacgccuacaagacguucccgcccaccgagcccaagaaggacaagaagaagaaggcggacgagacccaggcccucccccagcggcagaagaagcagcagaccgucacgcugcugcccgccuccgaccucgacgacuucagcaagcagcugcagcaguccaugagcuccgccgacagcacccaggcgugaggacuagucccuguucccagagcccacuuuuuuuucuuuuuuugaaauaaaauagccugucuuucagaucucaaaggcucuuuucagagccaccaaaaaaaaaaaaaaaaaaaaaaaaaaaaaaaaaaaaaaaaaaaaaaaaaaaaaaaaaaaaaaaaaaaaaaaaaaaaaaaaaaaaaaaaaaaaaaaaaaaaa

SEQ ID NO: 19411 - RNA, 1532 nt, Artificial Sequence
  SARS-CoV-2__MT370850.1__nucleocapsid protein (N) mRNA gc
aggagagucccgcagucggcguccagcggcucugcuuguucgugugugugucguugcaggccuuauucaagcuuaccaugagcgacaacggcccccagaaccagcgcaacgccccgcggaucaccuucgggggccccuccgacagcaccggguccaaccagaacggcgagcgcagcggggcccgguccaagcagcgccggccccagggccugcccaacaacacggcgagcugguucaccgcccucacccagcacggcaaggaggaccugaaguucucccgcgggcagggcgugccgaucaacaccaacagcucccccgacgaccagaucggguacuaccggcgcgccacgcggcgcauccggggcggggacggcaagaugaaggaccugagcccccgcugguacuucuacuaccucggcaccgggcccgaggccggccugccguacggggccaacaaggacggcaucaucugggucgcgaccgagggcgcccugaacacccccaaggaccacaucgggacgcggaaccccgccaacaacgccgcgaucgugcuccagcugccccagggcaccacccugccgaagggguucuacgccgagggcucccgcgggggcagccaggccuccagccgguccagcucccgcagccggaacuccagccgcaacagcacccccggcuccagccgggggacgucccccgcccgcauggccggcaacgggggcgacgcggcccucgcccugcugcuccuggaccggcugaaccagcucgagagcaagauguccgggaagggccagcagcagcagggccagaccgugaccaagaaguccgccgccgaggcgagcaagaagccccgccagaagcgcaccgccacgaaggccuacaacgucacccaggccuucgggcggcgcggcccggagcagacccaggggaacuucggcgaccaggagcugauccggcaggggaccgacuacaagcacuggccccagaucgcccaguucgcgcccagcgccuccgccuucuucggcaugagccgcaucggcauggaggugacgcccuccgggaccuggcugaccuacaccggcgccaucaagcucgacgacaaggacccgaacuucaaggaccaggugauccugcugaacaagcacaucgacgccuacaagacguucccgcccaccgagcccaagaaggacaagaagaagaaggcggacgagacccaggcccucccccagcggcagaagaagcagcagaccgucacgcugcugcccgccgccgaccucgacgacuucagcaagcagcugcagcaguccaugagcuccgcggacagcacccaggccugaggacuagucccuguucccagagcccacuuuuuuuucuuuuuuugaaauaaaauagccugucuuucagaucucaaaggcucuuuucagagccaccaaaaaaaaaaaaaaaaaaaaaaaaaaaaaaaaaaaaaaaaaaaaaaaaaaaaaaaaaaaaaaaaaaaaaaaaaaaaaaaaaaaaaaaaaaaaaaaaaaaaa

SEQ ID NO: 19412 - RNA, 1532 nt, Artificial Sequence
  SARS-CoV-2__MT370876.1__nucleocapsid protein (N) mRNA gc
aggagagucccgcagucggcguccagcggcucugcuuguucgugugugugucguugcaggccuuauucaagcuuaccaugagcgacaacggcccccagaaccagcgcaacgccccgcggaucaccuucgggggccccuccgacagcaccggguccaaccagaacggcgagcgcagcggggcccgguccaagcagcgccggccccagggccugcccaacaacacggcgagcugguucaccgcccucacccagcacggcaaggaggaccugaaguucccgcgcgggcagggcgugcccaucaacaccaacuccagccccgacgaccagaucggguacuaccggcgcgccacgcggcgcauccggggcggggacggcaagaugaaggaccugagcccccgcugguacuucuacuaccucggcaccgggccggaggccggccugcccuacggggccaacaaggacggcaucaucugggucgcgaccgagggcgcccugaacacccccaaggaccacaucgggacgcggaaccccgccaacaacgccgcgaucgugcuccagcugccgcagggcaccacccugcccaagggguucuacgccgagggcucccgcgggggcucccaggccagcucccggagcuccagccgcucccggaacagcucccgcaacagcacccccggcagcucccgggggacgagccccgcccgcauggccggcaacgggggcgacgcggcccucgcccugcugcuccuggaccggcugaaccagcucgaguccaagaugagcgggaagggccagcagcagcagggccagaccgugaccaagaaguccgccgccgaggcgagcaagaagccgcgccagaagcgcaccgccacgaaggccuacaacgucacccaggccuucgggcggcgcggccccgagcagacccaggggaacuucggcgaccaggagcugauccggcaggggaccgacuacaagcacuggccccagaucgcccaguucgcgcccuccgccagcgccuucuucggcaugucccgcaucggcauggaggugacgccgagcgggaccuggcugaccuacaucggcgccaucaagcucgacgacaaggaccccaacuucaaggaccaggugauccugcugaacaagcacaucgacgccuacaagaccuucccgcccacggagcccaagaaggacaagaagaagaaggcggacgagacccaggcccucccccagcggcagaagaagcagcagaccgucacccugcugcccgccgccgaccucgacgacuucuccaagcagcugcagcagagcauguccagcgcggacuccacgcaggccugaggacuagucccuguucccagagcccacuuuuuuuucuuuuuuugaaauaaaauagccugucuuucagaucucaaaggcucuuuucagagccaccaaaaaaaaaaaaaaaaaaaaaaaaaaaaaaaaaaaaaaaaaaaaaaaaaaaaaaaaaaaaaaaaaaaaaaaaaaaaaaaaaaaaaaaaaaaaaaaaaaaaa

SEQ ID NO: 19413 - RNA, 1532 nt, Artificial Sequence
  SARS-CoV-2__MT370904.1__nucleocapsid protein (N) mRNA gc
aggagagucccgcagucggcguccagcggcucugcuuguucgugugugugucguugcaggccuuauucaagcuuaccaugagcgacaacggcccccagaaccagcgcaacgccccgcggaucaccuucgggggccccuccgacagcaccggguccaaccagaacggcgagcgcagcggggcccgguccaagcagcgccggccccagggccugcccaacaacacggcgagcugguucaccgcccucacccagcacggcaaggaggaccugaaguucccgcgcgggcagggcgugcccaucaacaccaacuccagccccgacgaccagaucggguacuaccggcgcgccacgcggcgcauccggggcggggacggcaagaugaaggaccugagcccccgcugguacuucuacuaccucggcaccgggccggaggccggccugcccuacggggccaacaaggacggcaucaucugggucgcgaccgagggcgcccugaacacccccaaggaccacaucgggacgcggaaccccgccaacaacgccgcgaucgugcuccagcugccgcagggcaccacccugcccaagggguucuacgccgagggcucccgcgggggcucccaggccagcucccggagcuccagccgcucccggaacagcucccgcaacagcacccccggcagcucccgggggacgagccccgcccgcauggccggcaacgggggcgacgcggcccucgcccugcugcuccuggaccggcugaaccagcucgaguccaagaugagcgggaagggccagcagcagcagggccagaccgugaccaagaaguccgccagcgaggccuccaagaagccgcgccagaagcgcaccgcgacgaaggccuacaacgucacccaggccuucgggcggcgcggccccgagcagacccaggggaacuucggcgaccaggagcugauccggcaggggaccgacuacaagcacuggccccagaucgcccaguucgcccccagcgcguccgccuucuucggcaugagccgcaucggcauggaggugacgccguccgggaccuggcugaccuacaccggcgccaucaagcucgacgacaaggaccccaacuucaaggaccaggugauccugcugaacaagcacaucgacgccuacaagacguucccgcccaccgagcccaagaaggacaagaagaagaaggccgacgagacccaggcgcucccccagcggcagaagaagcagcagaccgucacgcugcugcccgccgccgaccucgacgacuucagcaagcagcugcagcaguccaugagcuccgccgacagcacccaggcgugaggacuagucccuguucccagagcccacuuuuuuuucuuuuuuugaaauaaaauagccugucuuucagaucucaaaggcucuuuucagagccaccaaaaaaaaaaaaaaaaaaaaaaaaaaaaaaaaaaaaaaaaaaaaaaaaaaaaaaaaaaaaaaaaaaaaaaaaaaaaaaaaaaaaaaaaaaaaaaaaaaaaa

SEQ ID NO: 19414 - RNA, 1532 nt, Artificial Sequence
  SARS-CoV-2__MT370948.1__nucleocapsid protein (N) mRNA gc
aggagagucccgcagucggcguccagcggcucugcuuguucgugugugugucguugcaggccuuauucaagcuuaccaugagcgacaacggcccccagaaccagcgcaacgccccgcggaucaccuucgggggccccuccgacagcaccggguccaaccagaacggcgagcgcagcggggcccgguccaagcagcgccggccccagggccugcccaacaacacggcgagcugguucaccgcccucacccagcacggcaaggaggaccugaaguucccgcgcgggcagggcgugcccaucaacaccaacuccagccccgacgaccagaucggguacuaccggcgcgccacgcggcgcauccggggcggggacggcaagaugaaggaccugagcccccgcugguacuucuacuaccucggcaccgggccggaggccggccugcccuacggggccaacaaggacggcaucaucugggucgcgaccgagggcgcccugaacacccccaaggaccacaucgggacgcggaaccccgccaacaacgccgcgaucgugcuccagcugccgcagggcaccacccugcccaagggguucuacgccgagggcucccgcgggggcucccaggccagcucccggagcuccagccgcucccggaacagcucccgcaacagcacccccggcagcucccgggggacgagccccgcccgcauggccggcaacgggggcgacgcggcccucgcccugcugcuccuggaccggcugaaccagcucgaguccaagaugagcgggaagggccagcagcagcagggccagaccgugaccaagaaguccgccgccgaggcgagcaagaagccgcgccagaagcgcaccgccacgaaggccuacaacgucacccaggccuucgggcggcgcggccccgagcagacccaggggaacuucggcgaccaggagcugauccggcaggggaccgacuacaagcacuggccccagaucgcccaguucgcgcccuccgccagcgccuucuucggcaugucccgcaucggcauggaggugacgccgagcgggaccuggcugaccuacaccggcgccaucaagcucgacgacaaggaccccaacuucaaggaccaggugauccugcugaacaagcacaucgacgccuacaagacguucccgcccaccgagcccaagaaggacaagaagaagaaggcggacgagacccaggcccucccccagcggcagaagaagcagcagaccgucacgcugcugcccgccgccgaccucgacgacuucuccaagcagcugcagcagagcauguccaucgcggacagcacccaggccugaggacuagucccuguucccagagcccacuuuuuuuucuuuuuuugaaauaaaauagccugucuuucagaucucaaaggcucuuuucagagccaccaaaaaaaaaaaaaaaaaaaaaaaaaaaaaaaaaaaaaaaaaaaaaaaaaaaaaaaaaaaaaaaaaaaaaaaaaaaaaaaaaaaaaaaaaaaaaaaaaaaaa

SEQ ID NO: 19415 - RNA, 1532 nt, Artificial Sequence
  SARS-CoV-2__MT370961.1__nucleocapsid protein (N) mRNA gc
aggagagucccgcagucggcguccagcggcucugcuuguucgugugugugucguugcaggccuuauucaagcuuaccaugagcgacaacggcccccagaaccagcgcaacgccccgcggaucaccuucgggggccccuccgacagcaccggguccaaccagaacggcgagcgcagcggggcccgguccaagcagcgccggccccagggccugcccaacaacacggcgagcugguucaccgcccucacccagcacggcaaggaggaccugaaguucccgcgcgggcagggcgugcccaucaacaccaacuccagccccgacgaccagaucggguacuaccggcgcgccacgcggcgcauccggggcggggacggcaagaugaaggaccugagcccccgcugguacuucuacuaccucggcaccgggccggaggccggccugcccuacggggccaacaaggacggcaucaucugggucgcgaccgagggcgcccugaacacccccaaggaccacaucgggacgcggaaccccgccaacaacgccgcgaucgugcuccagcugccgcagggcaccacccugcccaagggguucuacgccgagggcagccgcgggggcucccaggccagcucccggagcuccagccgcucccggaacagcucccgcaacagcacccccggcagcucccgggggacgagccccgcccgcauggccggcaacgggggcgacgcggcccucgcccugcugcuccuggaccggcugaaccagcucgagcgcaagauguccgggaagggccagcagcagcagggccagaccgugaccaagaaguccgccgccgaggcguccaagaagccgcgccagaagcggaccgccacgaaggccuacaacgucacccaggccuucgggcgccggggccccgagcagacccaggggaacuucggcgaccaggagcugauccgccaggggaccgacuacaagcacuggccccagaucgcccaguucgcgcccagcgccuccgccuucuucggcaugagccggaucggcauggaggugacgccguccgggaccuggcugaccuacaccggcgccaucaagcucgacgacaaggaccccaacuucaaggaccaggugauccugcugaacaagcacaucgacgccuacaagacguucccgcccaccgagcccaagaaggacaagaagaagaaggcggacgagacccaggcccucccccagcgccagaagaagcagcagaccgucacgcugcugcccgccgccgaccucgacgacuucagcaagcagcugcagcaguccaugagcuccgcggacagcacccaggccugaggacuagucccuguucccagagcccacuuuuuuuucuuuuuuugaaauaaaauagccugucuuucagaucucaaaggcucuuuucagagccaccaaaaaaaaaaaaaaaaaaaaaaaaaaaaaaaaaaaaaaaaaaaaaaaaaaaaaaaaaaaaaaaaaaaaaaaaaaaaaaaaaaaaaaaaaaaaaaaaaaaaa

SEQ ID NO: 19416 - RNA, 1532 nt, Artificial Sequence
  SARS-CoV-2__MT371035.1__nucleocapsid protein (N) mRNA gc
aggagagucccgcagucggcguccagcggcucugcuuguucgugugugugucguugcaggccuuauucaagcuuaccaugagcgacaacggcccccagaaccagcgcaacgccccgcggaucaccuucgggggccccuccgacagcaccggguccaaccagaacggcgagcgcagcggggcccgguccaagcagcgccggccccagggccugcccaacaacacggcgagcugguucaccgcccucacccagcacggcaaggaggaccugaaguucccgcgcgggcagggcgugcccaucaacaccaacuccagccccgacgaccagaucggguacuaccggcgcgccacgcggcgcauccggggcggggacggcaagaugaaggaccugagcccccgcugguacuucuacuaccucggcaccgggccggaggccggccugcccuacggggccaacaaggacggcaucaucugggucgcgaccgagggcgcccugaacacccccaaggaccacaucgggacgcggaaccccgccaacaacgccgcgaucgugcuccagcugccgcagggcaccacccugcccaagggguucuacgccgagggcucccgcgggggcucccaggccagcucccggagcuccagccgcucccggaacagcucccgcaacagcacccccggcagcucccgggggacgagccccgcccgcauggccggcaacgggggcgacgcggcccucgcccugcugcuccuggaccggcugaaccagcucgaguccaagaugagcgggaagggccagcagcagcagggccagaccgugaccaagaaguccgccgccgaggcgagcaagaagccgcgccagaagcgcaccgccacgaaggccuacaacgucacccaggccuucgggcggcgcggccccgagcagacccaggggaacuucggcgaccaggagcugauccggcaggggaccgacuacaagcacuggccccagaucgcccaguucgcgcccuccgccagcgccuucuucggcaugucccgcaucggcaucgaggugacgccgagcgggaccuggcugaccuacaccggcgccaucaagcucgacgacaaggaccccaacuucaaggaccaggugauccugcugaacaagcacaucgacgccuacaagacguucccgcccaccgagcccaagaaggacaagaagaagaaggcggacgagacccaggcccucccccagcggcagaagaagcagcagaccgucacgcugcugcccgccgccgaccucgacgacuucuccaagcagcugcagcagagcauguccagcgcggacuccacccaggccugaggacuagucccuguucccagagcccacuuuuuuuucuuuuuuugaaauaaaauagccugucuuucagaucucaaaggcucuuuucagagccaccaaaaaaaaaaaaaaaaaaaaaaaaaaaaaaaaaaaaaaaaaaaaaaaaaaaaaaaaaaaaaaaaaaaaaaaaaaaaaaaaaaaaaaaaaaaaaaaaaaaaa

SEQ ID NO: 19417 - RNA, 1532 nt, Artificial Sequence
  SARS-CoV-2__MT371038.1__nucleocapsid protein (N) mRNA gc
aggagagucccgcagucggcguccagcggcucugcuuguucgugugugugucguugcaggccuuauucaagcuuaccaugagcgacaacggcccccagaaccagcgcaacgccccgcggaucaccuucgggggccuguccgacagcaccggguccaaccagaacggcgagcgcagcggggcccgguccaagcagcgccggccccagggccuccccaacaacacggcgagcugguucaccgcccugacccagcacggcaaggaggaccugaaguucccccgcgggcagggcgugccgaucaacaccaacuccagccccgacgaccagaucggguacuaccggcgcgccacgcggcgcauccggggcggggacggcaagaugaaggaccucagcccccgcugguacuucuacuaccugggcaccgggcccgaggccggccugccguacggggccaacaaggacggcaucaucugggucgcgaccgagggcgcccucaacacccccaaggaccacaucgggacgcggaaccccgccaacaacgccgcgaucgugcugcagcugccccagggcaccacccucccgaagggguucuacgccgagggcagccgcgggggcucccaggccagcucccggagcuccagccgcucccggagcuccagccgcaacagcacccccggcuccagccgggggacgucccccgcccgcauggccggcaacgggggcgacgcggcccuggcccugcuccugcuggaccggcucaaccagcuggagagcaagauguccgggaagggccagcagcagcagggccagaccgugaccaagaaguccgccgccgaggcguccaagaagccccgccagaagcgcaccgccacgaaggccuacaacgucacccaggccuucgggcggcgcggcccggagcagacccaggggaacuucggcgaccaggagcugauccggcaggggaccgacuacaagcacuggccccagaucgcccaguucgcgcccagcgccuccgccuucuucggcaugagccgcaucggcauggaggugacgcccuccgggaccuggcucaccuacaccggcgccaucaagcuggacgacaaggacccgaacuucaaggaccaggugauccugcucaacaagcacaucgacgccuacaagacguucccgcccaccgagcccaagaaggacaagaagaagaaggcggacgagacccaggcccugccccagcggcagaagaagcagcagaccgucacgcugcuccccgccgccgaccuggacgacuucagcaagcagcugcagcaguccaugagcuccgcggacagcacccaggccugaggacuagucccuguucccagagcccacuuuuuuuucuuuuuuugaaauaaaauagccugucuuucagaucucaaaggcucuuuucagagccaccaaaaaaaaaaaaaaaaaaaaaaaaaaaaaaaaaaaaaaaaaaaaaaaaaaaaaaaaaaaaaaaaaaaaaaaaaaaaaaaaaaaaaaaaaaaaaaaaaaaaa

SEQ ID NO: 19418 - RNA, 1532 nt, Artificial Sequence
  SARS-CoV-2__MT358690.1__nucleocapsid protein (N) mRNA gc
aggagagucccgcagucggcguccagcggcucugcuuguucgugugugugucguugcaggccuuauucaagcuuaccaugagcgacaacggcccccagaaccagcgcaacgccccgcggaucaccuucgggggccccuccgacagcaccggguccaaccagaacggcgagcgcagcggggcccgguccaagcagcgccggccccagggccugcccaacaacacggcgagcugguucaccgcccucacccagcacggcaaggaggaccugaaguucccgcgcgggcagggcgugcccaucaacaccaacuccagccccgacgaccagaucggguacuaccggcgcgccacgcggcgcauccggggcggggacggcaagaugaaggaccugagcccccgcugguacuucuacuaccucggcaccgggccggaggccggccugcccuacggggccaacaaggacggcaucaucugggucgcgaccgagggcgcccugaacacccccaaggaccacaucgggacgcggaaccccgccaacaacgccgcgaucgugcuccagcugccgcagggcaccacccugcccaagggguucuacgccgagggcucccgcgggggcucccaggccagcucccggagcuccagccgcucccggaacagcucccgcaacagcacccccggcagcucccgggggacgagccccggccgcauggccgggaacggcggggacgccgcgcucgcccugcugcuccuggaccggcugaaccagcucgaguccaagaugagcggcaagugccagcagcagcagggccagaccguggccaagaaguccgccgccgaggcgagcaagaagccgcgccagaagcgcaccgccaccaaggccuacaacgucacgcaggccuucgggcggcgcggccccgagcagacccaggggaacuucggcgaccaggagcugauccggcaggggaccgacuacaagcacuggccccagaucgcccaguucgcgcccuccgccagcgccuucuucggcaugucccgcaucggcauggaggugaccccgagcgggacguggcugaccuacaccggcgccaucaagcucgacgacaaggaccccaacuucaaggaccaggugauccugcugaacaagcacaucgacgccuacaagaccuucccgcccacggagcccaagaaggacaagaagaagaaggcggacgagacccaggcccucccccagcggcagaagaagcagcagaccgucacccugcugcccgccgccgaccucgacgacuucuccaagcagcugcagcagagcauguccagcgcggacuccacgcaggccugaggacuagucccuguucccagagcccacuuuuuuuucuuuuuuugaaauaaaauagccugucuuucagaucucaaaggcucuuuucagagccaccaaaaaaaaaaaaaaaaaaaaaaaaaaaaaaaaaaaaaaaaaaaaaaaaaaaaaaaaaaaaaaaaaaaaaaaaaaaaaaaaaaaaaaaaaaaaaaaaaaaaa

SEQ ID NO: 19419 - RNA, 1532 nt, Artificial Sequence
  SARS-CoV-2__MT358737.1__nucleocapsid protein (N) mRNA gc
aggagagucccgcagucggcguccagcggcucugcuuguucgugugugugucguugcaggccuuauucaagcuuaccaugagcgacaacggcccccagaaccagcgcaacgccccgcggaucaccuucgggggccccuccgacagcaccggguccaaccagaacggcgagcgcagcggggcccgguccaagcagcgccggccccagggccugcccaacaacacggcgagcugguucaccgcccucacccagcacggcaaggaggaccugaaguucccgcgcgggcagggcgugcccaucaacaccaacuccagccccgacgaccagaucggguacuaccggcgcgccacgcggcgcauccggggcggggacggcaagaugaaggaccugagcccccgcugguacuucuacuaccucggcaccgggccggaggccggccugcccuacggggccaacaaggacggcaucaucugggucgcgaccgagggcgcccugaacacccccaaggaccacaucgggacgcggaaccccgccaacaacgccgcgaucgugcuccagcugccgcagggcaccacccugcccaagggguucuacgccgagggcucccgcgggggcucccaggccagcucccggagcuccagccgcucccggaacagcucccgcaacagcacccccggcagcucccgggggacgagccccgcccgcauggccggcaacgggggcgacgcggcccucgcccugcugcuccuggaccggcugaaccagcucgaguccaagaugagcgggaagggccagcagcagcagggccagaccgugaccaagaaguccgccgccgaggcgagcaagaagccgcgccagaagcgcaccgccacgaaggccuacaacgucacccaggccuucgggcggcgcggccccgagcagacccaggggaacuucggcgaccaggagcugauccggcaggggaccgacuacaagcacuggccccagaucgcccaguucgcgcccuccgccagcgccuucuucggcaugucccgcaucggcauggaggugacgccgagcgggaccuggcugaccuacaccggcgccaucaagcucggggacaaggaccccaacuucaaggaccaggugauccugcugaacaagcacaucgacgccuacaagacguucccgcccaccgagcccaagaaggacaagaagaagaaggcggacgagacccaggcccucccccagcggcagaagaagcagcagaccgucacgcugcugcccgccgccgaccucgacgacuucuccaagcagcugcagcagagcauguccagcgcggacuccacccaggccugaggacuagucccuguucccagagcccacuuuuuuuucuuuuuuugaaauaaaauagccugucuuucagaucucaaaggcucuuuucagagccaccaaaaaaaaaaaaaaaaaaaaaaaaaaaaaaaaaaaaaaaaaaaaaaaaaaaaaaaaaaaaaaaaaaaaaaaaaaaaaaaaaaaaaaaaaaaaaaaaaaaaa

SEQ ID NO: 19420 - RNA, 1532 nt, Artificial Sequence
  SARS-CoV-2__MT334533.1__nucleocapsid protein (N) mRNA gc
aggagagucccgcagucggcguccagcggcucugcuuguucgugugugugucguugcaggccuuauucaagcuuaccaugagcgacaacggcccccagaaccagcgcaacgccccgcggaucaccuucgggggccccuccgacagcaccggguccaaccagaacggcgagcgcagcggggcccgguccaagcagcgccggccccagggccugcccaacaacacggcgagcugguucaccgcccucacccagcacggcaaggaggaccugaaguucccgcgcgggcagggcgugcccaucaacaccaacuccagccccgacgaccagaucggguacuaccggcgcgccacgcggcgcauccggggcggggacggcaagaugaaggaccugagcccccgcugguacuucuacuaccucggcaccgggccggaggccggccugcccuacggggccaacaaggacggcaucaucugggucgcgaccgagggcgcccugaacacccccaaggaccacaucgggacgcggaaccccagcaacaacgccgccaucgugcuccagcugccgcagggcaccacccugcccaagggguucuacgcggagggcucccgcgggggcagccaggccuccagccgguccagcucccgcagccggaacuccagccgcaacagcacccccggcuccagccgggggacgucccccgcccgcauggccggcaacgggggcgacgccgcgcucgcccugcugcuccuggaccggcugaaccagcucgagagcaagauguccgggaagggccagcagcagcagggccagaccgugaccaagaaguccgccgccgaggccuccaagaagccgcgccagaagcgcaccgcgacgaaggccuacaacgucacccaggccuucgggcggcgcggccccgagcagacccaggggaacuucggcgaccaggagcugauccggcaggggaccgacuacaagcacuggccccagaucgcccaguucgcccccagcgcguccgccuucuucggcaugagccgcaucggcauggaggugacgccguccgggaccuggcugaccuacaccggcgccaucaagcucgacgacaaggaccccaacuucaaggaccaggugauccugcugaacaagcacaucgacgccuacaagacguucccgcccaccgagcccaagaaggacaagaagaagaaggccgacgagacccaggcgcucccccagcggcagaagaagcagcagaccgucacgcugcugcccgccgccgaccucgacgacuucagcaagcagcugcagcaguccaugagcuccgccgacagcacccaggcgugaggacuagucccuguucccagagcccacuuuuuuuucuuuuuuugaaauaaaauagccugucuuucagaucucaaaggcucuuuucagagccaccaaaaaaaaaaaaaaaaaaaaaaaaaaaaaaaaaaaaaaaaaaaaaaaaaaaaaaaaaaaaaaaaaaaaaaaaaaaaaaaaaaaaaaaaaaaaaaaaaaaaa

SEQ ID NO: 19421 - RNA, 1532 nt, Artificial Sequence
  SARS-CoV-2__MT293159.1__nucleocapsid protein (N) mRNA gc
aggagagucccgcagucggcguccagcggcucugcuuguucgugugugugucguugcaggccuuauucaagcuuaccaugagcgacaacggcccccagaaccagcgcaacgccccgcggaucaccuucgggggccccuccgacagcaccggguccaaccagaacggcgagcgcagcggggcccgguccaagcagcgccggccccagggccugcccaacaacacggcgagcugguucaccgcccucacccagcacggcaaggaggaccugaaguucccgcgcgggcagggcgugcccaucaacaccaacuccagccccgacgaccagaucggguacuaccggcgcgccacgcggcgcauccggggcggggacggcaagaugaaggaccugagcccccgcugguacuucuacuaccucggcaccgggccggaggccggccugcccuacggggccaacaaggacggcaucaucugggucgcgaccgagggcgcccugaacacccccaaggaccacaucgggacgcggaaccccgccaacaacgccgcgaucgugcuccagcugccgcagggcaccacccugcccaagggguucuacgccgagggcucccgcgggggcucccaggccagcucccggagcuccagccgcucccggaacagcucccgcaacagcacccccggcagcucccgggggacgagccccgccaccauggccggcaacgggggcgacgcggcccucgcccugcugcuccuggaccgccugaaccagcucgaguccaagaugagcgggaagggccagcagcagcagggccagaccgugaccaagaaguccgccgccgaggcgagcaagaagccgcggcagaagcgcacggccaccaaggccuacaacgucacccaggccuucgggcgccggggccccgagcagacccaggggaacuucggcgaccaggagcugauccgccaggggacggacuacaagcacuggccccagaucgcccaguucgcgcccuccgccagcgccuucuucggcaugucccggaucggcauggaggugaccccgagcgggaccuggcugaccuacacgggcgccaucaagcucgacgacaaggaccccaacuucaaggaccaggugauccugcugaacaagcacaucgacgccuacaagaccuucccgcccaccgagcccaagaaggacaagaagaagaaggcggacgagacccaggcccucccccagcgccagaagaagcagcagacggucacccugcugcccgccgccgaccucgacgacuucuccaagcagcugcagcagagcauguccagcgcggacuccacccaggccugaggacuagucccuguucccagagcccacuuuuuuuucuuuuuuugaaauaaaauagccugucuuucagaucucaaaggcucuuuucagagccaccaaaaaaaaaaaaaaaaaaaaaaaaaaaaaaaaaaaaaaaaaaaaaaaaaaaaaaaaaaaaaaaaaaaaaaaaaaaaaaaaaaaaaaaaaaaaaaaaaaaaa

SEQ ID NO: 19422 - RNA, 1532 nt, Artificial Sequence
  SARS-CoV-2__MT293178.1__nucleocapsid protein (N) mRNA gc
aggagagucccgcagucggcguccagcggcucugcuuguucgugugugugucguugcaggccuuauucaagcuuaccaugagcgacaacggcacccagaaccagcgcaacgcgccccggaucaccuucgggggcccguccgacacgaccgggagcaaccagaacggcgagcgcuccggggcccggagcaagcagcgccggccccagggccugcccaacaacaccgccuccugguucaccgcccucacgcagcacggcaaggaggaccugaaguucccccgcgggcagggcgugccgaucaacaccaacagcucccccgacgaccagaucggguacuaccggcgcgccacccggcgcauccggggcggggacggcaagaugaaggaccugagcccccgcugguacuucuacuaccucggcaccgggcccgaggccggccugccguacggggccaacaaggacggcaucaucugggucgcgacggagggcgcccugaacacccccaaggaccacaucgggacccggaaccccgccaacaacgccgcgaucgugcuccagcugccccagggcaccacgcugccgaagggguucuacgccgagggcucccgcgggggcagccaggccuccagccgguccagcucccgcagccggaacuccagccgcaacuccacccccggcagcagccgggggaccucccccgcccgcauggccggcaacgggggcgacgcggcccucgcccugcugcuccuggaccggcugaaccagcucgagagcaagauguccgggaagggccagcagcagcagggccagaccgugacgaagaaguccgccgccgaggcgagcaagaagccccgccagaagcgcaccgccaccaaggccuacaacgucacccaggccuucgggcggcgcggcccggagcagacgcaggggaacuucggcgaccaggagcugauccggcaggggaccgacuacaagcacuggccccagaucgcccaguucgcgcccagcgccuccgccuucuucggcaugagccgcaucggcauggaggugacccccuccgggaccuggcugacguacaccggcgccaucaagcucgacgacaaggacccgaacuucaaggaccaggugauccugcugaacaagcacaucgacgccuacaagaccuucccgcccaccgagcccaagaaggacaagaagaagaaggcggacgagacgcaggcccucccccagcggcagaagaagcagcagaccgucacccugcugcccgccgccgaccucgacgacuucagcaagcagcugcagcaguccaugagcuccgcggacagcacccaggccugaggacuagucccuguucccagagcccacuuuuuuuucuuuuuuugaaauaaaauagccugucuuucagaucucaaaggcucuuuucagagccaccaaaaaaaaaaaaaaaaaaaaaaaaaaaaaaaaaaaaaaaaaaaaaaaaaaaaaaaaaaaaaaaaaaaaaaaaaaaaaaaaaaaaaaaaaaaaaaaaaaaaa

SEQ ID NO: 19423 - RNA, 1532 nt, Artificial Sequence
  SARS-CoV-2__MT263411.1__nucleocapsid protein (N) mRNA gc
aggagagucccgcagucggcguccagcggcucugcuuguucgugugugugucguugcaggccuuauucaagcuuaccaugagcgacaacggcccccagaaccagcgcaacgccccgcggaucaccuucgggggccccuccgacagcaccggguccaaccagaacggcgagcgcagcggggcccgguccaagcagcgccggccccagggccugcccaacaacacggcgagcugguucaccgcccucacccagcacggcaaggaggaccugaaguucccgcgcgggcagggcgugcccaucaacaccaacuccagccccgacgaccagaucggguacuaccggcgcgccacgcggcgcauccggggcggggacggcaagaugaaggaccugagcccccgcugguacuucuacuaccucggcaccgggccggaggccggccugcccuacggggccaacaaggacggcaucaucugggucgcgaccgagggcgcccugaacacccccaaggaccacaucgggacgcggaaccccgccaacaacgccgcgaucgugcuccagcugccgcagggcaccacccugcccaagggguucuacgccgagggcagccgcgggggcucccaggccagcucccggagcuccagccgcucccggaacagcucccgcaacagcacccccggcagcucccgggggacgagccccgcccgcauggccggcaacgggggcgacgcggcccucgcccugcugcuccuggaccggcugaaccagcucgagaccaagauguccgggaagggccagcagcagcagggccagaccgugaccaagaaguccgccgccgaggcguccaagaagccgcgccagaagcgcacggccaccaaggccuacaacgucacccaggccuucgggcggcgcggccccgagcagacccaggggaacuucggcgaccaggagcugauccggcaggggacggacuacaagcacuggccccagaucgcccaguucgcgcccagcgccuccgccuucuucggcaugagccgcaucggcauggaggugaccccguccgggaccuggcugaccuacacgggcgccaucaagcucgacgacaaggaccccaacuucaaggaccaggugauccugcugaacaagcacaucgacgccuacaagaccuucccgcccaccgagcccaagaaggacaagaagaagaaggcggacgagacccaggcccucccccagcggcagaagaagcagcagacggucacccugcugcccgccgccgaccucgacgacuucagcaagcagcugcagcaguccaugagcuccgcggacagcacccaggccugaggacuagucccuguucccagagcccacuuuuuuuucuuuuuuugaaauaaaauagccugucuuucagaucucaaaggcucuuuucagagccaccaaaaaaaaaaaaaaaaaaaaaaaaaaaaaaaaaaaaaaaaaaaaaaaaaaaaaaaaaaaaaaaaaaaaaaaaaaaaaaaaaaaaaaaaaaaaaaaaaaaaa

SEQ ID NO: 19424 - RNA, 1532 nt, Artificial Sequence
  SARS-CoV-2__MT259237.1__nucleocapsid protein (N) mRNA gc
aggagagucccgcagucggcguccagcggcucugcuuguucgugugugugucguugcaggccuuauucaagcuuaccaugagcuacaacggcccccagaaccagcgcaacgccccgcggaucaccuucgggggccccuccgacagcaccggguccaaccagaacggcgagcgcagcggggcccgguccaagcagcgccggccccagggccugcccaacaacacggcgagcugguucaccgcccucacccagcacggcaaggaggaccugaaguucccgcgcgggcagggcgugcccaucaacaccaacuccagccccgacgaccagaucggguacuaccggcgcgccacgcggcgcauccggggcggggacggcaagaugaaggaccugagcccccgcugguacuucuacuaccucggcaccgggccggaggccggccugcccuacggggccaacaaggacggcaucaucugggucgcgaccgagggcgcccugaacacccccaaggaccacaucgggacgcggaaccccgccaacaacgccgcgaucgugcuccagcugccgcagggcaccacccugcccaagggguucuacgccgagggcucccgcgggggcucccaggccagcucccggagcuccagccgcucccggaacagcucccgcaacagcacccccggcagcucccgggggacgagccccgcccgcauggccggcaacgggggcgacgcggcccucgcccugcugcuccuggaccggcugaaccagcucgaguccaagaugagcgggaagggccagcagcagcagggccagaccgugaccaagaaguccgccgccgaggcgagcaagaagccgcgccagaagcgcaccgccacgaaggccuacaacgucacccaggccuucgggcggcgcggccccgagcagacccaggggaacuucggcgaccaggagcugauccggcaggggaccgacuacaagcacuggccccagaucgcccaguucgcgcccuccgccagcgccuucuucggcaugucccgcaucggcauggaggugacgccgagcgggaccuggcugaccuacaccggcgccaucaagcucgacgacaaggaccccaacuucaaggaccaggugauccugcugaacaagcacaucgacgccuacaagacguucccgcccaccgagcccaagaaggacaagaagaagaaggcggacgagacccaggcccucccccagcggcagaagaagcagcagaccgucacgcugcugcccgccgccgaccucgacgacuucuccaagcagcugcagcagagcauguccagcgcggacuccacccaggccugaggacuagucccuguucccagagcccacuuuuuuuucuuuuuuugaaauaaaauagccugucuuucagaucucaaaggcucuuuucagagccaccaaaaaaaaaaaaaaaaaaaaaaaaaaaaaaaaaaaaaaaaaaaaaaaaaaaaaaaaaaaaaaaaaaaaaaaaaaaaaaaaaaaaaaaaaaaaaaaaaaaaa

SEQ ID NO: 19425 - RNA, 1532 nt, Artificial Sequence
  SARS-CoV-2__MT259269.1__nucleocapsid protein (N) mRNA gc
aggagagucccgcagucggcguccagcggcucugcuuguucgugugugugucguugcaggccuuauucaagcuuaccaugagcgacgacggcccccagaaccagcgcaacgccccgcggaucaccuucgggggccccuccgacagcaccggguccaaccagaacggcgagcgcagcggggcccgguccaagcagcgccggccccagggccugcccaacaacacggcgagcugguucaccgcccucacccagcacggcaaggaggaccugaaguucccgcgcgggcagggcgugcccaucaacaccaacuccagccccgacgaccagaucggguacuaccggcgcgccacgcggcgcauccggggcggggacggcaagaugaaggaccugagcccccgcugguacuucuacuaccucggcaccgggccggaggccggccugcccuacggggccaacaaggacggcaucaucugggucgcgaccgagggcgcccugaacacccccaaggaccacaucgggacgcggaaccccgccaacaacgccgcgaucgugcuccagcugccgcagggcaccacccugcccaagggguucuacgccgagggcucccgcgggggcucccaggccagcucccggagcuccagccgcucccggaacagcucccgcaacagcacccccggcagcucccgggggacgagccccgcccgcauggccggcaacgggggcgacgcggcccucgcccugcugcuccuggaccggcugaaccagcucgaguccaagaugagcgggaagggccagcagcagcagggccagaccgugaccaagaaguccgccgccgaggcgagcaagaagccgcgccagaagcgcaccgccacgaaggccuacaacgucacccaggccuucgggcggcgcggccccgagcagacccaggggaacuucggcgaccaggagcugauccggcaggggaccgacuacaagcacuggccccagaucgcccaguucgcgcccuccgccagcgccuucuucggcaugucccgcaucggcauggaggugacgccgagcgggaccuggcugaccuacaccggcgccaucaagcucgacgacaaggaccccaacuucaaggaccaggugauccugcugaacaagcacaucgacgccuacaagacguucccgcccaccgagcccaagaaggacaagaagaagaaggcggacgagacccaggcccucccccagcggcagaagaagcagcagaccgucacgcugcugcccgccgccgaccucgacgacuucuccaagcagcugcagcagagcauguccagcgcggacuccacccaggccugaggacuagucccuguucccagagcccacuuuuuuuucuuuuuuugaaauaaaauagccugucuuucagaucucaaaggcucuuuucagagccaccaaaaaaaaaaaaaaaaaaaaaaaaaaaaaaaaaaaaaaaaaaaaaaaaaaaaaaaaaaaaaaaaaaaaaaaaaaaaaaaaaaaaaaaaaaaaaaaaaaaaa

SEQ ID NO: 19426 - RNA, 1532 nt, Artificial Sequence
  SARS-CoV-2__MT259274.1__nucleocapsid protein (N) mRNA gc
aggagagucccgcagucggcguccagcggcucugcuuguucgugugugugucguugcaggccuuauucaagcuuaccaugagcgacaacggcccccagaaccagcgcaacgccccgcggaucaccuucgggggccccuccgacagcaccggguccaaccagaacggcgagcgcagcgggacgcgguccaagcagcgccggccccagggccugcccaacaacaccgccagcugguucaccgcgcucacccagcacggcaaggaggaccugaaguucccgcgcgggcagggcgugcccaucaacacgaacuccagccccgacgaccagaucggguacuaccggcgcgccacccggcgcauccggggcggggacggcaagaugaaggaccugagcccccgcugguacuucuacuaccucggcaccgggccggaggccggccugcccuacggggccaacaaggacggcaucaucugggucgccaccgagggcgcgcugaacacgcccaaggaccacaucgggacccggaaccccgccaacaacgccgccaucgugcuccagcugccgcagggcaccacccugcccaagggguucuacgcggagggcucccgcgggggcucccaggccagcucccggagcuccagccgcucccggaacagcucccgcaacagcacgcccggcagcucccgggggaccagccccgcccgcauggccggcaacgggggcgacgccgcgcucgcccugcugcuccuggaccggcugaaccagcucgaguccaagaugagcgggaagggccagcagcagcagggccagaccgugaccaagaaguccgccgccgaggccagcaagaagccgcgccagaagcgcacggcgaccaaggccuacaacgucacccaggccuucgggcggcgcggccccgagcagacccaggggaacuucggcgaccaggagcugauccggcaggggacggacuacaagcacuggccccagaucgcccaguucgcccccuccgcgagcgccuucuucggcaugucccgcaucggcauggaggugaccccgagcgggaccuggcugaccuacacgggcgccaucaagcucgacgacaaggaccccaacuucaaggaccaggugauccugcugaacaagcacaucgacgccuacaagaccuucccgcccaccgagcccaagaaggacaagaagaagaaggccgacgagacccaggcgcucccccagcggcagaagaagcagcagacggucacccugcugcccgccgccgaccucgacgacuucuccaagcagcugcagcagagcauguccagcgccgacuccacccaggcgugaggacuagucccuguucccagagcccacuuuuuuuucuuuuuuugaaauaaaauagccugucuuucagaucucaaaggcucuuuucagagccaccaaaaaaaaaaaaaaaaaaaaaaaaaaaaaaaaaaaaaaaaaaaaaaaaaaaaaaaaaaaaaaaaaaaaaaaaaaaaaaaaaaaaaaaaaaaaaaaaaaaaa

SEQ ID NO: 19427 - RNA, 1532 nt, Artificial Sequence
  SARS-CoV-2__MT159718.2__nucleocapsid protein (N) mRNA gc
aggagagucccgcagucggcguccagcggcucugcuuguucgugugugugucguugcaggccuuauucaagcuuaccaugagcgacaacggcccccagaaccagcgcaacgccccgcggaucaccuucgggggccccuccgacagcaccggguccaaccagaacggcgagcgcagcggggcccgguccaagcagcgccggccccagggccugagcaacaacacggcguccugguucaccgcccucacccagcacggcaaggaggaccugaaguucccccgcgggcagggcgugccgaucaacaccaacagcucccccgacgaccagaucggguacuaccggcgcgccacgcggcgcauccggggcggggacggcaagaugaaggaccugagcccccgcugguacuucuacuaccucggcaccgggcccgaggccggccugccguacggggccaacaaggacggcaucaucugggucgcgaccgagggcgcccugaacacccccaaggaccacaucgggacgcggaaccccgccaacaacgccgcgaucgugcuccagcugccccagggcaccacccugccgaagggguucuacgccgagggcucccgcgggggcagccaggccuccagccgguccagcucccgcagccggaacuccagccgcaacagcacccccggcuccagccgggggacgucccccgcccgcauggccggcaacgggggcgacgcggcccucgcccugcugcuccuggaccggcugaaccagcucgagagcaagauguccgggaagggccagcagcagcagggccagaccgugaccaagaaguccgccgccgaggcgagcaagaagccccgccagaagcgcaccgccacgaaggccuacaacgucacccaggccuucgggcggcgcggcccggagcagacccaggggaacuucggcgaccaggagcugauccggcaggggaccgacuacaagcacuggccccagaucgcccaguucgcgcccagcgccuccgccuucuucggcaugagccgcaucggcauggaggugacgcccuccgggaccuggcugaccuacaccggcgccaucaagcucgacgacaaggacccgaacuucaaggaccaggugauccugcugaacaagcacaucgacgccuacaagacguucccgcccaccgagcccaagaaggacaagaagaagaaggcggacgagacccaggcccucccccagcggcagaagaagcagcagaccgucacgcugcugcccgccgccgaccucgacgacuucagcaagcagcugcagcaguccaugagcuccgcggacagcacccaggccugaggacuagucccuguucccagagcccacuuuuuuuucuuuuuuugaaauaaaauagccugucuuucagaucucaaaggcucuuuucagagccaccaaaaaaaaaaaaaaaaaaaaaaaaaaaaaaaaaaaaaaaaaaaaaaaaaaaaaaaaaaaaaaaaaaaaaaaaaaaaaaaaaaaaaaaaaaaaaaaaaaaaa

SEQ ID NO: 19428 - RNA, 1532 nt, Artificial Sequence
  SARS-CoV-2__MT135043.1__nucleocapsid protein (N) mRNA gc
aggagagucccgcagucggcguccagcggcucugcuuguucgugugugugucguugcaggccuuauucaagcuuaccaugagcgacaacggcccccagaaccagcgcaacgccccgcggaucaccuucgggggccccuccgacagcaccggguccaaccagaacggcgagcgcagcggggcccgguccaagcagcgccggccccagggccugcccaacaacacggcgagcugguucaccgcccucacccagcacggcaaggaggaccugaaguucccgcgcgggcagggcgugcccaucaacaccaacuccagccccgacgaccagaucggguacuaccggcgcgccacgcggcgcauccggggcggggacggcaagaugaaggaccugagcccccgcugguacuucuacuaccucggcaccgggccggaggccggccugcccuacggggccaacaaggacggcaucaucugggucgcgaccgagggcgcccugaacacccccaaggaccacaucgggacgcggaaccccgccaacaacgccgcgaucgugcuccagcugccgcagggcaccacccugcccaagggguucuacgccgagggcucccgcgggggcucccaggccagcucccggagcuccagccgcucccggaacagcucccgcaacagcacccccggcagcucccgggggacgagccccgcccgcauggccggcaacgggggcgacgcggcccucgcccugcugcuccuggaccggcugaaccagcucgaguccaagaugagcgggaagggccagcagcagcagggccagaccgugaccaagaaguccgccgccgaggcgagcaagaagccgcgccagaagcgcaccgccacgaaggccuacaacgucacccaggccuucgggcggcgcggccccgagcagacccaggggaacuucggcgaccaggagcugauccggcaggggaccgacuacaagcacuggccccagaucgcccaguucgcgcccuccgccagcgccuucuucggcaugucccgcaucggcauggaggugacgccgagcgggaccuggcugaccuacaccggcgccaucaagcucgacgacaaggugcccaacuucaaggaccaggucauccugcugaacaagcacaucgacgccuacaagacguucccgcccaccgagcccaagaaggacaagaagaagaaggcggacgagacccaggcccucccccagcggcagaagaagcagcagaccgugacgcugcugcccgccgccgaccucgacgacuucuccaagcagcugcagcagagcauguccagcgcggacuccacccaggccugaggacuagucccuguucccagagcccacuuuuuuuucuuuuuuugaaauaaaauagccugucuuucagaucucaaaggcucuuuucagagccaccaaaaaaaaaaaaaaaaaaaaaaaaaaaaaaaaaaaaaaaaaaaaaaaaaaaaaaaaaaaaaaaaaaaaaaaaaaaaaaaaaaaaaaaaaaaaaaaaaaaaa

SEQ ID NO: 19429 - RNA, 521 nt, Artificial Sequence
  MERS-CoV/MERS-CoV-Jeddah-human-1__KF958702.1__envelope protein (E) mRNA gc
aggagagucccgcagucggcguccagcggcucugcuuguucgugugugugucguugcaggccuuauucaagcuuaccaugcugcccuucgugcaggagcgcaucggccucuucaucgucaacuucuucaucuucaccguggugugcgccaucacccugcuggucugcauggccuuccucacggcgacccggcugugcgugcagugcaugaccggguucaacacccugcucgugcagcccgcccuguaccuguacaacacgggccgcagcgucuacgugaaguuccaggacuccaagccgccccucccgcccgacgagugggugugaggacuagucccuguucccagagcccacuuuuuuuucuuuuuuugaaauaaaauagccugucuuucagaucucaaaggcucuuuucagagccaccaaaaaaaaaaaaaaaaaaaaaaaaaaaaaaaaaaaaaaaaaaaaaaaaaaaaaaaaaaaaaaaaaaaaaaaaaaaaaaaaaaaaaaaaaaaaaaaaaaaaa

SEQ ID NO: 19430 - RNA, 521 nt, Artificial Sequence; identical to SEQ ID NO: 19429
  MERS-CoV/Al-Hasa_4_2013__KF186564.1__envelope protein (E) mRNA gc

SEQ ID NO: 19431 - RNA, 521 nt, Artificial Sequence; identical to SEQ ID NO: 19429
  MERS-CoV/Riyadh_14_2013__KJ156934.1__envelope protein (E) mRNA gc

SEQ ID NO: 19432 - RNA, 521 nt, Artificial Sequence; identical to SEQ ID NO: 19429
  MERS-CoV/England 1__NC_038294.1__envelope protein (E) mRNA gc

SEQ ID NO: 19433 - RNA, 503 nt, Artificial Sequence
  SARS-CoV/Tor2__NC_004718.3__envelope protein (E) mRNA gc
aggagagucccgcagucggcguccagcggcucugcuuguucgugugugugucguugcaggccuuauucaagcuuaccauguacagcuucguguccgaggagaccggcacccugaucgucaacagcgugcuccuguuccuggccuucguggucuuccuccuggugacgcuggccauccucaccgcgcugcgccugugcgccuacugcugcaacaucgugaacgucucccucgugaagcccaccguguacgucuacagccgggugaagaaccugaacuccagcgagggggugccggaccugcucgucugaggacuagucccuguucccagagcccacuuuuuuuucuuuuuuugaaauaaaauagccugucuuucagaucucaaaggcucuuuucagagccaccaaaaaaaaaaaaaaaaaaaaaaaaaaaaaaaaaaaaaaaaaaaaaaaaaaaaaaaaaaaaaaaaaaaaaaaaaaaaaaaaaaaaaaaaaaaaaaaaaaaaa

SEQ ID NO: 19434 - RNA, 527 nt, Artificial Sequence
  HCoV/OC43__NC_006213.1__envelope protein (E) mRNA gc
aggagagucccgcagucggcguccagcggcucugcuuguucgugugugugucguugcaggccuuauucaagcuuaccauguucauggccgacgccuaccuggcggacaccgugugguacgucggccagaucaucuucaucguggccaucugccuccuggugaccaucgucgugguggccuuccuggccacguucaagcucugcauccagcugugcgggaugugcaacacccugguccucagccccuccaucuacguguucaaccgcggccggcaguucuacgaguucuacaacgacgugaagccgcccguccuggacguggacgacgugugaggacuagucccuguucccagagcccacuuuuuuuucuuuuuuugaaauaaaauagccugucuuucagaucucaaaggcucuuuucagagccaccaaaaaaaaaaaaaaaaaaaaaaaaaaaaaaaaaaaaaaaaaaaaaaaaaaaaaaaaaaaaaaaaaaaaaaaaaaaaaaaaaaaaaaaaaaaaaaaaaaaaa

SEQ ID NO: 19435 - RNA, 521 nt, Artificial Sequence
  HCoV/HKU1__NC_006577.2__envelope protein (E) mRNA gc
aggagagucccgcagucggcguccagcggcucugcuuguucgugugugugucguugcaggccuuauucaagcuuaccaugguggaccuguucuucaacgacaccgccugguacaucggccagauccucgugcuggugcuguucugccucaucagccugaucuucguggucgccuuccuggcgaccaucaagcucugcaugcagcugugcggguucugcaacuucuucaucaucucccccagcgccuacguguacaagcgcggcaugcagcuguacaaguccuacagcgagcaggucaucccgcccacguccgacuaccucaucugaggacuagucccuguucccagagcccacuuuuuuuucuuuuuuugaaauaaaauagccugucuuucagaucucaaaggcucuuuucagagccaccaaaaaaaaaaaaaaaaaaaaaaaaaaaaaaaaaaaaaaaaaaaaaaaaaaaaaaaaaaaaaaaaaaaaaaaaaaaaaaaaaaaaaaaaaaaaaaaaaaaaa

SEQ ID NO: 19436 - RNA, 506 nt, Artificial Sequence
  HCoV/229E/BN1/GER/2015__KU291448.1__envelope protein (E) mRNA gc
aggagagucccgcagucggcguccagcggcucugcuuguucgugugugugucguugcaggccuuauucaagcuuaccauguuccugaagcucguggacgaccacgcccugaucgucaacgugcugaucuggugcgugguccucaucgugauccugcuggugugcaucaccaucaucaagcucaucaagcugugcuucacgugccacauguucugcaaccgcaccgucuacggccccaucaagaacguguaccacaucuaccagagcuacaugcacaucgacccguuccccaagcgggugaucgacuucugaggacuagucccuguucccagagcccacuuuuuuuucuuuuuuugaaauaaaauagccugucuuucagaucucaaaggcucuuuucagagccaccaaaaaaaaaaaaaaaaaaaaaaaaaaaaaaaaaaaaaaaaaaaaaaaaaaaaaaaaaaaaaaaaaaaaaaaaaaaaaaaaaaaaaaaaaaaaaaaaaaaaa

SEQ ID NO: 19437 - RNA, 506 nt, Artificial Sequence
  HCoV/NL63/RPTEC/2004__JX504050.1__envelope protein (E) mRNA gc
aggagagucccgcagucggcguccagcggcucugcuuguucgugugugugucguugcaggccuuauucaagcuuaccauguuccugcgccucaucgacgacaacggcaucgugcugaacagcauccuguggcuccuggucaugaucuucuucuucgugcuggccaugaccuucaucaagcucauccagcugugcuucacgugccacuacuucuucucccggacccuguaccagcccguguacaagaucuuccucgccuaccaggacuacaugcagaucgcgccgguccccgccgaggugcugaacgugugaggacuagucccuguucccagagcccacuuuuuuuucuuuuuuugaaauaaaauagccugucuuucagaucucaaaggcucuuuucagagccaccaaaaaaaaaaaaaaaaaaaaaaaaaaaaaaaaaaaaaaaaaaaaaaaaaaaaaaaaaaaaaaaaaaaaaaaaaaaaaaaaaaaaaaaaaaaaaaaaaaaaa

SEQ ID NO: 19438 - RNA, 503 nt, Artificial Sequence; identical to SEQ ID NO: 19433
  Bat SARS-like CoV/WIV1__KF367457.1__envelope protein (E) mRNA gc

SEQ ID NO: 19439 - RNA, 512 nt, Artificial Sequence
  BatCoV/HKU9-1 BF_005I__NC_009021.1__envelope protein (E) mRNA gc
aggagagucccgcagucggcguccagcggcucugcuuguucgugugugugucguugcaggccuuauucaagcuuaccauguacgacaucgugggcaccaacaacagcauccugaucgccaacguccucgugcugaucaucaucugccugcucguggucaucguggggugcgcccugcugcucauccugcaguucguguucggcgucugcggguucguguucaaguucgugugcaagcccaccauccuggucuacaacaaguuccgcaacgagucccuccugaacgagcgggaggagcugcucugcgacaacgugugaggacuagucccuguucccagagcccacuuuuuuuucuuuuuuugaaauaaaauagccugucuuucagaucucaaaggcucuuuucagagccaccaaaaaaaaaaaaaaaaaaaaaaaaaaaaaaaaaaaaaaaaaaaaaaaaaaaaaaaaaaaaaaaaaaaaaaaaaaaaaaaaaaaaaaaaaaaaaaaaaaaaa

SEQ ID NO: 19440 - RNA, 524 nt, Artificial Sequence
  PDCoV/Swine/Thailand/S5011/2015__KU051641.1__envelope protein (E) mRNA gc
aggagagucccgcagucggcguccagcggcucugcuuguucgugugugugucguugcaggccuuauucaagcuuaccaugguggucgacgacugggccgugaccauccccggccaguacaucaucgccauccugguggucaucugcaucgggguggcgcuccuguucaucaacacgugccuggccugcgugaagcuguucuacaagugcuaccucggcgccgccuaccugguccgcccgaucaucguguacuacagcaagcccaaccccgugcccgaggacgaguucgucaaggugcaccaguucccgcggaacacccacuacgugugaggacuagucccuguucccagagcccacuuuuuuuucuuuuuuugaaauaaaauagccugucuuucagaucucaaaggcucuuuucagagccaccaaaaaaaaaaaaaaaaaaaaaaaaaaaaaaaaaaaaaaaaaaaaaaaaaaaaaaaaaaaaaaaaaaaaaaaaaaaaaaaaaaaaaaaaaaaaaaaaaaaaa

SEQ ID NO: 19441 - RNA, 503 nt, Artificial Sequence
  PEDV/NPL-PEDv/2013/P10__KJ778616.1__envelope protein (E) mRNA gc
aggagagucccgcagucggcguccagcggcucugcuuguucgugugugugucguugcaggccuuauucaagcuuaccaugcugcagcucgugaacgacaacggccuggucgugaacgugauccuguggcuguucguccucuucuuccugcucaucaucagcaucaccuucgugcagcuggugaaccugugcuucacgugccaccgccucugcaacuccgccgucuacacccccaucgggcggcuguaccgcguguacaagagcuacaugcagaucgacccgcugcccuccaccgugaucgacgucugaggacuagucccuguucccagagcccacuuuuuuuucuuuuuuugaaauaaaauagccugucuuucagaucucaaaggcucuuuucagagccaccaaaaaaaaaaaaaaaaaaaaaaaaaaaaaaaaaaaaaaaaaaaaaaaaaaaaaaaaaaaaaaaaaaaaaaaaaaaaaaaaaaaaaaaaaaaaaaaaaaaaa

SEQ ID NO: 19442 - RNA, 524 nt, Artificial Sequence
  MHV/A59__NC_048217.1__envelope protein (E) mRNA gc
aggagagucccgcagucggcguccagcggcucugcuuguucgugugugugucguugcaggccuuauucaagcuuaccauguucaaccuguuccucaccgacaccgugugguacgucggccagaucaucuucaucuucgccgugugccugauggugacgaucaucgucguggccuuccuggcgagcaucaagcucugcauccagcugugcgggcugugcaacacccucgugcugucccccagcaucuaccuguacgaccgcuccaagcagcucuacaaguacuacaacgaggagaugcggcugccgcugcucgaggucgacgacaucugaggacuagucccuguucccagagcccacuuuuuuuucuuuuuuugaaauaaaauagccugucuuucagaucucaaaggcucuuuucagagccaccaaaaaaaaaaaaaaaaaaaaaaaaaaaaaaaaaaaaaaaaaaaaaaaaaaaaaaaaaaaaaaaaaaaaaaaaaaaaaaaaaaaaaaaaaaaaaaaaaaaaa

SEQ ID NO: 19443 - RNA, 500 nt, Artificial Sequence
  SARS-CoV-2/Wuhan-Hu-1__NC_045512.2/MN908947.2/EPI_ISL_402128__env elope protein (E) mRNA gc
aggagagucccgcagucggcguccagcggcucugcuuguucgugugugugucguugcaggccuuauucaagcuuaccauguacagcuucguguccgaggagaccggcacccugaucgucaacagcgugcuccuguuccuggccuucguggucuuccuccuggugacgcuggccauccucaccgcgcugcgccugugcgccuacugcugcaacaucgugaacgucucccucgugaagcccagcuucuacguguacucccgggucaagaaccugaacagcucccgcgugccggaccugcucgugugaggacuagucccuguucccagagcccacuuuuuuuucuuuuuuugaaauaaaauagccugucuuucagaucucaaaggcucuuuucagagccaccaaaaaaaaaaaaaaaaaaaaaaaaaaaaaaaaaaaaaaaaaaaaaaaaaaaaaaaaaaaaaaaaaaaaaaaaaaaaaaaaaaaaaaaaaaaaaaaaaaaaa

SEQ ID NO: 19444 - RNA, 500 nt, Artificial Sequence
  SARS-CoV-2__MT919790.1__envelope protein (E) mRNA gc
aggagagucccgcagucggcguccagcggcucugcuuguucgugugugugucguugcaggccuuauucaagcuuaccauguacagcuucguguccgaggagaccggcacccugaucgucaacagcgugcuccuguucuucgccuucguggucuuccugcucgugacgcuggccauccugaccgcgcuccgccugugcgccuacugcugcaacaucgugaacgucucccuggugaagcccagcuucuacguguacucccgggucaagaaccucaacagcucccgcgugccggaccugcuggugugaggacuagucccuguucccagagcccacuuuuuuuucuuuuuuugaaauaaaauagccugucuuucagaucucaaaggcucuuuucagagccaccaaaaaaaaaaaaaaaaaaaaaaaaaaaaaaaaaaaaaaaaaaaaaaaaaaaaaaaaaaaaaaaaaaaaaaaaaaaaaaaaaaaaaaaaaaaaaaaaaaaaa

SEQ ID NO: 19445 - RNA, 500 nt, Artificial Sequence
  SARS-CoV-2__MT907517.1__envelope protein (E) mRNA gc
aggagagucccgcagucggcguccagcggcucugcuuguucgugugugugucguugcaggccuuauucaagcuuaccauguacagcuucguguccgaggagaccggcacccugaucgucaacagcgugcuccuguuccuggccuucguggucuuccuccuggugacgcuggccauccucaccgcgcugcgccugugcgccuacugcugcaacaucgugaacgucucccucgugaagcccagcuucuacguguacucccgggucaaggaccugaacagcucccgcgugccggaccugcucgugugaggacuagucccuguucccagagcccacuuuuuuuucuuuuuuugaaauaaaauagccugucuuucagaucucaaaggcucuuuucagagccaccaaaaaaaaaaaaaaaaaaaaaaaaaaaaaaaaaaaaaaaaaaaaaaaaaaaaaaaaaaaaaaaaaaaaaaaaaaaaaaaaaaaaaaaaaaaaaaaaaaaaa

SEQ ID NO: 19446 - RNA, 500 nt, Artificial Sequence
  SARS-CoV-2__MT905416.1__envelope protein (E) mRNA gc
aggagagucccgcagucggcguccagcggcucugcuuguucgugugugugucguugcaggccuuauucaagcuuaccauguacagcuucuucuccgaggagaccggcacccugaucgugaacagcguccuccuguuccuggccuucgugguguuccuccuggucacgcuggccauccucaccgcgcugcgccugugcgccuacugcugcaacaucgugaacgugucccucgucaagcccagcuucuacguguacucccgggugaagaaccugaacagcucccgcgucccggaccugcucgugugaggacuagucccuguucccagagcccacuuuuuuuucuuuuuuugaaauaaaauagccugucuuucagaucucaaaggcucuuuucagagccaccaaaaaaaaaaaaaaaaaaaaaaaaaaaaaaaaaaaaaaaaaaaaaaaaaaaaaaaaaaaaaaaaaaaaaaaaaaaaaaaaaaaaaaaaaaaaaaaaaaaaa

SEQ ID NO: 19447 - RNA, 500 nt, Artificial Sequence
  SARS-CoV-2__MT873051.1__envelope protein (E) mRNA gc
aggagagucccgcagucggcguccagcggcucugcuuguucgugugugugucguugcaggccuuauucaagcuuaccauguacagcuucguguccgaggagaccggcacccugaucgucaacagcgugcuccuguuccuggccuucguggucuuccuccuggugacgcuggccauccucaccgcgcugcgccugugcgccuacugcugcaacaucgugaacgucucccucgugaagcccagcuucuacguguacucccgggucaagaaccugaacagcucccgcgugcuggaccuccuggugugaggacuagucccuguucccagagcccacuuuuuuuucuuuuuuugaaauaaaauagccugucuuucagaucucaaaggcucuuuucagagccaccaaaaaaaaaaaaaaaaaaaaaaaaaaaaaaaaaaaaaaaaaaaaaaaaaaaaaaaaaaaaaaaaaaaaaaaaaaaaaaaaaaaaaaaaaaaaaaaaaaaaa

SEQ ID NO: 19448 - RNA, 500 nt, Artificial Sequence
  SARS-CoV-2__MT873111.1__envelope protein (E) mRNA gc
aggagagucccgcagucggcguccagcggcucugcuuguucgugugugugucguugcaggccuuauucaagcuuaccauguacagcuucguguccgaggagaccggcacccugaucgucaacagcgugcuccuguuccuggccuucguggucuuccuccuggugacgcuggccauccucaccgcgcugcgccugugcgccuacugcugcaacaucgugaacgucucccucgugaagcccagcuucuacguguacucccgggucaagaaccugaacagcuuccgcgugccggaccugcucgugugaggacuagucccuguucccagagcccacuuuuuuuucuuuuuuugaaauaaaauagccugucuuucagaucucaaaggcucuuuucagagccaccaaaaaaaaaaaaaaaaaaaaaaaaaaaaaaaaaaaaaaaaaaaaaaaaaaaaaaaaaaaaaaaaaaaaaaaaaaaaaaaaaaaaaaaaaaaaaaaaaaaaa

SEQ ID NO: 19449 - RNA, 500 nt, Artificial Sequence
  SARS-CoV-2__MT873335.1__envelope protein (E) mRNA gc
aggagagucccgcagucggcguccagcggcucugcuuguucgugugugugucguugcaggccuuauucaagcuuaccauguacagcuucguguccgaggagaccggcacccugaucgucaacagcgugcuccuguuccuggccuucguggucuuccuccuggugacgcuggccauccucaccgcgcugcgccugugcgccuacugcugcaacaucgugaacgucuccuucgugaagcccagcuucuacguguacucccgggucaagaaccucaacagcucccgcgugccggaccugcuggugugaggacuagucccuguucccagagcccacuuuuuuuucuuuuuuugaaauaaaauagccugucuuucagaucucaaaggcucuuuucagagccaccaaaaaaaaaaaaaaaaaaaaaaaaaaaaaaaaaaaaaaaaaaaaaaaaaaaaaaaaaaaaaaaaaaaaaaaaaaaaaaaaaaaaaaaaaaaaaaaaaaaaa

SEQ ID NO: 19450 - RNA, 500 nt, Artificial Sequence
  SARS-CoV-2__MT873370.1__envelope protein (E) mRNA gc
aggagagucccgcagucggcguccagcggcucugcuuguucgugugugugucguugcaggccuuauucaagcuuaccauguacagcuucguguccgaggagaccggcacccugaucgucaacagcgugcuccuguuccuggccuucguggucuuccuccuggugacgcuggccauccucaccgcgcugcgccugugcgccuacugcugcaacaucgugaacgucucccucgugaagcccagcuucuacguguacucccgguucaagaaccugaacagcucccgcgucccggaccugcucgugugaggacuagucccuguucccagagcccacuuuuuuuucuuuuuuugaaauaaaauagccugucuuucagaucucaaaggcucuuuucagagccaccaaaaaaaaaaaaaaaaaaaaaaaaaaaaaaaaaaaaaaaaaaaaaaaaaaaaaaaaaaaaaaaaaaaaaaaaaaaaaaaaaaaaaaaaaaaaaaaaaaaaa

SEQ ID NO: 19451 - RNA, 500 nt, Artificial Sequence
  SARS-CoV-2__MT872498.1__envelope protein (E) mRNA gc
aggagagucccgcagucggcguccagcggcucugcuuguucgugugugugucguugcaggccuuauucaagcuuaccauguacagcuucguguccgaggagaccggcacccugaucgucaacagcguccucuucuuccuggccuucgugguguuccugcucgugacgcuggccauccugaccgcgcuccgccugugcgccuacugcugcaacaucgugaacgucucccuggugaagcccagcuucuacguguacucccgguucaagaaccucaacagcucccgcgucccggaccugcuggugugaggacuagucccuguucccagagcccacuuuuuuuucuuuuuuugaaauaaaauagccugucuuucagaucucaaaggcucuuuucagagccaccaaaaaaaaaaaaaaaaaaaaaaaaaaaaaaaaaaaaaaaaaaaaaaaaaaaaaaaaaaaaaaaaaaaaaaaaaaaaaaaaaaaaaaaaaaaaaaaaaaaaa

SEQ ID NO: 19452 - RNA, 500 nt, Artificial Sequence
  SARS-CoV-2__MT846585.1__envelope protein (E) mRNA gc
aggagagucccgcagucggcguccagcggcucugcuuguucgugugugugucguugcaggccuuauucaagcuuaccauguacagcuucaucuccgaggagaccggcacccugaucgugaacagcguccuccuguuccuggccuucgugguguuccuccuggucacgcuggccauccucaccgcgcugcgccugugcgccuacugcugcaacaucgugaacgugucccucgucaagcccagcuucuacguguacucccgggugaagaaccugaacagcucccgcgucccggaccugcucgugugaggacuagucccuguucccagagcccacuuuuuuuucuuuuuuugaaauaaaauagccugucuuucagaucucaaaggcucuuuucagagccaccaaaaaaaaaaaaaaaaaaaaaaaaaaaaaaaaaaaaaaaaaaaaaaaaaaaaaaaaaaaaaaaaaaaaaaaaaaaaaaaaaaaaaaaaaaaaaaaaaaaaa

SEQ ID NO: 19453 - RNA, 500 nt, Artificial Sequence
  SARS-CoV-2__MT835383.1__envelope protein (E) mRNA gc
aggagagucccgcagucggcguccagcggcucugcuuguucgugugugugucguugcaggccuuauucaagcuuaccauguacagcuucgccuccgaggagaccggcacccugaucgugaacagcguccuccuguuccuggccuucgugguguuccuccuggucacgcuggcgauccucaccgcccugcgccugugcgccuacugcugcaacaucgugaacgugucccucgucaagcccagcuucuacguguacucccgggugaagaaccugaacagcucccgcgucccggaccugcucgugugaggacuagucccuguucccagagcccacuuuuuuuucuuuuuuugaaauaaaauagccugucuuucagaucucaaaggcucuuuucagagccaccaaaaaaaaaaaaaaaaaaaaaaaaaaaaaaaaaaaaaaaaaaaaaaaaaaaaaaaaaaaaaaaaaaaaaaaaaaaaaaaaaaaaaaaaaaaaaaaaaaaaa

SEQ ID NO: 19454 - RNA, 500 nt, Artificial Sequence
  SARS-CoV-2__MT833965.1__envelope protein (E) mRNA gc
aggagagucccgcagucggcguccagcggcucugcuuguucgugugugugucguugcaggccuuauucaagcuuaccauguacagcuucguguccgaggagaccggcacccugaucgucaacagcgugcuccuguuccuggccuucguggucuuccuccuggugauccuggccauccucacggcgcugcgccugugcgccuacugcugcaacaucgugaacgucucccucgugaagcccagcuucuacguguacucccgggucaagaaccugaacagcucccgcgugccggaccugcucgugugaggacuagucccuguucccagagcccacuuuuuuuucuuuuuuugaaauaaaauagccugucuuucagaucucaaaggcucuuuucagagccaccaaaaaaaaaaaaaaaaaaaaaaaaaaaaaaaaaaaaaaaaaaaaaaaaaaaaaaaaaaaaaaaaaaaaaaaaaaaaaaaaaaaaaaaaaaaaaaaaaaaaa

SEQ ID NO: 19455 - RNA, 500 nt, Artificial Sequence
  SARS-CoV-2__MT834224.1__envelope protein (E) mRNA gc
aggagagucccgcagucggcguccagcggcucugcuuguucgugugugugucguugcaggccuuauucaagcuuaccauguacagcuucguguccgaggagaccggcacccugaucgucaacagcgugcuccuguuccuggccuucguggucuuccuccuggugacgcuggccauccucaccgcgcugcgccugugcgccuacugcugcaacaucgugaacgucucccucgugaagcccagcuucuacguguacucccgggucaagaaccugaacagcucccgcgugagcgaccugcucgugugaggacuagucccuguucccagagcccacuuuuuuuucuuuuuuugaaauaaaauagccugucuuucagaucucaaaggcucuuuucagagccaccaaaaaaaaaaaaaaaaaaaaaaaaaaaaaaaaaaaaaaaaaaaaaaaaaaaaaaaaaaaaaaaaaaaaaaaaaaaaaaaaaaaaaaaaaaaaaaaaaaaaa

SEQ ID NO: 19456 - RNA, 500 nt, Artificial Sequence
  SARS-CoV-2__MT704816.1__envelope protein (E) mRNA gc
aggagagucccgcagucggcguccagcggcucugcuuguucgugugugugucguugcaggccuuauucaagcuuaccauguacagcuucguguccgaggagaccggcacccugaucgucaacagcgugcuccuguuccuggccuucguggucuuccuccuggugacgcuggccauccucaccgcgcugcgccugugcgccuacuucugcaacaucgugaacgucucccucgugaagcccagcuucuacguguacucccgggucaagaaccugaacagcucccgcgugccggaccugcucgugugaggacuagucccuguucccagagcccacuuuuuuuucuuuuuuugaaauaaaauagccugucuuucagaucucaaaggcucuuuucagagccaccaaaaaaaaaaaaaaaaaaaaaaaaaaaaaaaaaaaaaaaaaaaaaaaaaaaaaaaaaaaaaaaaaaaaaaaaaaaaaaaaaaaaaaaaaaaaaaaaaaaaa

SEQ ID NO: 19457 - RNA, 500 nt, Artificial Sequence
  SARS-CoV-2__MT827831.1__envelope protein (E) mRNA gc
aggagagucccgcagucggcguccagcggcucugcuuguucgugugugugucguugcaggccuuauucaagcuuaccauguacagcuucguguccgaggagaucggcacccugaucgucaacagcgugcuccuguuccuggccuucguggucuuccuccuggugacccuggccauccucacggcgcugcgccugugcgccuacugcugcaacaucgugaacgucucccucgugaagcccagcuucuacguguacucccgggucaagaaccugaacagcucccgcgugccggaccugcucgugugaggacuagucccuguucccagagcccacuuuuuuuucuuuuuuugaaauaaaauagccugucuuucagaucucaaaggcucuuuucagagccaccaaaaaaaaaaaaaaaaaaaaaaaaaaaaaaaaaaaaaaaaaaaaaaaaaaaaaaaaaaaaaaaaaaaaaaaaaaaaaaaaaaaaaaaaaaaaaaaaaaaaa

SEQ ID NO: 19458 - RNA, 500 nt, Artificial Sequence
  SARS-CoV-2__MT825091.1__envelope protein (E) mRNA gc
aggagagucccgcagucggcguccagcggcucugcuuguucgugugugugucguugcaggccuuauucaagcuuaccauguacagcuucguguccgaggagaccggcacccugaucgucaacagcgugcuccuguuccuggccuucguggucuuccuccuggugacgcuggccacccucaccgcgcugcgccugugcgccuacugcugcaacaucgugaacgucucccucgugaagcccagcuucuacguguacucccgggucaagaaccugaacagcucccgcgugccggaccugcucgugugaggacuagucccuguucccagagcccacuuuuuuuucuuuuuuugaaauaaaauagccugucuuucagaucucaaaggcucuuuucagagccaccaaaaaaaaaaaaaaaaaaaaaaaaaaaaaaaaaaaaaaaaaaaaaaaaaaaaaaaaaaaaaaaaaaaaaaaaaaaaaaaaaaaaaaaaaaaaaaaaaaaaa

SEQ ID NO: 19459 - RNA, 500 nt, Artificial Sequence
  SARS-CoV-2__MT821604.1__envelope protein (E) mRNA gc
aggagagucccgcagucggcguccagcggcucugcuuguucgugugugugucguugcaggccuuauucaagcuuaccauguacagcuucguguccgaggagaccggcacccugaucgucaacagcgugcuccuguuccuggccuucguggucuuccuccuggugacgcuggccauccucaccgcgcugcgccugugcguguacugcugcaacaucgucaacgugucccucgugaagcccagcuucuacgucuacucccgggugaagaaccugaacagcucccgcgugccggaccugcucgucugaggacuagucccuguucccagagcccacuuuuuuuucuuuuuuugaaauaaaauagccugucuuucagaucucaaaggcucuuuucagagccaccaaaaaaaaaaaaaaaaaaaaaaaaaaaaaaaaaaaaaaaaaaaaaaaaaaaaaaaaaaaaaaaaaaaaaaaaaaaaaaaaaaaaaaaaaaaaaaaaaaaaa

SEQ ID NO: 19460 - RNA, 500 nt, Artificial Sequence
  SARS-CoV-2__MT810623.1__envelope protein (E) mRNA gc
aggagagucccgcagucggcguccagcggcucugcuuguucgugugugugucguugcaggccuuauucaagcuuaccauguacagcuucguguccgaggacaccggcacccugaucgucaacagcgugcuccuguuccuggccuucguggucuuccuccuggugacgcuggccauccucaccgcgcugcgccugugcgccuacugcugcaacaucgugaacgucucccucgugaagcccagcuucuacguguacucccgggucaagaaccugaacagcucccgcgugccggaccugcucgugugaggacuagucccuguucccagagcccacuuuuuuuucuuuuuuugaaauaaaauagccugucuuucagaucucaaaggcucuuuucagagccaccaaaaaaaaaaaaaaaaaaaaaaaaaaaaaaaaaaaaaaaaaaaaaaaaaaaaaaaaaaaaaaaaaaaaaaaaaaaaaaaaaaaaaaaaaaaaaaaaaaaaa

SEQ ID NO: 19461 - RNA, 500 nt, Artificial Sequence
  SARS-CoV-2__MT811741.1__envelope protein (E) mRNA gc
aggagagucccgcagucggcguccagcggcucugcuuguucgugugugugucguugcaggccuuauucaagcuuaccauguacagcuucguguccgaggagaccggcacccugaucgucaacagcgugcuccuguuccuggccuucgugguccuccugcuggugacgcucgccauccugaccgcgcugcgccucugcgccuacugcugcaacaucgugaacgucucccuggugaagcccagcuucuacguguacucccgggucaagaaccugaacagcucccgcgugccggaccuccuggugugaggacuagucccuguucccagagcccacuuuuuuuucuuuuuuugaaauaaaauagccugucuuucagaucucaaaggcucuuuucagagccaccaaaaaaaaaaaaaaaaaaaaaaaaaaaaaaaaaaaaaaaaaaaaaaaaaaaaaaaaaaaaaaaaaaaaaaaaaaaaaaaaaaaaaaaaaaaaaaaaaaaaa

SEQ ID NO: 19462 - RNA, 500 nt, Artificial Sequence
  SARS-CoV-2__MT666099.1__envelope protein (E) mRNA gc
aggagagucccgcagucggcguccagcggcucugcuuguucgugugugugucguugcaggccuuauucaagcuuaccauguacagcuucguguccgaggagaccggcacccugaucgucaacagcgugcuccugcugcucgccuucguggucuuccugcuggugacgcucgccauccugaccgcgcugcgccucugcgccuacugcugcaacaucgugaacgucucccuggugaagcccagcuucuacguguacucccgggucaagaaccugaacagcucccgcgugccggaccuccuggugugaggacuagucccuguucccagagcccacuuuuuuuucuuuuuuugaaauaaaauagccugucuuucagaucucaaaggcucuuuucagagccaccaaaaaaaaaaaaaaaaaaaaaaaaaaaaaaaaaaaaaaaaaaaaaaaaaaaaaaaaaaaaaaaaaaaaaaaaaaaaaaaaaaaaaaaaaaaaaaaaaaaaa

SEQ ID NO: 19463 - RNA, 500 nt, Artificial Sequence
  SARS-CoV-2__MT627619.1__envelope protein (E) mRNA gc
aggagagucccgcagucggcguccagcggcucugcuuguucgugugugugucguugcaggccuuauucaagcuuaccauguacagcuucguguccgaggagaccggcacccugaucgucaacagcgugcuccuguuccuggccuucguggucuuccuccuggugacgcuggccauccucaccgcgcugcgccugugcuccuacugcugcaacaucgugaacgucagccucgugaagcccuccuucuacguguacagccgggucaagaaccugaacuccagccgcgugccggaccugcucgugugaggacuagucccuguucccagagcccacuuuuuuuucuuuuuuugaaauaaaauagccugucuuucagaucucaaaggcucuuuucagagccaccaaaaaaaaaaaaaaaaaaaaaaaaaaaaaaaaaaaaaaaaaaaaaaaaaaaaaaaaaaaaaaaaaaaaaaaaaaaaaaaaaaaaaaaaaaaaaaaaaaaaa

SEQ ID NO: 19464 - RNA, 500 nt, Artificial Sequence
  SARS-CoV-2__MT630422.1__envelope protein (E) mRNA gc
aggagagucccgcagucggcguccagcggcucugcuuguucgugugugugucguugcaggccuuauucaagcuuaccauguacagcuucguguccgaggagaccggcacccugaucgucaacagcguccucuucuuccuggccuucgugguguuccugcucgugacgcuggccauccugaccgcgcuccgccugugcgccuacugcugcaacaucgugaacgucucccuggugaagcccagcuucuacguguacucccgggucaagaaccucaacagcucccgcgugccggaccugcuggugugaggacuagucccuguucccagagcccacuuuuuuuucuuuuuuugaaauaaaauagccugucuuucagaucucaaaggcucuuuucagagccaccaaaaaaaaaaaaaaaaaaaaaaaaaaaaaaaaaaaaaaaaaaaaaaaaaaaaaaaaaaaaaaaaaaaaaaaaaaaaaaaaaaaaaaaaaaaaaaaaaaaaa

SEQ ID NO: 19465 - RNA, 500 nt, Artificial Sequence
  SARS-CoV-2__MT632491.1__envelope protein (E) mRNA gc
aggagagucccgcagucggcguccagcggcucugcuuguucgugugugugucguugcaggccuuauucaagcuuaccauguacagcuucgugucccaggagaccggcacccugaucgucaacagcgugcuccuguuccuggccuucguggucuuccuccuggugacgcuggccauccucaccgcgcugcgccugugcgccuacugcugcaacaucgugaacgucucccucgugaagcccagcuucuacguguacucccgggucaagaaccugaacagcucccgcgugccggaccugcucgugugaggacuagucccuguucccagagcccacuuuuuuuucuuuuuuugaaauaaaauagccugucuuucagaucucaaaggcucuuuucagagccaccaaaaaaaaaaaaaaaaaaaaaaaaaaaaaaaaaaaaaaaaaaaaaaaaaaaaaaaaaaaaaaaaaaaaaaaaaaaaaaaaaaaaaaaaaaaaaaaaaaaaa

SEQ ID NO: 19466 - RNA, 500 nt, Artificial Sequence
  SARS-CoV-2__MT632864.1__envelope protein (E) mRNA gc
aggagagucccgcagucggcguccagcggcucugcuuguucgugugugugucguugcaggccuuauucaagcuuaccauguacagcuucguguccgaggagaccggcacccugaucgucaacagcgugcuccuguuccuggccuucguggucuuccuccuggugacgcuggccauccucaccgcgcugcgccugugcgccuacugcugcaacaucgugaacgucucccucgugaagcccuucuucuacguguacagccgggucaagaaccugaacuccagccgcgugccggaccugcucgugugaggacuagucccuguucccagagcccacuuuuuuuucuuuuuuugaaauaaaauagccugucuuucagaucucaaaggcucuuuucagagccaccaaaaaaaaaaaaaaaaaaaaaaaaaaaaaaaaaaaaaaaaaaaaaaaaaaaaaaaaaaaaaaaaaaaaaaaaaaaaaaaaaaaaaaaaaaaaaaaaaaaaa

SEQ ID NO: 19467 - RNA, 500 nt, Artificial Sequence
  SARS-CoV-2__MT598173.1__envelope protein (E) mRNA gc
aggagagucccgcagucggcguccagcggcucugcuuguucgugugugugucguugcaggccuuauucaagcuuaccauguacagcuucguguccgagaagaccggcacccugaucgucaacagcgugcuccuguuccuggccuucguggucuuccuccuggugacgcuggccauccucaccgcgcugcgccugugcgccuacugcugcaacaucgugaacgucucccucgugaagcccagcuucuacguguacucccgggucaagaaccugaacagcucccgcgugccggaccugcucgugugaggacuagucccuguucccagagcccacuuuuuuuucuuuuuuugaaauaaaauagccugucuuucagaucucaaaggcucuuuucagagccaccaaaaaaaaaaaaaaaaaaaaaaaaaaaaaaaaaaaaaaaaaaaaaaaaaaaaaaaaaaaaaaaaaaaaaaaaaaaaaaaaaaaaaaaaaaaaaaaaaaaaa

SEQ ID NO: 19468 - RNA, 500 nt, Artificial Sequence
  SARS-CoV-2__MT568636.1__envelope protein (E) mRNA gc
aggagagucccgcagucggcguccagcggcucugcuuguucgugugugugucguugcaggccuuauucaagcuuaccauguacagcuucguguccgaggagaccggcacccugaucgucaacagcgugcuccuguuccuggccuucguggucuuccuccuggugacgcuggccauccucaccgcgcugcgccugugcgccuacugcugcaacaucgugaacgucucccucgugaagcccagcuucuacguguacucccgggucaagaaccugaacagcucccgcgugccguaccugcucgugugaggacuagucccuguucccagagcccacuuuuuuuucuuuuuuugaaauaaaauagccugucuuucagaucucaaaggcucuuuucagagccaccaaaaaaaaaaaaaaaaaaaaaaaaaaaaaaaaaaaaaaaaaaaaaaaaaaaaaaaaaaaaaaaaaaaaaaaaaaaaaaaaaaaaaaaaaaaaaaaaaaaaa

SEQ ID NO: 19469 - RNA, 500 nt, Artificial Sequence
  SARS-CoV-2__MT568638.1__envelope protein (E) mRNA gc
aggagagucccgcagucggcguccagcggcucugcuuguucgugugugugucguugcaggccuuauucaagcuuaccauguacagcuucguguccgaggagaccggcacccugaucgucaacagcgugcuccuguuccuggccuucguggucuuccuccuggugacgcuggccauccucaccgcgcugcgccugugcgccuacugcugcaacaucgugaacgucucccucgugaagcccagcuucuacguguacucccgggucaagaaccugaacagcugccgcgugccggaccugcucgugugaggacuagucccuguucccagagcccacuuuuuuuucuuuuuuugaaauaaaauagccugucuuucagaucucaaaggcucuuuucagagccaccaaaaaaaaaaaaaaaaaaaaaaaaaaaaaaaaaaaaaaaaaaaaaaaaaaaaaaaaaaaaaaaaaaaaaaaaaaaaaaaaaaaaaaaaaaaaaaaaaaaaa

SEQ ID NO: 19470 - RNA, 500 nt, Artificial Sequence
  SARS-CoV-2__MT459833.1__envelope protein (E) mRNA gc
aggagagucccgcagucggcguccagcggcucugcuuguucgugugugugucguugcaggccuuauucaagcuuaccauguacagcuucguguccgaggagaccggcacccugaucgucaacagcgugcuccuguuccuggccuucguggucuuccuccuggugacgcuggccauccucaccgcgcugcgcaugugcgccuacugcugcaacaucgugaacgucucccuggugaagcccagcuucuacguguacucccgggucaagaaccucaacagcucccgcgugccggaccugcuggugugaggacuagucccuguucccagagcccacuuuuuuuucuuuuuuugaaauaaaauagccugucuuucagaucucaaaggcucuuuucagagccaccaaaaaaaaaaaaaaaaaaaaaaaaaaaaaaaaaaaaaaaaaaaaaaaaaaaaaaaaaaaaaaaaaaaaaaaaaaaaaaaaaaaaaaaaaaaaaaaaaaaaa

SEQ ID NO: 19471 - RNA, 500 nt, Artificial Sequence
  SARS-CoV-2__MT451171.1__envelope protein (E) mRNA gc
aggagagucccgcagucggcguccagcggcucugcuuguucgugugugugucguugcaggccuuauucaagcuuaccauguacagcuucguguccgaggagaccggcacccugaucgucaacagcgugcuccuguuccuggccuucguggucuuccuccuggugacgcuggccauccucaccgcgcugcgccugugcgccuacugcugcaacaucgugaacgucucccucgugaagcccagcuucuacguguacucccgggucaagaaccugaacagcucccgcgugccggacuuccuggugugaggacuagucccuguucccagagcccacuuuuuuuucuuuuuuugaaauaaaauagccugucuuucagaucucaaaggcucuuuucagagccaccaaaaaaaaaaaaaaaaaaaaaaaaaaaaaaaaaaaaaaaaaaaaaaaaaaaaaaaaaaaaaaaaaaaaaaaaaaaaaaaaaaaaaaaaaaaaaaaaaaaaa

SEQ ID NO: 19472 - RNA, 500 nt, Artificial Sequence
  SARS-CoV-2__MT350246.1__envelope protein (E) mRNA gc
aggagagucccgcagucggcguccagcggcucugcuuguucgugugugugucguugcaggccuuauucaagcuuaccauguacagcuucguguccgaggagaccggcacccugaucgucaacagcgugcuccuguuccuggccuucguggucuuccuccuggugacgcuggccauccucaccgugcugcgccugugcgcguacugcugcaacaucgucaacgugucccucgugaagcccagcuucuacgucuacucccgggugaagaaccugaacagcucccgcgugccggaccugcucgucugaggacuagucccuguucccagagcccacuuuuuuuucuuuuuuugaaauaaaauagccugucuuucagaucucaaaggcucuuuucagagccaccaaaaaaaaaaaaaaaaaaaaaaaaaaaaaaaaaaaaaaaaaaaaaaaaaaaaaaaaaaaaaaaaaaaaaaaaaaaaaaaaaaaaaaaaaaaaaaaaaaaaa

SEQ ID NO: 19473 - RNA, 500 nt, Artificial Sequence
  SARS-CoV-2__MT039890.1__envelope protein (E) mRNA gc
aggagagucccgcagucggcguccagcggcucugcuuguucgugugugugucguugcaggccuuauucaagcuuaccauguacagcuucguguccgaggagaccggcacccugaucgucaacagcgugcuccuguuccuggccuucguggucuuccuccuggugacgcuggccauccucaccgcgcaccgccugugcgccuacugcugcaacaucgugaacgucucccuggugaagcccagcuucuacguguacucccgggucaagaaccucaacagcucccgcgugccggaccugcuggugugaggacuagucccuguucccagagcccacuuuuuuuucuuuuuuugaaauaaaauagccugucuuucagaucucaaaggcucuuuucagagccaccaaaaaaaaaaaaaaaaaaaaaaaaaaaaaaaaaaaaaaaaaaaaaaaaaaaaaaaaaaaaaaaaaaaaaaaaaaaaaaaaaaaaaaaaaaaaaaaaaaaaa

SEQ ID NO: 19474 - RNA, 5939 nt, Artificial Sequence
  MERS-CoV/MERS-CoV-Jeddah-human-1__KF958702.1__non-structural protein 3 (NSP3) mRNA gc
aggagagucccgcagucggcguccagcggcucugcuuguucgugugugugucguugcaggccuuauucaagcuuaccauggcccccgugaagaagguggccuucggcggggaccaggugcacgagguggcggccguccgcagcgugaccguggaguacaacauccacgccguccuggacacccuccuggccuccagcucccugcggacguucgugguggacaagagccucuccaucgaggaguucgccgacgucgugaaggagcaggucagcgaccugcuggugaagcuccugcgcggcaugccgauccccgacuucgaccuggacgacuucaucgacgcgcccugcuacugcuucaacgccgagggggacgccuccuggagcuccaccaugaucuucagccuccaccccguggagugcgacgaggagugcuccgagguggaggccagcgaccuggaggagggcgaguccgagugcaucagcgagaccuccaccgagcaggucgacgugagccacgagaucuccgacgacgagugggcggccgccguggacgaggccuucccgcuggacgaggccgaggacgucacggagagcgugcaggaggaggcgcagcccguggagguccccguggaggacaucgugcaggucgugaucgccgacacccuccaggagacccccgucguguccgacaccguggaggucccgccccagguggugaagcugcccagcgagccccagacgauccagccggaggucaaggagguggcccccguguacgaggccgacaccgagcagacccagagcgucaccgugaagcccaagcggcugcgcaagaagcggaacguggacccccucuccaacuucgagcacaaggucaucacggagugcgugaccaucgugcugggggacgccauccaggucgcgaagugcuacggcgagagcgugcuggugaacgccgccaacacccaccucaagcacggcgggggcaucgccggggccaucaacgcggccuccaagggcgccguccagaaggagagcgacgaguacauccuggccaaggggccgcuccaggugggcgacuccgugcugcugcagggccacagccuggccaagaacauccuccacgucguggggcccgacgcgcgcgccaagcaggacgugucccugcugagcaagugcuacaaggccaugaacgccuacccccucgucgugacgccccugguguccgcgggcaucuucggggucaagccggccgugagcuucgacuaccugauccgggaggccaagacccgcgugcucgucguggugaacucccaggacgucuacaagagccugaccaucguggacaucccccagucccugaccuucagcuacgacggccuccggggcgccauccgcaaggccaaggacuacggguucaccguguucgucugcacggacaacuccgcgaacaccaaggugcugcggaacaagggcguggacuacaccaagaaguuccugaccgucgacggggugcaguacuacugcuacacgagcaaggacacccucgacgacauccugcagcaggccaacaaguccgugggcaucaucagcaugccccugggguacgucucccacggccucgaccugauccaggccggcagcguggugcgccgggucaacgugcccuacgugugccugcucgccaacaaggagcaggaggccauccugaugagcgaggacgucaagcugaacccguccgaggacuucaucaagcacgugcgcaccaacgggggcuacaacagcuggcaccucguggagggggagcugcugguccaggaccugcggcucaacaagcugcugcacugguccgaccagaccaucugcuacaaggacagcguguucuacgucgugaagaacuccacggcguuccccuucgagacccucagcgccugccgcgccuaccuggacucccggaccacccagcagcugacgaucgaggugcucgucaccguggacggcgugaacuuccgcaccgucgugcugaacaacaagaacaccuaccggagccagcuggggugcguguucuucaacggcgccgacaucuccgacacgauccccgacgagaagcagaacggccacagccucuaccuggccgacaaccugaccgcggacgagaccaaggcccucaaggagcuguacgggcccgucgacccgaccuuccugcaccgcuucuacucccucaaggccgccgugcacgaguggaagaugguggucugcgacaaggugcggagccugaagcuguccgacaacaacugcuaccucaacgcggugaucaugacccuggaccugcucaaggacaucaaguucgucauccccgcccugcagcacgccuucaugaagcacaagggcggggacagcacggacuucaucgcccugaucauggccuacggcaacugcaccuucggggcgcccgacgacgccucccgccuccugcacaccgugcuggccaaggccgagcucugcugcagcgcccgcaugguguggcgggaguggugcaacgucugcggcaucaaggacguggugcugcagggccugaaggcgugcugcuacgucggggugcagaccguggaggaccuccgcgcccggaugacguacgucugccagugcggcggggagcgccaccggcagaucguggagcacaccaccccguggcugcugcucuccggcacccccaacgagaagcuggugacgaccagcaccgcccccgacuucgucgccuucaacguguuccagggcaucgagaccgccguggggcacuacguccacgcgcgccugaagggcgggcucauccugaaguucgacagcggcacgguguccaagaccagcgacuggaagugcaaggugaccgacguccuguuccccgggcagaaguacuccagcgacugcaacguggugcgguacucccucgacggcaacuuccgcaccgaggucgacccggaccugagcgccuucuacgugaaggacggcaaguacuucacguccgagccgcccgugaccuacagccccgccaccauccuggccggguccgucuacaccaacagcugccucguguccagcgacggccagcccgggggcgacgcgaucucccugagcuucaacaaccugcucggguucgacuccagcaagcccgugaucaagaaguacacguacuccuuccugcccaaggaggacggcgacguccugcucgccgaguucgacaccuacgaccccaucuacaagaacggcgccauguacaaggggaagccgauccugugggugaacaaggccagcuacgacaccaaccugaacaaguucaaccgggccucccuccgccagaucuucgacguggcgcccaucgagcuggagaacaaguucacgccccugagcgucgagagcacccccguggagccgcccaccguggacgucguggcccuccagcaggagaugaccaucgugaagugcaagggccugaacaagcccuucgucaaggacaacguguccuucgucgccgacgacagcgggacccccgugguggaguaccuguccaaggaggaccuccacacgcuguacgucgacccgaaguaccaggugaucgugcugaaggacaacguccucagcuucaugcugcggcugcacaccguggaguccggcgacaucaacguggucgccgccagcgggucccucacccgcaaggugaagcugcuguuccgggcgagcuucuacuucaaggaguucgccacccgcacguucaccgccaccaccgccgugggcuccugcaucaagagcgucgugcggcaccucggcgugacgaaggggauccugaccggcugcuucuccuucgucaagaugcuguucaugcucccccuggccuacuucagcgacuccaagcuggggaccaccgaggugaaggugagcgcgcucaagaccgccggcgucgugacggggaacguggucaagcagugcugcaccgccgccguggaccuguccauggacaagcugcgccggguggacuggaaguccacccuccgccugcugcucaugcugugcaccacgaugguccugcucagcagcguguaccaccuguacguguucaaccagguccuguccagcgacgugauguucgaggacgcccagggccucaagaaguucuacaaggaggugcgggcguaccugggcaucagcuccgccugcgacgggcuggccagcgccuaccgcgcgaacuccuucgacguccccaccuucugcgccaaccgcagcgccaugugcaacuggugccucaucucccaggacagcaucacccacuaccccgcccugaagauggugcagacccaccugucccacuacgugcucaacaucgacuggcugugguucgccuucgagacgggccuggcguacaugcucuacaccagcgccuucaacuggcugcugcucgccgggacccugcacuacuucuucgcccagaccuccaucuucgucgacuggcggagcuacaacuacgccguguccagcgcguucuggcuguucacgcacaucccgauggccggccuggugcgcauguacaaccuccuggccugccuguggcuccugcggaaguucuaccagcacgucaucaacggcugcaaggacaccgccugccugcucugcuacaagcgcaaccggcugacccgcguggaggccuccaccguggucugcgggggcaagcggacguucuacaucaccgcgaacgggggcaucagcuucugccgccggcacaacuggaacugcguggacugcgacaccgccggggugggcaacaccuucaucugcgaggaggucgccaacgaccugacgaccgcccuccgccggcccaucaacgcgaccgaccgcucccacuacuacguggacagcgugaccgucaaggagacgguggugcaguucaacuaccggcgcgacggccagcccuucuacgagcgguucccgcugugcgccuucaccaaccuggacaagcucaaguucaaggaggucugcaagaccaccacggggauccccgaguacaacuucaucaucuacgacuccagcgaccgcggccaggagucccuggcccggagcgccugcguguacuacagccaggugcugugcaaguccauccuccuggucgacagcucccuggugaccagcgucggggacuccagcgagaucgccaccaagauguucgacuccuucgugaacagcuucgugucccucuacaacgucacccgcgacaagcuggagaagcugaucagcacggcgcgggacggcgugcgccgcggggacaacuuccacuccgugcucaccaccuucaucgacgccgcccggggccccgccggcgucgagagcgacguggagaccaacgagaucguggacuccguccaguacgcccacaagcacgacauccagaucacgaacgagagcuacaacaacuacgugcccuccuacgugaagccggacagcgucuccaccagcgaccuggggucccugaucgacugcaacgcggccagcgugaaccagaucgugcuccgcaacagcaacggcgccugcaucuggaacgccgccgcguacaugaagcuguccgacgcccugaagcggcagauccgcaucgccugccggaagugcaaccucgccuuccgccugaccaccagcaagcugcgggcgaacgacaacauccucuccguccgcuucacggccaacaagaucgucgggggcugaggacuagucccuguucccagagcccacuuuuuuuucuuuuuuugaaauaaaauagccugucuuucagaucucaaaggcucuuuucagagccaccaaaaaaaaaaaaaaaaaaaaaaaaaaaaaaaaaaaaaaaaaaaaaaaaaaaaaaaaaaaaaaaaaaaaaaaaaaaaaaaaaaaaaaaaaaaaaaaaaaaaa

SEQ ID NO: 19475 - RNA, 5939 nt, Artificial Sequence
  MERS-CoV/Al-Hasa_4_2013__KF186564.1__non-structural protein 3 (NSP3) mRNA gc
aggagagucccgcagucggcguccagcggcucugcuuguucgugugugugucguugcaggccuuauucaagcuuaccauggcccccgugaagaaggucgccuucggcggggaccaggugcacgagguggcggccguccgcagcgugaccguggaguacaacauccacgccguccuggacacccuccuggccuccagcucccugcggacguucgugguggacaagagccucuccaucgaggaguucgccgacgucgugaaggagcaggucagcgaccugcuggugaagcuccugcgcggcaugccgauccccgacuucgaccuggacgacuucaucgacgcgcccugcuacugcuucaacgccgagggggacgccuccuggagcuccaccaugaucuucagccuccaccccguggagugcgacgaggagugcuccgagguggaggccagcgaccuggaggagggcgaguccgagugcaucagcgagaccuccaccgagcaggucgacgugagccacgagguguccgacgacgagugggcggccgccgucgacgaggccuucccgcuggacgaggccgaggacgugacggagagcgugcaggaggaggcgcagcccgucgaggugcccguggaggacaucgcccaggucgugaucgccgacacccuccaggagacccccgucguguccgacaccguggaggucccgccccagguggugaagcugcccagcgagccccagacgauccagccggaggucaaggagguggcccccguguacgaggccgacaccgagcagacccagagcgucaccgugaagcccaagcggcugcgcaagaagcggaacguggacccccucuccaacuucgagcacaaggucaucacggagugcgugaccaucgugcugggggacgcgauccaggucgccaagugcuacggcgagagcgugcuggugaacgccgccaacacccaccucaagcacggcgggggcaucgccggggcgaucaacgccgccuccaagggcgccguccagaaggagagcgacgaguacauccuggccaaggggccgcuccaggugggcgacuccgugcugcugcagggccacagccuggcgaagaacauccuccacgucguggggcccgacgcccgcgccaagcaggacgugucccugcugagcaagugcuacaaggccaugaacgcguacccccucgucgugacgccccugguguccgccggcaucuucggggucaagccggccgugagcuucgacuaccugauccgggaggccaagacccgcgugcucgucguggugaacucccaggacgucuacaagagccugaccaucguggacaucccccagucccugaccuucagcuacgacggccuccggggcgccauccgcaaggcgaaggacuacggguucaccguguucgucugcacggacaacuccgccaacaccaaggugcugcggaacaagggcguggacuacaccaagaaguuccugaccgucgacggggugcaguacuacugcuacacgagcaaggacacccucgacgacauccugcagcaggccaacaaguccgugggcaucaucagcaugccccugggguacgucucccacggccucgaccugauccaggccggcagcguggugcgccgggucaacgugcccuacgugugccugcucgccaacaaggagcaggaggcgauccugaugagcgaggacgucaagcugaacccguccgaggacuucaucaagcacgugcgcaccaacgggggcuacaacagcuggcaccucguggagggggagcugcugguccaggaccugcggcucaacaagcugcugcacugguccgaccagaccaucugcuacaaggacagcguguucuacgucgugaagaacuccacggccuuccccuucgagacccucagcgccugccgcgccuaccuggacucccggaccacccagcagcugacgaucgaggugcucgucaccguggacggcgugaacuuccgcaccgucgugcugaacaacaagaacaccuaccggagccagcuggggugcguguucuucaacggcgccgacaucuccgacacgauccccgacgagaagcagaacggccacagccucuaccuggcggacaaccugaccgccgacgagaccaaggcccucaaggagcuguacgggcccgucgacccgaccuuccugcaccgcuucuacucccucaaggccgcggugcacaaguggaagaugguggucugcgacaaggugcggagccugaagcuguccgacaacaacugcuaccucaacgccgugaucaugacccuggaccugcucaaggacaucaaguucgucauccccgcccugcagcacgccuucaugaagcacaagggcggggacagcacggacuucaucgcccugaucauggcguacggcaacugcaccuucgggucccccgacgacgccagccgccuccugcacaccgugcuggccaaggccgagcucugcugcuccgcccgcaugguguggcgggaguggugcaacgucugcggcaucaaggacguggugcugcagggccugaaggcgugcugcuacgucggggugcagaccguggaggaccuccgcgcccggaugacguacgucugccagugcggcggggagcgccaccggcagaucguggagcacaccaccccguggcugcugcucagcggcacccccaacgagaagcuggugacgaccagcaccgcccccgacuucgucgccuucaacguguuccagggcaucgagaccgccguggggcacuacguccacgcgcgccugaagggcgggcucauccugaaguucgacuccggcacggugagcaagaccuccgacuggaagugcaaggugaccgacguccuguuccccgggcagaaguacagcuccgacugcaacguggugcgguacagccucgacggcaacuuccgcaccgaggucgacccggaccuguccgccuucuacgugaaggacggcaaguacuucacgagcgagccgcccgugaccuacucccccgccaccauccuggccgggagcgucuacaccaacuccugccucgugagcuccgacggccagcccgggggcgacgcgaucagccuguccuucaacaaccugcucggguucgacagcuccaagcccgugacgaagaaguacaccuacagcuuccugcccaaggaggacggcgacguccugcucgccgaguucgacaccuacgaccccaucuacaagaacggcgccauguacaaggggaagccgauccugugggugaacaaggccuccuacgacaccaaccugaacaaguucaaccgggccagccuccgccagaucuucgacguggcgcccaucgagcuggagaacaaguucacgccccugagcgucgaguccacccccguggagccgcccaccguggacgucguggcccuccagcaggagaugaccaucgugaagugcaagggccugaacaagcccuucgucaaggacaacgugagcuucgucgccgacgacuccgggacgcccgugguggaguaccugagcaaggaggaccuccacacccuguacgucgacccgaaguaccaggugaucgugcugaaggacaacguccucuccagcaugcugcggcugcacaccguggaguccggcgacaucaacguggucgccgccagcgggucccucacccgcaaggugaagcugcuguuccgggcgagcuucuacuucaaggaguucgccacgcgcaccuucaccgccaccacggccgugggcuccugcaucaagagcgucgugcggcaccucggcgugaccaaggggauccugaccggcugcuucuccuucgucaagaugcuguucaugcucccccuggccuacuucagcgacuccaagcuggggaccaccgaggugaaggugagcgcgcucaagacggccggcgucgugaccgggaacguggucaagcagugcugcaccgccgccguggaccuguccauggacaagcugcgccggguggacuggaaguccacccuccgccugcugcucaugcugugcacgaccaugguccugcucagcagcguguaccaccuguacguguucaaccagguccugagcuccgacgugauguucgaggacgcccagggccucaagaaguucuacaaggaggugcgggcguaccugggcaucagcuccgccugcgacgggcuggccagcgccuaccgcgcgaacuccuucgacguccccaccuucugcgccaaccgcagcgccaugugcaacuggugccucaucucccaggacagcaucacccacuaccccgcccugaagauggugcagacgcaccugucccacuacgugcucaacaucgacuggcugugguucgccuucgagaccggccuggcguacaugcucuacaccagcgccuucaacuggcugcugcucgccgggacccugcacuacuucuucgcccagacguccaucuucgucgacuggcggagcuacaacuacgccguguccagcgcguucuggcuguucacccacaucccgauggccggccuggugcgcauguacaaccuccuggccugccuguggcuccugcggaaguucuaccagcacgucaucaacggcugcaaggacaccgccugccugcucugcuacaagcgcaaccggcugacccgcguggaggccuccacgguggucugcgggggcaagcggaccuucuacaucaccgcgaacgggggcaucagcuucugccgccggcacaacuggaacugcguggacugcgacaccgccggggugggcaacacguucaucugcgaggaggucgccaacgaccugaccaccgcccuccgccggcccaucaacgcgaccgaccgcucccacuacuacguggacagcgugacggucaaggagaccguggugcaguucaacuaccggcgcgacggccagcccuucuacgagcgguucccgcugugcgccuucaccaaccuggacaagcucaaguucaaggaggucugcaagaccacgaccgggauccccgaguacaacuucaucaucuacgacuccagcgaccgcggccaggagagccuggcccgguccgccugcguguacuacagccaggugcugugcaaguccauccuccuggucgacagcucccugaucaccagcgugggggacuccagcgagaucgccaccaagauguucgacuccuucgucaacagcuucgugucccucuacaacgugacgcgcgacaagcuggagaagcugaucagcaccgcgcgggacggcguccgccgcggggacaacuuccacuccgugcucaccaccuucaucgacgccgcccggggccccgccggcguggagagcgacgucgagacgaacgagaucguggacuccgugcaguacgcccacaagcacgacauccagaucaccaacgagagcuacaacaacuacguccccuccuacgugaagccggacagcguguccaccagcgaccuggggagccugaucgacugcaacgcggccuccgucaaccagaucgugcuccgcaacagcaacggcgccugcaucuggaacgccgccgcguacaugaagcuguccgacgcccugaagcggcagauccgcaucgccugccggaagugcaaccucgccuuccgccugaccacgagcaagcugcgggcgaacgacaacauccucuccgugcgcuucaccgccaacaagaucgucgggggcugaggacuagucccuguucccagagcccacuuuuuuuucuuuuuuugaaauaaaauagccugucuuucagaucucaaaggcucuuuucagagccaccaaaaaaaaaaaaaaaaaaaaaaaaaaaaaaaaaaaaaaaaaaaaaaaaaaaaaaaaaaaaaaaaaaaaaaaaaaaaaaaaaaaaaaaaaaaaaaaaaaaaa

SEQ ID NO: 19476 - RNA, 5939 nt, Artificial Sequence
  MERS-CoV/Riyadh_14_2013__KJ156934.1__non-structural protein 3 (NSP3) mRNA gc
aggagagucccgcagucggcguccagcggcucugcuuguucgugugugugucguugcaggccuuauucaagcuuaccauggcccccgugaagaagguggccuucggcggggaccaggugcacgagguggcggccguccgcagcgugaccguggaguacaacauccacgccguccuggacacccuccuggccuccagcucccugcggacguucgugguggacaagagccucuccaucgaggaguucgccgacgucgugaaggagcaggucagcgaccugcuggugaagcuccugcgcggcaugccgauccccgacuucgaccuggacgacuucaucgacgcgcccugcuacugcuucaacgccgagggggacgccuccugguacagcaccaugaucuucucccuccaccccguggagugcgacgaggagugcagcgagguggaggccuccgaccuggaggagggcgagagcgagugcaucuccgagaccagcaccgagcaggucgacgugucccacgaggugagcgacgacgagugggcggccgccgucgacgaggccuucccgcuggacgaggccgaggacgugacggaguccgugcaggaggaggcgcagcccgucgaggugcccguggaggacaucgcccaggucgugaucgccgacacccuccaggagacccccgucgugagcgacaccguggaggucccgccccagguggugaagcugcccuccgagccccagacgauccagccggaggucaaggagguggcccccguguacgaggccgacaccgagcagacccagagcgucaccgugaagcccaagcggcugcgcaagaagcggaacguggacccccucagcaacuucgagcacaaggucaucacggagugcgugaccaucgugcugggggacgcgauccaggucgccaagugcuacggcgaguccgugcuggugaacgccgccaacacccaccucaagcacggcgggggcaucgccggggcgaucaacgccgccagcaagggcgccguccagaaggaguccgacgaguacauccuggccaaggggccgcuccaggugggcgacagcgugcugcugcagggccacucccuggcgaagaacauccuccacgucguggggcccgacgcccgcgccaagcaggacgugagccugcuguccaagugcuacaaggccaugaacgcguacccccucgucgugacgccccuggugagcgccggcaucuucggggucaagccggccguguccuucgacuaccugauccgggaggccaagacccgcgugcucgucguggugaacagccaggacgucuacaagucccugaccaucguggacaucccccagagccugaccuucuccuacgacggccuccggggcgccauccgcaaggcgaaggacuacggguucaccguguucgucugcacggacaacagcgccaacaccaaggugcugcggaacaagggcguggacuacaccaagaaguuccugaccgucgacggggugcaguacuacugcuacacguccaaggacacccucgacgacauccugcagcaggccaacaagagcgugggcaucaucuccaugccccugggguacgucagccacggccucgaccugauccaggccggcuccguggugcgccgggucaacgugcccuacgugugccugcucgccaacaaggagcaggaggcgauccugaugagcgaggacgucaagcugaacccgagcgaggacuucaucaagcacgugcgcaccaacgggggcuacaacuccuggcaccucguggagggggagcugcugguccaggaccugcggcucaacaagcugcugcacuggagcgaccagaccaucugcuacaaggacuccguguucuacgucgugaagaacagcacggccuuccccuucgagacccucuccgccugccgcgccuaccuggacagccggaccacccagcagcugacgaucgaggugcucgucaccguggacggcgugaacuuccgcaccgucgugcugaacaacaagaacaccuaccggucccagcuggggugcguguucuucaacggcgccgacaucagcgacacgauccccgacgagaagcagaacggccacucccucuaccuggcggacaaccugaccgccgacgagaccaaggcccucaaggagcuguacgggcccgucgacccgaccuuccugcaccgcuucuacagccucaaggccgcggugcacaaguggaagaugguggucugcgacaaggugcggucccugaagcugagcgacaacaacugcuaccucaacgccgugaucaugacccuggaccugcucaaggacaucaaguucgucauccccgcccugcagcacgccuucaugaagcacaagggcggggacuccacggacuucaucgcccugaucauggcguacggcaacugcaccuucggggcccccgacgacgccagccgccuccugcacaccgugcuggccaaggccgagcucugcugcuccgcgcgcaugguguggcgggaguggugcaacgucugcggcaucaaggacguggugcugcagggccugaaggccugcugcuacgucggggugcagaccguggaggaccuccgcgcccggaugacguacgucugccagugcggcggggagcgccaccggcagaucguggagcacaccaccccguggcugcugcucagcggcacccccaacgagaagcuggugacgaccuccaccgcccccgacuucgucgccuucaacguguuccagggcaucgagaccgcgguggggcacuacguccacgcccgccugaagggcgggcucauccugaaguucgacagcggcacggugagcaagaccuccgacuggaagugcaaggugaccgacguccuguuccccgggcagaaguacagcuccgacugcaacguggugcgguacagccucgacggcaacuuccgcaccgaggucgacccggaccuguccgccuucuacgugaaggacggcaaguacuucacgagcgagccgcccgugaccuacucccccgccaccauccuggcggggagcgucuacaccaacuccugccucgugagcuccgacggccagcccgggggcgacgccaucagccuguccuucaacaaccugcucggguucgacagcuccaagcccgugacgaagaaguacaccuacagcuuccugcccaaggaggacggcgacguccugcucgccgaguucgacaccuacgaccccaucuacaagaacggcgccauguacaaggggaagccgauccugugggugaacaaggccuccuacgacaccaaccugaacaaguucaaccgggcgagccuccgccagaucuucgacguggcccccaucgagcuggagaacaaguucacgccccuguccgucgagagcacccccguggagccgcccaccguggacgucguggcccuccagcaggagaugaccaucgugaagugcaagggccugaacaagcccuucgucaaggacaacgugagcuucgucgccgacgacuccgggacgcccgugguggaguaccugagcaaggaggaccuccacacccuguacgucgacccgaaguaccaggugaucgugcugaaggacaacguccucuccagcaugcugcggcugcacaccguggaguccggcgacaucaacguggucgccgcgagcgggucccucacccgcaaggugaagcugcuguuccgggccagcuucuacuucaaggaguucgccacgcgcaccuucaccgccaccacggccgugggcuccugcaucaagagcgucgugcggcaccucggcgugaccaaggggauccugaccggcugcuucuccuucgucaagaugcuguucaugcucccccuggcguacuucagcgacuccaagcuggggaccaccgaggugaaggugagcgcccucaagacggccggcgucgugaccgggaacguggucaagcagugcugcaccgccgccguggaccuguccauggacaagcugcgccggguggacuggaaguccacccuccgccugcugcucaugcugugcacgaccaugguccugcucagcagcguguaccaccuguacguguucaaccagguccuguccagcgacgugauguucgaggacgcgcagggccucaagaaguucuacaaggaggugcgggccuaccugggcaucagcuccgccugcgacgggcuggccagcgcguaccgcgccaacuccuucgacguccccaccuucugcgccaaccgcagcgccaugugcaacuggugccucaucucccaggacagcaucacccacuaccccgcccugaagauggugcagacgcaccugucccacuacgugcucaacaucgacuggcugugguucgcguucgagaccggccuggccuacaugcucuacaccagcgccuucaacuggcugcugcucgccgggacccugcacuacuucuucgcccagacguccaucuucgucgacuggcggagcuacaacuacgcgguguccagcgccuucuggcuguucacccacaucccgauggccggccuggugcgcauguacaaccuccuggccugccuguggcuccugcggaaguucuaccagcacgucaucaacggcugcaaggacaccgccugccugcucugcuacaagcgcaaccggcugacccgcguggaggcguccacgguggucugcgggggcaagcggaccuucuacaucaccgccaacgggggcaucagcuucugccgccggcacaacuggaacugcguggacugcgacaccgccggggugggcaacacguucaucugcgaggaggucgccaacgaccugaccaccgcgcuccgccggcccaucaacgccaccgaccgcucccacuacuacguggacagcgugacggucaaggagaccguggugcaguucaacuaccggcgcgacggccagcccuucuacgagcgguucccgcugugcgccuucaccaaccuggacaagcucaaguucaaggaggucugcaagaccacgaccgggauccccgaguacaacuucaucaucuacgacuccagcgaccgcggccaggagucccuggcccggagcgccugcguguacuacagccaggugcugugcaaguccauccuccuggucgacagcucccuggugaccagcgucggggacuccagcgagaucgcgaccaagauguucgacuccuucgugaacagcuucgugucccucuacaacgucacgcgcgacaagcuggagaagcugaucagcaccgcccgggacggcgugcgccgcggggacaacuuccacuccgugcucaccaccuucaucgacgccgcccggggccccgccggcgucgagagcgacguggagacgaacgagaucguggacuccguccaguacgcgcacaagcacgacauccagaucaccaacgagagcuacaacaacuacgugcccuccuacgugaagccggacagcgucuccaccagcgaccuggggucccugaucgacugcaacgccgccagcgugaaccagaucgugcuccgcaacagcaacggcgccugcaucuggaacgccgcggccuacaugaagcuguccgacgcccugaagcggcagauccgcaucgccugccggaagugcaaccucgcguuccgccugaccacgagcaagcugcgggccaacgacaacauccucuccguccgcuucaccgccaacaagaucgucgggggcugaggacuagucccuguucccagagcccacuuuuuuuucuuuuuuugaaauaaaauagccugucuuucagaucucaaaggcucuuuucagagccaccaaaaaaaaaaaaaaaaaaaaaaaaaaaaaaaaaaaaaaaaaaaaaaaaaaaaaaaaaaaaaaaaaaaaaaaaaaaaaaaaaaaaaaaaaaaaaaaaaaaaa

SEQ ID NO: 19477 - RNA, 5939 nt, Artificial Sequence
  MERS-CoV/England 1__NC_038294.1__non-structural protein 3 (NSP3) mRNA gc
aggagagucccgcagucggcguccagcggcucugcuuguucgugugugugucguugcaggccuuauucaagcuuaccauggcccccgugaagaaggucgccuucggcggggaccaggugcacgagguggcggccguccgcagcgugaccguggaguacaacauccacgccguccuggacacccuccuggccuccagcucccugcggacguucgugguggacaagagccucuccaucgaggaguucgccgacgucgugaaggagcaggucagcgaccugcuggugaagcuccugcgcggcaugccgauccccgacuucgaccuggacgacuucaucgacgcgcccugcuacugcuucaacgccgagggggacgccuccuggagcuccaccaugaucuucagccuccaccccguggagugcgacgaggagugcuccgagguggaggccagcgaccuggaggagggcgaguccgagugcaucagcgagaccuccaccgagcaggucgacgugagccacgagaucuccgacgacgagugggcggccgccguggacgaggccuucccgcuggacgaggccgaggacgucacggagagcgugcaggaggaggcgcagcccguggagguccccguggaggacaucgcccagguggucaucgccgacacccuccaggagacccccguggucuccgacaccguggaggugccgccccaggucgugaagcugcccagcgagccccagacgauccagccggaggugaaggaggucgcccccguguacgaggccgacaccgagcagacccagagcgugaccgucaagcccaagcggcugcgcaagaagcggaacguggacccccucuccaacuucgagcacaaggugaucacggagugcgucaccaucgugcugggggacgcgauccagguggccaagugcuacggcgagagcguccuggugaacgccgccaacacccaccucaagcacggcgggggcaucgccggggcgaucaacgccgccuccaagggcgccgugcagaaggagagcgacgaguacauccuggccaaggggccgcugcaggucggcgacuccgugcuccugcagggccacagccuggcgaagaacauccuccacguggucgggcccgacgcccgcgccaagcaggacgugucccugcugagcaagugcuacaaggccaugaacgcguacccccucguggucacgccccugguguccgccggcaucuucggggugaagccggccgucagcuucgacuaccugauccgggaggccaagacccgcgugcucguggucgugaacucccaggacguguacaagagccugaccaucgucgacaucccccagucccugaccuucagcuacgacggccuccggggcgccauccgcaaggcgaaggacuacggguucaccguguucgugugcacggacaacuccgccaacaccaagguccugcggaacaagggcguggacuacaccaagaaguuccugaccguggacgggguccaguacuacugcuacacgagcaaggacacccucgacgacauccugcagcaggccaacaaguccgugggcaucaucagcaugccccugggguacgugucccacggccucgaccugauccaggccggcagcgucgugcgccgggugaacguccccuacgugugccugcucgccaacaaggagcaggaggcgauccugaugagcgaggacgugaagcugaacccguccgaggacuucaucaagcacguccgcaccaacgggggcuacaacagcuggcaccucguggagggggagcugcuggugcaggaccugcggcucaacaagcugcugcacugguccgaccagaccaucugcuacaaggacagcgucuucuacguggucaagaacuccacggccuuccccuucgagacccucagcgccugccgcgccuaccuggacucccggaccacccagcagcugacgaucgaggugcucgugaccgucgacggcgugaacuuccgcaccgugguccugaacaacaagaacaccuaccggagccagcuggggugcguguucuucaacggcgccgacaucuccgacacgauccccgacgagaagcagaacggccacagccucuaccuggcggacaaccugaccgccgacgagaccaaggcccucaaggagcuguacgggcccguggacccgaccuuccugcaccgcuucuacucccucaaggccgcgguccacaaguggaagaugguggugugcgacaagguccggagccugaagcuguccgacaacaacugcuaccucaacgccgugaucaugacccuggaccugcucaaggacaucaaguucgugauccccgcccugcagcacgccuucaugaagcacaagggcggggacagcacggacuucaucgcccugaucauggcguacggcaacugcaccuucggggcccccgacgacgccucccgccuccugcacaccguccuggccaaggccgagcucugcugcagcgcgcgcaugguguggcgggaguggugcaacgugugcggcaucaaggacgucgugcugcagggccugaaggccugcugcuacguggggguccagaccguggaggaccuccgcgcccggaugacguacgugugccagugcggcggggagcgccaccggcagaucgucgagcacaccaccccguggcugcugcucuccggcacccccaacgagaagcuggugacgaccagcaccgcccccgacuucguggccuucaacgucuuccagggcaucgagaccgcgguggggcacuacgugcacgcccgccugaagggcgggcucauccugaaguucgacagcggcacggucuccaagaccagcgacuggaagugcaaggugaccgacgugcuguuccccgggcagaaguacuccagcgacugcaacgucgugcgguacucccucgacggcaacuuccgcaccgagguggacccggaccugagcgccuucuacgucaaggacggcaaguacuucacguccgagccgcccgugaccuacagccccgccaccauccuggcgggguccguguacaccaacagcugccucgucuccagcgacggccagcccgggggcgacgccaucucccugagcuucaacaaccugcucggguucgacuccagcaagcccgugacgaagaaguacaccuacuccuuccugcccaaggaggacggcgacgugcugcucgccgaguucgacaccuacgaccccaucuacaagaacggcgccauguacaaggggaagccgauccugugggucaacaaggccagcuacgacaccaaccugaacaaguucaaccgggcgucccuccgccagaucuucgacguggcccccaucgagcuggagaacaaguucacgccccugagcguggagagcacccccgucgagccgcccaccguggacguggucgcccuccagcaggagaugaccaucgugaagugcaagggccugaacaagcccuucgugaaggacaacgucuccuucguggccgacgacagcgggacgcccgucguggaguaccuguccaaggaggaccuccacacccuguacguggacccgaaguaccaggucaucgugcugaaggacaacgugcucagcuccaugcugcggcugcacaccgucgagagcggcgacaucaacgugguggccgcguccgggagccucacccgcaaggucaagcugcuguuccgggccuccuucuacuucaaggaguucgccacgcgcaccuucaccgccaccacggccgugggcagcugcaucaaguccgugguccggcaccucggcgugaccaaggggauccugaccggcugcuucagcuucgugaagaugcuguucaugcucccccuggcguacuucuccgacagcaagcuggggaccaccgaggucaagguguccgcccucaagacggccggcguggucaccgggaacguggugaagcagugcugcaccgccgccgucgaccugagcauggacaagcugcgccggguggacuggaaguccacccuccgccugcugcucaugcugugcacgaccauggugcugcucagcuccgucuaccaccuguacguguucaaccaggugcugagcagcgacgucauguucgaggacgcgcagggccucaagaaguucuacaaggaggugcgggccuaccugggcaucuccagcgccugcgacgggcuggccuccgcguaccgcgccaacagcuucgacgugcccaccuucugcgccaaccgcuccgccaugugcaacuggugccucaucagccaggacuccaucacccacuaccccgcccugaagaugguccagacgcaccugagccacuacgugcucaacaucgacuggcugugguucgcguucgagaccggccuggccuacaugcucuacaccuccgccuucaacuggcugcugcucgccgggacccugcacuacuucuucgcccagacgagcaucuucguggacuggcgguccuacaacuacgcggucagcuccgccuucuggcuguucacccacaucccgauggccggccuggugcgcauguacaaccuccuggccugccuguggcuccugcggaaguucuaccagcacgugaucaacggcugcaaggacaccgccugccugcucugcuacaagcgcaaccggcugacccgcgucgaggcgagcacgguggugugcgggggcaagcggaccuucuacaucaccgccaacgggggcaucuccuucugccgccggcacaacuggaacugcgucgacugcgacaccgccggggugggcaacacguucaucugcgaggagguggccaacgaccugaccaccgcgcuccgccggcccaucaacgccaccgaccgcagccacuacuacgucgacuccgugacggugaaggagaccgucgugcaguucaacuaccggcgcgacggccagcccuucuacgagcgguucccgcugugcgccuucaccaaccuggacaagcucaaguucaaggaggugugcaagaccacgaccgggauccccgaguacaacuucaucaucuacgacagcuccgaccgcggccaggagagccuggcccggagcgccugcgucuacuacucccaggugcugugcaagagcauccuccugguggacuccagccuggucaccuccgugggggacagcuccgagaucgcgaccaagauguucgacagcuucgucaacuccuucgugagccucuacaacgugacgcgcgacaagcuggagaagcugaucuccaccgcccgggacggcguccgccgcggggacaacuuccacagcgugcucaccaccuucaucgacgccgcccggggccccgccggcguggaguccgacgucgagacgaacgagaucguggacagcgugcaguacgcgcacaagcacgacauccagaucaccaacgaguccuacaacaacuacguccccagcuacgugaagccggacuccgugagcaccuccgaccuggggagccugaucgacugcaacgccgccagcgucaaccagaucgugcuccgcaacuccaacggcgccugcaucuggaacgccgcggccuacaugaagcugagcgacgcccugaagcggcagauccgcaucgccugccggaagugcaaccucgcguuccgccugaccacguccaagcugcgggccaacgacaacauccucagcgugcgcuucaccgccaacaagaucgucgggggcugaggacuagucccuguucccagagcccacuuuuuuuucuuuuuuugaaauaaaauagccugucuuucagaucucaaaggcucuuuucagagccaccaaaaaaaaaaaaaaaaaaaaaaaaaaaaaaaaaaaaaaaaaaaaaaaaaaaaaaaaaaaaaaaaaaaaaaaaaaaaaaaaaaaaaaaaaaaaaaaaaaaaa

SEQ ID NO: 19478 - RNA, 6044 nt, Artificial Sequence
  SARS-CoV/Tor2__NC_004718.3__non-structural protein 3 (NSP3) mRNA gc
aggagagucccgcagucggcguccagcggcucugcuuguucgugugugugucguugcaggccuuauucaagcuuaccauggcccccaucaagggcgugaccuucggggaggacaccgucugggaggugcagggcuacaagaacgugcgcaucacguucgagcuggacgagcgggucgacaaggugcucaacgagaagugcagcguguacaccgucgaguccgggaccgaggugaccgaguucgccugcguggucgcggaggccguggugaagacgcugcagccggucagcgaccugcucaccaacaugggcaucgaccuggacgagugguccguggccaccuucuaccuguucgacgacgccggggaggagaacuucagcucccgcauguacugcagcuucuacccgcccgacgaggaggaggaggacgacgccgagugcgaggaggaggagaucgacgagaccugcgagcacgaguacggcacggaggacgacuaccagggccucccccuggaguucggggcguccgccgagaccgugcgggucgaggaggaggaggaggaggacuggcuggacgacaccaccgagcagagcgagaucgagcccgagcccgagcccacgcccgaggagccggugaaccaguucaccggcuaccucaagcugaccgacaacguggccaucaagugcgucgacaucgugaaggaggcccaguccgcgaaccccauggugaucgucaacgccgccaacauccaccugaagcacgggggcgggguggccggcgcccucaacaaggcgaccaacggcgccaugcagaaggagagcgacgacuacaucaagcugaacgggccccugacggugggcggguccugccuccugagcggccacaaccuggccaagaagugccuccacgucgugggccccaaccugaacgccggggaggacauccagcugcucaaggccgcguacgagaacuucaacucccaggacauccugcuggccccgcuccugagcgccggcaucuucggggccaagccccugcagucccuccaggucugcgugcagaccgugcgcacccaggucuacaucgccgugaacgacaaggcgcuguacgagcaggucgucauggacuaccuggacaaccucaagccccggguggaggcccccaagcaggaggagccgcccaacaccgaggacagcaagacggaggagaaguccgugguccagaagcccguggacgugaagcccaagaucaaggccugcaucgacgaggucaccaccacccuggaggagacgaaguuccugaccaacaagcuccugcuguucgccgacaucaacggcaagcucuaccacgacagccagaacaugcugcgcggggaggacauguccuuccuggagaaggacgccccguacauggugggcgacgugaucaccagcggcgacaucacgugcgucgugauccccagcaagaaggccgggggcacgaccgagaugcucucccgggcgcugaagaaggugcccgucgacgaguacaucaccaccuaccccgggcagggcugcgccggguacacgcuggaggaggccaagaccgcgcucaagaagugcaagagcgccuucuacgugcugccguccgaggcccccaacgccaaggaggagauccugggcaccgugagcuggaaccuccgcgagaugcuggcccacgcggaggagacccggaagcugaugcccaucugcauggacguccgcgccaucauggccacgauccagcggaaguacaagggcaucaagauccaggaggggaucguggacuacggcgugcgcuucuucuucuacaccuccaaggagcccgucgccagcaucaucaccaagcugaacucccucaacgagccgcuggugaccaugcccaucggguacgugacccacggcuucaaccuggaggaggccgcgcggugcaugcgcagccucaaggcccccgccgucguguccgugagcuccccggacgccgucaccaccuacaacggguaccugaccagcuccagcaagaccuccgaggagcacuucguggagacggugagccuggccggcuccuaccgggacuggagcuacuccggccagcggaccgagcucgggguggaguuccugaagcggggcgacaagaucguguaccacacccuggagagccccguggaguuccaccucgacggggagguccugagccuggacaagcucaagucccugcugagccuccgcgaggugaagaccaucaagguguucacgaccgucgacaacaccaaccugcacacccagcugguggacauguccaugacguacggccagcaguucggccccaccuaccucgacggggcggacgugaccaagaucaagccccacgucaaccacgagggcaagaccuucuucgugcugccgagcgacgacacgcugcgguccgaggccuucgaguacuaccacacccucgacgagagcuuccuggggcgcuacauguccgcccugaaccacaccaagaaguggaaguucccccaggugggcgggcucaccagcaucaagugggccgacaacaacugcuaccuguccagcguccugcucgcgcugcagcagcuggaggugaaguucaacgcccccgcccuccaggaggccuacuaccgggcccgcgcgggcgacgccgccaacuucugcgcccugauccuggccuacuccaacaagacggugggcgagcucggggacguccgcgagaccaugacccaccuccugcagcacgcgaaccucgagagcgccaagcgggugcugaacguggucugcaagcacugcggccagaagaccacgacccugaccgggguggaggccgucauguacaugggcacccucuccuacgacaaccugaagacgggggugagcauccccugcgugugcggccgcgacgccacccaguaccugguccagcaggaguccagcuucgugaugauguccgccccgcccgcggaguacaagcuccagcagggcaccuuccugugcgccaacgaguacaccgggaacuaccagugcggccacuacacgcacaucaccgccaaggagacccuguaccggaucgacggggcccaccucaccaagaugagcgaguacaagggccccgugacggacgucuucuacaaggagaccagcuacaccaccaccaucaagcccguguccuacaagcuggacggggugacguacaccgagaucgagccgaagcuggacggcuacuacaagaaggacaacgcguacuacaccgagcagcccaucgaccucguccccacccagccccugccgaacgccagcuucgacaacuucaagcugacgugcuccaacaccaaguucgccgacgaccucaaccagaugaccggcuucaccaagcccgccagccgcgagcuguccgugacguucuuccccgaccugaacggggacguggucgccaucgacuaccggcacuacagcgcguccuucaagaagggcgccaagcuccugcacaagcccaucguguggcacaucaaccaggccaccaccaagaccacguucaagccgaacaccuggugccugcgcugccucuggagcaccaagcccguggacaccuccaacagcuucgagguccuggccguggaggacacgcaggggauggacaaccuggccugcgagucccagcagcccaccagcgaggagguggucgagaaccccaccauccagaaggaggugaucgagugcgacgugaagaccacggaggucgugggcaacgugauccucaagccguccgacgagggggucaaggugacccaggagcugggccacgaggaccugauggcggccuacguggagaacaccagcaucaccaucaagaagcccaacgagcucucccuggcccugggccucaagacgaucgccacccacgggaucgccgcgaucaacagcguccccugguccaagauccuggccuacgugaagccguuccugggccaggccgccaucaccaccagcaacugcgccaagcggcucgcgcagcgcguguucaacaacuacaugcccuacgucuucacgcugcuguuccagcucugcaccuucaccaaguccaccaacagccggauccgcgccagccugcccacgaccaucgccaagaacuccgucaagagcguggccaagcugugccucgacgcggggaucaacuacgugaagucccccaaguucagcaagcuguucaccaucgccauguggcugcuccugcuguccaucugccucggcagccugaucugcgugaccgccgccuucggcgugcugcucuccaacuucggggccccgagcuacugcaacggcguccgggagcuguaccugaacuccagcaacgugacgaccauggacuucugcgagggguccuuccccugcagcaucugccucuccggccuggacagccuggacuccuaccccgcgcucgagaccauccaggugaccaucagcuccuacaagcuggaccugacgauccucgggcuggccgccgaguggguccuggccuacaugcuguucaccaaguucuucuaccugcugggccugagcgccaucaugcaggucuucuucggcuacuucgcgucccacuucaucagcaacagcuggcucaugugguucaucaucuccaucgugcagauggcccccgugagcgccauggugcgcauguacaucuucuucgccuccuucuacuacaucuggaaguccuacgugcacaucauggacgggugcaccagcuccacgugcaugaugugcuacaagcggaaccgcgccacccgggucgagugcaccaccaucgugaacggcaugaagcgcagcuucuacguguacgcgaacgggggccggggguucugcaagacccacaacuggaacugccugaacugcgacaccuucugcacgggcagcaccuucaucuccgacgaggucgcccgcgaccugagccuccaguucaagcggccgaucaaccccaccgaccaguccagcuacaucguggacuccguggccgucaagaacggcgcccugcaccuguacuucgacaaggcggggcagaagaccuacgagcgccacccccucagccacuucgugaaccuggacaaccugcgcgccaacaacacgaagggcucccuccccaucaacgucaucguguucgacggcaagagcaagugcgacgaguccgccagcaaguccgccagcguguacuacagccagcugaugugccagccgauccugcuccuggaccaggcccuggucuccgacgugggggacagcaccgagguguccgucaagauguucgacgcguacguggacaccuucagcgccaccuucuccgugcccauggagaagcucaaggcccuggucgccacggcccacagcgagcuggcgaaggggguggcccucgacggcgugcuguccaccuucgucagcgccgcccggcagggcgugguggacaccgacgucgacaccaaggacgugaucgagugccugaagcucucccaccacagcgaccuggaggugacgggggacuccugcaacaacuucaugcugaccuacaacaaggucgagaacaugacgccccgcgaccucggcgccugcaucgacugcaacgcgcggcacaucaacgcccagguggccaagagccacaacgugucccugaucuggaacgucaaggacuacaugagccuguccgagcagcuccgcaagcagauccggagcgccgcgaagaagaacaacauccccuuccgccugaccugcgccaccacccgccagguggugaacgucaucaccaccaagaucucccugaagggcgggugaggacuagucccuguucccagagcccacuuuuuuuucuuuuuuugaaauaaaauagccugucuuucagaucucaaaggcucuuuucagagccaccaaaaaaaaaaaaaaaaaaaaaaaaaaaaaaaaaaaaaaaaaaaaaaaaaaaaaaaaaaaaaaaaaaaaaaaaaaaaaaaaaaaaaaaaaaaaaaaaaaaaa

SEQ ID NO: 19479 - RNA, 5975 nt, Artificial Sequence
  HCoV/OC43__NC_006213.1__non-structural protein 3 (NSP3) mRNA gc
aggagagucccgcagucggcguccagcggcucugcuuguucgugugugugucguugcaggccuuauucaagcuuaccaugggccgccgggugaccuucaaggagcagcccaccgucaaggagaucaucagcaugccgaagaucaucaagguguucuacgagcuggacaacgacuucaacacgauccucaacaccgccugcgggguguucgaggucgacgacaccguggacauggaggaguucuacgccguggucaucgacgcgaucgaggagaagcugucccccugcaaggagcuggagggcgugggggccaaggugagcgccuuccuccagaagcuggaggacaacccccuguuccucuucgacgaggccggcgaggagguccuggcccccaagcuguacugcgcguucaccgccccggaggacgacgacuuccucgaggaguccgacguggaggaggacgacguggagggggaggagacggaccugaccgucaccagcgccggccagcccugcguggccuccgagcaggaggagagcuccgaggugcuggaggacacccucgacgacggccccagcgucgagacguccgacagccagguggaggaggacguggagauguccgacuucgucgaccuggagagcgugauccaggacuacgagaacgugugcuucgaguucuacaccaccgagcccgaguucgucaaggugcuggggcucuacgugccgaaggcgacccgcaacaacugcuggcugcgguccguccuggccgugaugcagaagcuccccugccaguucaaggacaagaaccugcaggaccuguggguccucuacaagcagcaguacagccagcuguucguggacacgcuggugaacaagauccccgccaacaucguccucccccagggcggguacguggccgacuucgccuacugguuccugacccugugcgacuggcagugcguggcguacuggaagugcaucaagugcgaccucgcccugaagcugaagggccucgacgccauguucuucuacggggacgucgugucccacaucugcaagugcggcgagagcauggugcugaucgacgucgacgugccguucaccgcccacuucgcccugaaggacaagcuguucugcgcguucaucaccaagcgcaucguguacaaggccgccugcgucguggacgugaacgacucccacagcauggccgucguggacggcaagcagaucgacgaccaccggaucacguccaucaccagcgacaaguucgacuucaucaucgggcacggcaugagcuucuccaugaccaccuucgagaucgcccagcucuacgggagcugcaucacgcccaacgugugcuucgucaagggcgacaucaucaagguguccaagcuggugaaggcggaggucguggugaaccccgccaacggccacauggcccacgggggcggggucgccaaggccaucgcgguggccgccggccagcaguucgugaaggagaccaccgacauggucaagagcaagggggugugcgccaccggcgacugcuacguguccacgggcgggaagcucugcaagaccguccugaacguggugggccccgacgcgcgcacccaggggaagcagagcuacguccugcucgagcggguguacaagcaccugaacaacuacgacugcguggucaccacgcugaucuccgccggcaucuucagcgugccguccgacgugagccucaccuaccugcuggggaccgccaagaagcaggucgugcucguguccaacaaccaggaggacuucgaccugaucagcaagugccagaucaccgccgucgagggcacgaagaagcuggccgcgcgccuguccuucaacgugggccggagcaucguguacgagaccgacgccaacaagcucauccugaucaacgacgucgccuucguguccaccuucaacgugcugcaggacguccucagccugcgccacgacaucgcccuggacgacgacgcccggaccuucgugcaguccaacguggacgucgugcccgagggguggcgcgucgugaacaaguucuaccagaucaacggcgugcggacggucaaguacuucgagugcaccgggggcaucgacaucugcagccaggacaagguguucggguacgugcagcagggcaucuucaacaaggcgaccgucgcccagaucaaggcccucuuccuggacaagguggacauccugcucaccguggacggcgucaacuucaccaaccgcuucgugcccgugggggaguccuucggcaagagccuggggaacgucuucugcgacggcgugaacgugacgaagcacaagugcgacaucaacuacaagggcaaggucuucuuccaguucgacaaccugagcuccgaggaccucaaggccgugcggagcuccuucaacuucgaccagaaggagcugcuggccuacuacaacaugcucgugaacugcuucaaguggcaggucguggugaacgggaaguacuucaccuucaagcaggcgaacaacaacugcuucgucaacgugagcugccugaugcugcagucccuccaccugaccuucaagaucgugcaguggcaggaggccuggcuggaguuccgcagcggccggcccgcccgcuucgucgcccucgugcuggcgaagggcggguucaaguucggggacccggccgacucccgggacuuccugcgcguggucuucagccagguggaccucaccggcgccaucugcgacuucgagaucgccugcaagugcggcgugaagcaggagcagcggacggggcuggacgccgucaugcacuucggcacccugucccgcgaggaccucgagaucggguacaccguggacugcagcugcggcaagaagcugauccacugcgugcgcuucgacguccccuuccugaucugcuccaacacccccgcgagcgugaagcuccccaagggggugggcuccgccaacaucuucaucggcgacaaggucgggcacuacgugcacgugaagugcgagcagagcuaccagcuguacgacgccuccaacgucaagaaggugacggacgugaccggcaagcugagcgacugccucuaccugaagaaccugaagcagaccuucaaguccguccucaccacguacuaccuggacgacgugaagaagaucgaguacaagccggaccugagccaguacuacugcgacgggggcaaguacuacacccagcggaucaucaaggcccaguucaagaccuucgagaagguggacggggucuacaccaacuucaagcucaucggccacacggugugcgacagccugaacgccaagcugggcuucgacuccagcaaggaguucguggaguacaagaucaccgaguggcccaccgcgaccggggacgucgugcucgccacggacgaccuguacgugaagcgcuacgagcggggcugcaucaccuucgggaagcccgucaucuggcugucccacgagaaggccagccucaacucccugaccuacuucaaccgccccagccugguggacgacaacaaguucgacguccucaagguggacgacguggacgacggcggggacuccagcgaguccggcgccaaggagaccaaggagaucaacaucaucaagcugagcggcgucaagaagccguucaagguggaggacuccgugaucgucaacgacgacacgagcgagaccaaguacgugaagucccugagcaucguggacgucuacgacauguggcucaccgggugcaaguacguggugcggaccgccaacgcgcugucccgcgccgucaacgugcccacgauccggaaguucaucaaguucggcaugacccuggugagcauccccaucgaccuccugaaccugcgcgagaucaagccggccgucaacguggugaaggccguccggaacaagaucuccgugugcuucaacuucaucaaguggcuguucgugcuccuguucggguggaucaagaucagcgcggacaacaaggucaucuacaccaccgagaucgccuccaagcucacgugcaagcugguggcccuggccuucaagaacgccuuccucaccuucaaguggagcaugguggcgcgcggcgccugcaucaucgccaccaucuuccugcugugguucaacuucaucuacgccaacgucaucuucagcgacuucuaccuccccaagaucggcuuccugcccaccuucguggggaagaucgcccaguggaucaagaacacguucucccuggugaccaucugcgaccucuacagcauccaggacgucggcuucaagaaccaguacugcaacggguccaucgcgugccaguucugccuggccggcuucgacaugcuggacaacuacaaggccaucgacguggugcaguacgaggccgaccggcgcgccuucgucgacuacaccggggugcucaagaucgugaucgagcugaucgucagcuacgcgcuguacaccgccugguucuacccccucuucgcccugaucuccauccagauccugaccacguggcucccggagcuguucaugcugagcacccuccacugguccuuccggcugcugguggcccucgccaacaugcugcccgcgcacguguucaugcgcuucuacaucaucaucgccagcuucaucaagcuguucucccucuuccggcacgucgccuacggcugcagcaaguccggcugccuguucugcuacaagcgcaaccggagccugcgcgugaagugcuccaccaucgucgggggcaugauccgguacuacgacgugauggccaacgggggcaccggguucugcagcaagcaccaguggaacugcaucgacugcgacuccuacaagcccggcaacacguucaucaccguggaggcggcccucgaccugagcaaggagcugaagcgccccauccagccgaccgacguggccuaccacaccgucacggacgugaagcaggucggcugcuccaugcgccucuucuacgaccgggacgggcagcgcaccuacgacgacgugaacgccagccuguucguggacuacuccaaccugcuccacagcaaggucaagagcgugcccaacaugcacgugguggucguggagaacgacgccgacaaggcgaacuuccugaacgccgccgucuucuacgcccagucccuguuccggcccauccugaugguggacaagaaccucaucaccaccgccaacacgggcaccagcgugaccgagaccauguucgacgucuacguggacacguuccuguccauguucgacguggacaagaagucccugaacgcgcucaucgccaccgcccacagcagcaucaagcaggggacccagaucuacaagguccuggacaccuuccuguccugcgcccgcaagagcugcuccaucgacagcgacguggacacgaagugccucgccgacuccgugaugagcgcggucuccgccggccuggagcugaccgacgagagcugcaacaaccucgugcccaccuaccugaaguccgacaacaucguggccgccgaccuggggguccucauccagaacagcgcgaagcacgugcagggcaacguggccaagaucgccggcgucuccugcaucuggagcguggacgccuucaaccaguucuccagcgacuuccagcacaagcugaagaaggccugcugcaagaccgggcugaagcucaagcugacguacaacaagcagauggcgaacgugagcguccugaccaccccguucucccucaagggcgggugaggacuagucccuguucccagagcccacuuuuuuuucuuuuuuugaaauaaaauagccugucuuucagaucucaaaggcucuuuucagagccaccaaaaaaaaaaaaaaaaaaaaaaaaaaaaaaaaaaaaaaaaaaaaaaaaaaaaaaaaaaaaaaaaaaaaaaaaaaaaaaaaaaaaaaaaaaaaaaaaaaaaa

SEQ ID NO: 19480 - RNA, 6365 nt, Artificial Sequence
  HCoV/HKU1__NC_006577.2__non-structural protein 3 (NSP3) mRNA gc
aggagagucccgcagucggcguccagcggcucugcuuguucgugugugugucguugcaggccuuauucaagcuuaccaugggccgcaaggugaacuucaacgagaagcccgucgugauggagaucccgagccugaugaccgugaaggucauguucgaccucgacuccaccuucgacgacauccuggggaaggugugcagcgaguucgagguggagaagggcgucacgguggacgacuucguggccgucgugugcgacgccaucgagaacgcgcugaacuccugcaaggagcaccccguggucggguaccaggugcgggccuuccucaacaagcugaacgagaacguggucuaccuguucgacgaggccggcgacgaggccauggccagccgcauguacugcaccuucgcgaucgaggacguggaggacgugaucuccagcgaggccgucgaggacaccaucgacggggugguggaggacaccaucaacgacgacgaggacgucgugacgggcgacaacgacgacgaggacguggucaccggcgacaacgacgacgaggacguggucaccggggacaacgacgacgaggacguggugaccggcgacaacgacgacgaggacgucgugacgggggacaacgacgacgaggacguggucaccggcgacaacgacgacgaggacguggugaccggggacaacgacgacgaggacgucgugaccggcgacaacgacgacgaggacguggucacgggcgacaacgacgacgaggacguggugaccggggacaacgacgacgaggacgucgugaccggcgacaacgacgacgaggacguggucaccggggacaacgacgacgaggacguggugacgggcgacaacgacgacgaggacgucgugaccggcgacaacaacgacgaggagaucgugaccggggacaacgacgaccagaucgucgugaccggcgacgacguggacgacaucgaguccaucuacgacuucgacacguacaaggcccuccuggucuucaacgacguguacaacgacgcccuguucgugagcuacggguccagcgucgagaccgagaccuacuucaaggugaacggccucuggucccccaccaucacgcacaccaacugcuggcugcggagcgugcugcucgucaugcagaagcugcccuucaaguucaaggaccuggcgaucgagaacauguggcucuccuacaaggugggguacaaccagagcuucguggacuaccugcugaccaccaucccgaaggccaucguccucccccagggcggcuucguggccgacuucgccuacugguuccugaaccaguucgacaucaacgccuacgcgaacuggugcugccugaagugcggguucuccuucgaccucaacggccuggacgcccuguucuucuacggggacaucgugagccacgucugcaagugcggccacaacaugacgcucaucgccgccgaccugcccugcacccugcacuucucccucuucgacgacaacuucugcgccuucugcacccccaagaagaucuucaucgcggccugcgccguggacgugaacgucugccacagcguggccgugaucggggacgagcagaucgacggcaaguucgucaccaaguucuccggcgacaaguucgacuucaucgugggguacggcaugagcuucagcauguccagcuucgagcugccgcagcuguacgggcucugcaucacgcccaacgugugcuucgucaagggcgacaucaucaacguggcccgccuggugaaggcggacgucaucgugaaccccgccaacgggcacaugcugcacggcggcggggucgccaaggccaucgccguggcggccggcaagaaguucuccaaggagaccgccgccauggucaagagcaagggggugugccaggugggcgacugcuacguguccaccggcgggaagcucugcaagaccauccugaacaucgucggccccgacgcgcggcaggacgggcgccagagcuacgugcugcucgcccgggccuacaagcaccugaacaacuacgacugcugccuguccacgcucaucagcgccggcaucuucuccgugccggccgacgucagccugaccuaccugcucggggugguggacaagcaggucauccugguguccaacaacaaggaggacuucgacaucauccagaagugccagaucaccagcguggucggcaccaaggcgcuggccgugcgccucaccgccaacgugggccgggucaucaaguucgagacggacgccuacaagcuguuccuguccggggacgacugcuucgugagcaacuccagcgugauccaggagguccugcuccugcgccacgacauccagcugaacaacgacgugcgggacuaccuccuguccaagaugaccagccugcccaaggacuggcgccucaucaacaaguucgacgugaucaacggcgucaagaccgugaaguacuucgagugccccaacuccaucuacaucugcagccaggggaaggacuucggcuacgugugcgacgggagcuucuacaaggccaccgucaaccaggugugcgugcugcuggcgaagaagaucgacguccuccugacgguggacggcgugaacuucaaguccaucagccugaccgucggcgagguguucgggaagauccucggcaacguguucugcgacgggaucgacgucaccaagcugaagugcuccgacuucuacgccgacaagauccuguaccaguacgagaaccucagccuggccgacaucuccgccgugcagagcuccuucggcuucgaccagcagcagcugcucgccuacuacaacuuccugaccgugugcaaguggagcgucguggugaacgggcccuucuucuccuucgagcagagccacaacaacugcuacgucaacguggcgugccugaugcuccagcacaucaaccugaaguucaacaaguggcaguggcaggaggccugguacgaguuccgggccggccgcccgcaccggcugguggcccucguccuggcgaagggccacuucaaguucgacgagcccuccgacgccacggacuucauccgcguggugcugaagcaggccgaccucagcggggccaucugcgagcuggagcugaucugcgacugcggcaucaagcaggagucccgggucgggguggacgccgugaugcacuucggcacccucgcgaagaccgaccuguucaacggguacaagaucggcugcaacugcgccggccgcaucguccacugcaccaagcugaacgugcccuuccucaucugcagcaacacgccccuguccaaggaccugccggacgacgucguggccgccaacauguucaugggggugggcgucgggcacuacacccaccucaagugcggcagccccuaccagcacuacgacgccugcuccgugaagaaguacaccggcgugagcgggugccugaccgacugccuguaccucaagaaccugacgcagaccuucaccagcaugcugaccaacuacuuccucgacgacgucgagaugguggcguacaaccccgaccugucccaguacuacugcgacaacggcaaguacuacacgaagcccaucaucaaggcccaguucaagccguucgccaagguggacggggucuacaccaacuucaagcuggugggccacgacaucugcgcccagcucaacgacaagcugggguucaacguggaccugcccuucgucgaguacaaggugaccguguggcccgucgccaccggcgacguggugcucgcgagcgacgaccuguacgucaagcgguacuucaagggcugcgagacguucgggaagcccgugaucugguucugccacgacgaggccucccugaacagccucaccuacuucaacaagccguccuucaagagcgagaaccgcuacuccgugcugagcgucgacuccgugagcgaggagucccagggcaacguggucaccagcgugauggagucccagaucagcaccaaggaggugaagcugaaggggguccggaagacggugaagaucgaggacgccaucaucgugaacgacgagaacuccagcaucaaggucgugaagucccucagccugguggacgucugggacauguaccugaccggcugcgacuacguggugugggucgccaacgagcucucccgccuggucaagagccccaccgugcgcgaguacauccgguacgggaucaagcccaucaccaucccgaucgaccugcucugccugcgcgacgacaaccagacgcugcucgugcccaagaucuucaaggcgcgggccaucgaguucuacggcuuccugaaguggcuguucaucuacguguucagccuccugcacuucaccaacgacaagaccaucuucuacaccacggagaucgccuccaaguucaccuucaaccuguucugccucgcccugaagaacgccuuccagaccuuccgcuggagcaucuucaucaagggcuuccugguggucgcgaccguguuccucuucugguucaacuuccuguacaucaacgugaucuucuccgacuucuaccugcccaacaucagcgucuuccccaucuucguggggcggaucgugauguggaucaaggccaccuucggccucgucacgaucugcgacuucuacuccaagcugggggugggcuucaccagccacuucugcaacggguccuucaucugcgagcugugccacagcggcuucgacaugcucgacaccuacgccgccaucgacuucgugcaguacgaggucgaccgccgggugcuguucgacuacgucucccuggugaagcucaucguggagcuggucaucggcuacagccuguacaccgugugguucuacccccucuucugccugaucgggcugcagcuguucacgaccuggcucccggaccuguucaugcucgagaccaugcacuggcugauccgcuucaucguguucgucgccaacaugcugcccgcguucgugcuccugcgguucuacaucguggucaccgccauguacaagguggugggcuucauccgccacaucgucuacgggugcaacaaggccggcugccuguucugcuacaagcggaacugcuccgugcgcgugaagugcagcacgaucgucggcggggugauccgguacuacgacaucaccgccaacggcgggaccggcuucugcgugaagcaccaguggaacugcuucaacugccacuccuucaagcccgggaacaccuucaucacggucgaggccgcgaucgagcucagcaaggagcugaagcgcccggugaaccccaccgacgccucccacuacguggucaccgacaucaagcaggucggcugcaugaugcggcuguucuacgaccgcgacggccagcggguguacgacgacguggacgccagccuguucguggacaucaacaaccuccugcacuccaaggugaaggucgugcccaaccuguacguggucgugguggagagcgacgccgaccgcgccaacuuccucaacgcggucguguucuacgcccagucccuguaccggcccauccugcucguggacaagaagcugaucaccacggccugcaacgggaucagcgucacccagaccauguucgacguguacguggacaccuucaugagccacuucgacgucgaccgcaaguccuucaacaacuucgugaacaucgcccacgcgagccugcgcgagggcgugcagcucgagaagguccuggacacguucguggggugcgugcggaagugcugcuccaucgacagcgacgucgagacccgcuucaucaccaaguccaugaucagcgccguggccgccggccuggaguucaccgacgagaacuacaacaaccucgugccgacguaccugaaguccgacaacaucgucgccgcggaccugggggugcucauccagaacggcgccaagcacgugcagggcaacgucgccaaggccgccaacaucagcugcaucugguucaucgacgcguucaaccagcugaccgccgaccugcagcacaagcucaagaaggccugcgugaagaccgggcugaagcugaagcucaccuucaacaagcaggaggccuccguccccauccugacgacccccuucagccugaagggcgggugaggacuagucccuguucccagagcccacuuuuuuuucuuuuuuugaaauaaaauagccugucuuucagaucucaaaggcucuuuucagagccaccaaaaaaaaaaaaaaaaaaaaaaaaaaaaaaaaaaaaaaaaaaaaaaaaaaaaaaaaaaaaaaaaaaaaaaaaaaaaaaaaaaaaaaaaaaaaaaaaaaaaa

SEQ ID NO: 19481 - RNA, 5054 nt, Artificial Sequence
  HCoV/229E/BN1/GER/2015__KU291448.1__non-structural protein 3 (NSP3) mRNA gc
aggagagucccgcagucggcguccagcggcucugcuuguucgugugugugucguugcaggccuuauucaagcuuaccaugggcaaggugagcuucuccgacgacgucgaggugaaggacaucgagcccguguaccgcgucaagcugugcuucgaguucgaggacgagaagcucguggacgugugcgagaaggccaucgggaagaagaucaagcacgagggcgacugggacagcuucugcaagaccauccaguccgcccugagcgucguguccugcuacgugaaccugccgaccuacuacaucuacgacgaggagggcgggaacgaccucagccugcccgucaugaucuccgaguggccccuguucgagagcgacaaggaggaggacgugcagcaggcgcagcaggaggccacgcacaucgccgaggacguggucgaccagguggaggaggugaacuccaucuucgacaucgagaccgucgacgugaagcacgagaugagccccuucgagaugccguucgaggagcucaacgggcugaagauccugaagcagcucgacaacaacugcugggugaacuccgucaugcugcagauccagcugaccggcauccucgacggcgacuacgccaugcaguucuucaagauggggcggguggccaagaugaucgagcgcugcuacaccgcggagcagugcauccggggcgccaugggggacgugggccugugcauguaccgccugcucaaggaccugcacacgggguucauggucauggacuacaagugcagcugcaccuccggccggcuggaggagagcggcgccguccucuucugcacccccaccaagaaggccuuccccuacgggacgugccugaacugcaacgcgccccgcaugugcaccauccggcagcugcagggcaccaucaucuucgugcagcagaagccggagcccgugaaccccguguccuucgucgugaagcccgugugcagcuccaucuuccgcggggccgucagcugcggccacuaccagaccaacaucuacucccagaaccucugcguggacggcuucggggugaacaagauccagccguggacgaacgacgcccugaacaccaucugcaucaaggacgccgacuacaacgccaaggacgagaucagcgucacccccaucaagaacaccguggacacgauccccaaggaggaguucguggucaaggagaagcugaacgcguuccucgugcacggcaacguggucuucuaccagggggacguggacaccguggucaacggcguggacuucgacuucaucgugaacgccgccaacgagaaccuggcccacgggggcggccuggccaaggcgcucgacgucuacaccaaggggaagcugcagcggcugagcaaggagcacaucggccucgccgggaaggugcgcgugggcaccggggucaugguggagugcgacucccugcggaucuucaacguggucggcccccgcaagggcaagcacgagcgggaccugcucgugaaggccuacaacacgaucaacaacgagcaggggaccccgcugacccccauccugagcugcggcaucuucggggugaagcucgagaccucccuggagguccugcucgacgugugcaacacgaaggaguucaagguguucgucuacaccgacaccgaggugugcaaggugaaggacuucgucagcggccuggugaacgugcagaaggucgcccagcccaagaucgagcagaagcccgugucccugaucaagguggccccgaagcccuaccgcgucgacgggaaguucagcuacuucaccgaggaccuccugugcguggcggacgacaagcccaucgugcuguucacggacuccaugcucacccuggacgaccggggccuggcccuggacaacgcccucagcggcguccuguccgccgccaucaaggacugcguggacaucaacaaggcgauccccagcgggaaccugaucaaguucgacaucgacuccguggucguguacaugugcguggucccgagcgagaaggacaagcaccucgacaacaacgugcagcgcugcacccggaagcugaaccgccugaugugcgacaucgugugcaccauccccgccgacuacauccucccccugguccuguccagccucacgugcaacguguccuucgucggcgagcugaaggccgccgaggcgaaggugaucaccaucaaggugaccgaggacggggucaacgugcacgacgugaccgucacgaccgacaagagcuucgagcagcaggucggcgugaucgccgacaaggacaaggaccuguccggcgccgugcccagcgaccucaacaccuccgagcugcugaccaaggccaucgacguggacuggguggaguucuacggguucaaggacgccgucaccuucgcgacgguggaccacagcgccuucgccuacgagagcgccguggucaacggcauccgggugcucaagaccuccgacaacaacugcugggugaacgccgucugcaucgcgcugcaguaccugaagccgcacuucaucagccaggggcucgacgccgccuggaacaaguucgugcugggcgacguggagaucuucgucgccuucguguacuacguggcccgccuggucaagggggacaagggcgacgcggaggacacccucaacaagcuguccaaguaccuggugaacgaggcccaggugcagcucgagcacuacagcuccugcgucgagugcgacgccaaguucaagaacagcgugaccuccaucaacagcgccaucgugugcgcguccgucaagcgggacggcguccaggugggguacugcgugcacggcaucaaguacuacagccgcgugaaguccgugcgcgggcgggccaucaucgucagcguggagcagcuggagcccugcgugcagucccgccugcucagcggcgucgccuacacggccuucuccgggcccguggacaagggccacuacaccguguacgacaccgccaagaaguccauguacgacggcgaccgguucgucaagcacgaccugagccugcucagcgugaccagcguggucauggugggggacuacguggcgccggucuccacggugaagcccaagcccgugaucagccagcuggacgagaacgcccagaaguucuucgacuucggcgacuuccugguccacaacuucgugaucuucuucaccuggcuccuguccauguucacccugugcaagaccgccgucacgaccugcgacgugaagaucauggccaaggcgccccagcgcaccggggugguccucaagcggagccugaaguacaaccugaaggccuccgccgccgugcucaagagcaagugguggcugcuggccaaguucaccaagcuccugcugcucaucuacacgcuguacuccgugguccuguucugcgugcgcuucggcccguucgaguucugcagcgagaccgugaacggguacgccaaguccaacuucgucaaggacgacuacugcgacggcagccucggcugcaagaugugccuguucggguaccaggagcugucccaguucagccaccucgacgugguguggaagcacaucaccgacccccuguucuccaacauccagcccuucaucgucauggugcugcuccugaucuucggcgacaacuaccugcggugcuuccuccuguacuucguggcgcagaugaucagcaccgucgggguguuccugggcuacaaggagacgaacugguuccuccacuucauccccuucgacgugaucugcgacgagcuguucgucaccgugaucgugaucaaggucaucuccuucgugcgccacgugcuguucgggugcgagaacccggacugcaucgccugcagcaaguccgcccggcucaagcgcuuccccgucaacaccaucgugaacggcgugcagcggagcuucuacgucaacgccaacggcggguccaaguucugcaagaagcaccgcuucuucugcguggacugcgacagcuacggcuacgggagcaccuucaucacgcccgaggugucccgggagcugggcaacaucaccaagaccaacguccagcccaccggcccggcguacgugaugaucgacaagguggaguucgagaacggguucuaccgccuguacagcggcgagacguucuggcgguacaacuucgacaucaccgaguccaaguacagcugcaaggaggucuucaagaacugcaacgugcucgacgacuucaucguguucaacaacaacgggaccaacgucacccaggugaagaacgccuccguguacuucagccagcugcugugccgccccaucaagcucgucgacuccgagcugcugagcacgcucuccguggacuucaacggcgugcugcacaaggccuacaucgacguccugcggaacagcuucgggaaggaccucaacgccaacaugucccuggccgacugcaagagcgcgcugggccucuccaucagcgaccacgaguucaccuccgccaucagcaacgcccaccgcugcgacgugcugcuguccgaccucagcuucaacaacuucguguccagcuacgccaagcccgaggagaagcugagcgccuacgaccuggcgugcugcaugcgggccggcgccaaggucgugaacgccaacgugcucaccaaggaccagacccccaucgucuggcacgccaaggacuucaacucccugagcgcggaggggcgcaaguacaucgugaagacguccaaggccaagggccugaccuuccuccugaccaucaacgagaaccaggccgugacccagaucccggccaccagcaucgucgccaagcagggggcgugaggacuagucccuguucccagagcccacuuuuuuuucuuuuuuugaaauaaaauagccugucuuucagaucucaaaggcucuuuucagagccaccaaaaaaaaaaaaaaaaaaaaaaaaaaaaaaaaaaaaaaaaaaaaaaaaaaaaaaaaaaaaaaaaaaaaaaaaaaaaaaaaaaaaaaaaaaaaaaaaaaaaa

SEQ ID NO: 19482 - RNA, 4970 nt, Artificial Sequence
  HCoV/NL63/RPTEC/2004__JX504050.1__non-structural protein 3 (NSP3) mRNA gc
aggagagucccgcagucggcguccagcggcucugcuuguucgugugugugucguugcaggccuuauucaagcuuaccaugggcaagaucagcuucuccgacgacgugaucguccacgacguggagcccacccacaaggugaagcugaucuucgaguucgaggacgacgucgugaccagccucugcaagaaguccuucggcaagagcaucaucuacacgggggacugggaggggcugcacgaggugcugaccuccgccaugaacgucaucggccagcacaucaagcucccgcaguucuacaucuacgacgaggagggcggguacgacgugagcaagcccgugaugaucucccaguggcccaucagcaacgacuccaacggcugcgucguggaggccagcaccgacuuccaccagcuggagugcaucguggacgacuccguccgcgaggagguggacaucaucgagcagcccuucgaggagguggagcacguccugagcaucaagcagccguucuccuucagcuuccgggacgagcucggggugcgcgugcuggaccaguccgacaacaacugcuggaucagcaccacgcugguccagcuccagcugaccaagcugcucgacgacuccaucgagaugcagcuguucaaggugggcaagguggacagcaucguccagaagugcuacgagcugucccaccucaucagcgggagccugggcgacuccgggaagcugcucagcgagcugcugaaggagaaguacacgugcuccaucaccuucgagaugagcugcgacugcggcaagaaguucgacgaccaggugggcugccucuucuggaucaugcccuacaccaagcuguuccagaagggggagugcugcaucugccacaagaugcagaccuacaagcugguguccaugaagggcaccggggucuucgugcaggaccccgcgcccaucgacaucgacgccuucccggucaagcccaucugcagcuccguguaccucggcgugaagggcagcgggcacuaccagaccaaccuguacuccuucaacaaggccaucgacggcuucggggucuucgacaucaagaacagcuccgugaacacggugugcuucgucgacguggacuuccacagcguggagaucgaggccggcgaggucaagcccuucgccguguacaagaacgugaaguucuaccugggggacaucucccaccucgucaacugcgugagcuucgacuucguggucaacgcggccaacgagaaccugcugcacggcggcgggguggcccgggccaucgacauccucaccgagggccagcugcagucccugagcaaggacuacaucuccagcaacgggccccucaaggugggcgcgggggucaugcuggagugcgagaaguucaacguguucaacguggucggcccgcgcaccggcaagcacgagcacucccugcucguggaggccuacaacagcauccuguucgagaacgggaucccccugaugccccuccugagcugcggcaucuucggggugcggaucgagaacucccugaaggcccucuucagcugcgacaucaacaagccccugcaggucuucguguacuccagcaacgaggagcaggccgugcugaaguuccucgacggccuggaccugaccccggucaucgacgacguggacguggucaagcccuuccgcguggaggggaacuucuccuucuucgacugcggcgugaacgcccuggacggcgacaucuaccuccuguucacgaacagcauccugaugcucgacaagcaggggcagcugcuggacaccaagcucaacggcauccugcagcaggcggcccuggacuaccucgccaccgucaagaccgugcccgccgggaaccuggugaagcuggucguggaguccugcacgaucuacaugugcgugguccccagcaucaacgaccucuccuucgacaagaaccugggccggugcgugcgcaagcugaaccggcucaagaccugcgugaucgccaacgucccggcgaucgacgugcugaagaagcugcucagcucccugacccugaccgugaaguucgucguggagagcaacgugauggacgucaacgacugcuucaagaacgacaacguggugcucaagaucacggaggacggcaucaacgucaaggacguggucguggaguccagcaagucccuggggaagcagcugggcguggucagcgacgggguggacuccuucgagggcgugcuccccaucaacaccgacaccguccugagcguggcccccgagguggacugggucgccuucuacggguucgagaaggccgcccuguucgcgagccucgacgugaagcccuacggcuacccgaacgacuucgugggcggguuccgcguccugggcaccacggacaacaacugcugggugaacgcgaccugcaucauccugcaguaccucaagcccaccuucaaguccaaggggcugaacgugcuguggaacaaguucgucaccggcgacguggggcccuucgugagcuucaucuacuucaucacgauguccagcaagggccagaagggcgacgccgaggaggcccucuccaagcugagcgaguaccugaucuccgacagcaucgucacccucgagcaguacuccacgugcgacaucugcaagagcaccgugguggaggucaaguccgccaucgugugcgccagcgugcugaaggacgggugcgacgucggcuucugcccccaccggcacaagcugcgcucccgggugaaguucgugaacgggcgcgucgugaucaccaacgugggcgagccgaucaucagccagcccuccaagcuccugaacgggaucgccuacaccaccuucagcggcuccuucgacaacggccacuacgucguguacgacgccgccaacaacgcgguguacgacggggcccggcuguucagcuccgaccucagcacccuggccgucaccgccaucgugguggucggcgggugcgugacgagcaacgugcccaccaucgucuccgagaagaucagcgugauggacaagcuggacaccggcgcccagaaguucuuccaguucggggacuucgugaugaacaacaucguccucuuccugaccuggcugcucuccauguucagccugcugcgcacguccaucaugaagcacgacaucaaggugaucgcgaaggccccgaagcggaccggcgugauccucacccgcagcuucaaguacaacauccgguccgcccuguucgucaucaagcagaaguggugcgugaucgugacccuguucaaguuccuccugcugcucuacgccaucuacgcccuggucuucaugaucgugcaguucagccccuucaacucccugcucugcggcgacaucgugagcggguacgagaaguccacguucaacaaggacaucuacugcggcaacagcauggucugcaagaugugccuguucuccuaccaggaguucaacgaccuggaccacaccagccucguguggaagcacauccgcgaccccauccugaucucccugcagcccuucgucauccucgugauccugcugaucuucgggaacauguaccuccgguucggccugcuguacuucguggcgcaguucaucagcaccuucggcuccuuccucggguuccaccagaagcagugguuccugcacuucgucccguucgacgugcugugcaacgaguuccucgccaccuucaucgugugcaagaucguccuguucgugcgccacaucaucgugggcugcaacaacgccgacugcgucgccugcagcaaguccgcccgccugaagcgggugccccuccagacgaucaucaacgggaugcacaagagcuucuacgugaacgcgaacggcgggaccugcuucugcaacaagcacaacuucuucugcgucaacugcgacagcuucggccccggcaacaccuucaucaacggggacaucgcccgcgagcugggcaacguggugaagaccgccguccagcccacggccccggcguacgugaucaucgacaagguggacuucgucaacggguucuaccggcuguacuccggcgacaccuucuggcgcuacgacuucgacaucaccgagagcaaguacuccugcaaggaggugcucaagaacugcaacgugcuggagaacuucaucgucuacaacaacagcggguccaacaucacccagaucaagaacgccugcguguacuucagccagcugcucugcgagcccaucaagcuggugaacuccgagcugcucagcacgcuguccgucgacuucaacggcgugcugcacaaggccuacguggacguccucugcaacagcuucuucaaggagcugaccgccaacauguccauggccgagugcaaggcgacccugggccucaccgugagcgacgacgacuucguguccgccgucgccaacgcccaccgguacgacgugcugcugagcgaccucuccuucaacaacuucuucaucagcuacgccaagcccgaggacaagcuguccguguacgacaucgcgugcugcaugcgcgccgggagcaaggucgugaaccacaacgugcugaucaaggaguccauccccaucgucuggggcgugaaggacuucaacacgcugagccaggaggggaagaaguaccucgugaagaccaccaaggccaagggccugaccuuccugcucacguucaacgacaaccaggccaucacccaggucccggccaccagcaucguggcgaagcagggggccugaggacuagucccuguucccagagcccacuuuuuuuucuuuuuuugaaauaaaauagccugucuuucagaucucaaaggcucuuuucagagccaccaaaaaaaaaaaaaaaaaaaaaaaaaaaaaaaaaaaaaaaaaaaaaaaaaaaaaaaaaaaaaaaaaaaaaaaaaaaaaaaaaaaaaaaaaaaaaaaaaaaaa

SEQ ID NO: 19483 - RNA, 6044 nt, Artificial Sequence
  Bat SARS-like CoV/WIV1__KF367457.1__non-structural protein 3 (NSP3) mRNA gc
aggagagucccgcagucggcguccagcggcucugcuuguucgugugugugucguugcaggccuuauucaagcuuaccauggcccccaccaagggcgugaccuucggggaggacacgguccuggaggugcagggcuacaagaacgugcgcaucaccuucgagcucgacgagcgggucgacaaggugcugaacgagaagugcagcguguacaccgucgaguccgggaccgaggugacggaguucgccugcguggucgcggaggccguggugaagacccugcagccggucagcgaccuccugaccaacaugggcaucgaccuggacgagugguccguggccaccuucuaccucuucgacgacgccggggaggagaagcugagcucccgcauguacugcagcuucuacccgcccgacgacgaggaggacugcgacgaguacgacgaggaggaggaggugcuggaggaguccugcgcccacgaguacggcacggaggaggacuaccagggccucagccuggaguucggggcguccaccgagaugcaggucgaggaggaggaggaggaggacuggcugggcgacgccaccgagcucagcgagcacgagcccgagcccgagcugacccccgaggagcccgugaaccaguucacgggguaccugaagcucaccgacaacguggccaucaagugcgucgacaucgugaaggaggcccagaacgcgaaccccaccgugaucgucaacgccgccaacauccaccugaagcacggcgggggcguggccggcgcccugaacaaggcgaccaacggggccaugcagaaggaguccgacgacuacaucaagcucaacggcccgcugguggucgggggcagcugccugcucuccggccacaaccuggccaagaagugccugcacguggucgggcccaaccucaacgccggcgaggacauccagcugcugaaggccgcguacgagaacuucaacagccaggacacgcuccuggcgccccugcucuccgccgggaucuucggcgccaagccccugcagagccugcaggucugcgugcagaccguccggacccagguguacaucgccgugaacgacaaggcccucuacgagcaggucgugauggacuaccuggacucccugaagccgcgcguggaggcccccaagcaggaggagccgccccggaccgaggaccccaagaucgaggagaaguccgucgugcagaagcccaucgacgugaagcccaagaucaaggccugcaucgacgaggucacgaccacccucgaggagaccaaguuccugacgaacaagcugcuccuguucgccgacaucaacgggaagcuguaccacgacucccacaacaugcuccgcggcgaggacaugagcuuccuggagaaggacgcccccuacguggugggcgacgucaucaccagcggggacaucacgugcguggugaucccguccaagaaggcgggcgggaccacggagaugcugagccgggcccucaagaagguccccguggacgaguacaucaccaccuaccccggccaggggugcgccggcuacacccuggaggaggccaagacggcgcugaagaagugcaaguccgccuucuacgugcugcccagcgagaccccgaacgccaaggaggagauccucggcaccgucuccuggaaccugcgcgagaugcuggcccacgccgaggagacccggaagcucaugcccaucugcauggacgugcgcgcgaucauggccacgauccagcggaaguacaaggggaucaaggugcaggagggcaucgucgacuacggggugcgcuucuucuucuacaccagcaaggagcccguggccuccaucaucaccaagcugaacagccugaacgagccccucgucaccaugccgaucggcuacgugacccacggguucaaccuggaggaggccgcccggugcaugcgcucccugaaggcgcccgccguggucagcguguccagccccgacgccgugaccaccuacaacggcuaccucaccagcagcuccaagaccagcgaggagcacuucguggagacggugucccuggccggcagcuaccgggacugguacuacuccgggcagcggaccgagcugggcguggaguuccucaagcgcggggacaagaucgucuaccacacccuggagagcccgguggaguuccaccuggacggcgaggugcucccccuggacaagcugaagucccuccugagccugcgggaggucaagaccaucaagguguucacgaccguggacaacaccaaccuccacacccagcuggucgacaugagcaugacguacggccagcaguucgggcccaccuaccuggacggcgccgacgugaccaagaucaagccccacgugaaccacgaggggaagaccuucuucguccucccguccgacgacacgcugcggagcgaggcguucgaguacuaccacacccuggacgaguccuuccucggccgcuacaugagcgcccugaaccacaccaagaaguggaaguucccccaggucgggggccugaccuccaucaagugggccgacaacaacugcuaccucagcuccgugcugcuggcccuccagcagaucgaggugaaguucaacgcgcccgcccugcaggaggccuacuaccgggcccgcgccggcgacgcggccaacuucugcgcccugauccucgccuacagcaacaagacggugggggagcugggcgacgugcgcgagaccaugacccaccuccugcagcacgccaaccuggaguccgcgaagcggguccugaacguggucugcaagcacugcgggcagaagaccacgacccucaccggcguggaggccgugauguacauggggacccugagcuacgacaaccugaagacgggcgucuccauccccugcgugugcggccgcgacgccacccaguaccucgugcagcaggagagcuccuucgucaugaugagcgccccgcccgccgaguacaagcugcagcaggggaccuuccugugcgcgaacgaguacaccggcaacuaccagugcgggcacuacacgcacaucaccgccaaggagacccucuaccggaucgacggcgcccaccugaccaagauguccgaguacaaggggcccgugacggacguguucuacaaggagaccagcuacaccaccaccaucaagcccgucagcuacaagcuggacggcgugacguacaccgagaucgagccgaagcucgacggcuacuacaagaaggacaacgccuacuacaccgagcagcccaucgaccuggugcccacccagccccugccgaacgcguccuucgacaacuucaagcucacgugcagcaacaccaaguucgccgacgaccugaaccagaugaccggguucaccaagcccgccucccgcgagcuguacgucacguucuuccccgaccucaacggcgacgugguggccaucgacuaccggcacuacagcgccuccuucaagaagggggcgaagcugcugcacaagcccaucgucuggcacaucaaccaggccaccaccaagaccacguucaagccgaacaccuggugccuccgcugccuguggagcaccaagcccguggacaccuccaacagcuucgaggugcuggccgucgaggacacgcagggcauggacaaccucgccugcgagucccagcagcccaccagcgaggaggugguggagaaccccaccauccagaaggaggucaucgagugcgacgugaagaccacggagguggucgggaacgugauccugaagccguccgacgagggcgugaaggucacccaggagcuggaccacgaggaccucauggccgcguacguggagaacaccagcaucaccaucaagaagcccaacgagcugucccuggcccucggccugaagacgaucgccacccacgggaucgccgccaucaacagcgugcccugguccaagauccuggcguacgucaagccguuccucggccaggccgccaucaccaccagcaacugcgccaagcggcuggcccagcgcguguucaacaacuacaugcccuacgugcugacgcuccuguuccagcugugcaccuucaccaaguccaccaacagccggauccgcgcgucccuccccacgaccaucgccaagaacagcguccgcgggguggcccggcugugccuggacgccggcaucaacuacgucaagagccccaaguucuccaagcuguucaccaucgcgauguggcuccugcuccugagcaucugccugggcucccucaucuacgugaccgccgcccugggggugcugcucagcaacuucggcgccccguccuacugcagcggggugcgggaguccuaccugaacagcuccaacgucacgaccauggacuucugcgagggcagcuuccccugcuccgugugccugagcgggcucgacucccuggacagcuaccccgcccuggagaccauccaggugaccaucuccagcuacaagcucgaccugacgauccugggccuggcggccgagugguuccucgccuacaugcuguucaccaaguucuucuaccugcucggccuguccgccaucaugcaggucuucuucggguacuucgccagccacuucaucuccaacagcuggcugaugugguucaucaucagcaucgugcagauggcgcccguguccgccaugguccgcauguacaucuucuucgccagcuucuacuacaucuggaaguccuacgugcacaucauggacggcugcaccagcuccacgugcaugaugugcuacaagcggaaccgcgccacccggguggagugcaccaccaucgucaacgggaugaagcgcagcuucuacguguacgccaacggcgggcggggcuucugcaagacccacaacuggaacugccucaacugcgacaccuucugcacgggcuccaccuucaucagcgacgagguggcgcgcgaccugucccugcaguucaagcgcccgaucaaccccaccgaccagagcuccuacaucgucgacagcguggccgucaagaacggggcccuccaccuguacuucgacaaggccggccagaagaccuacgagcggcacccccugucccacuucaucaaccucgacaaccugcgcgcgaacaacacgaaggggagccugcccaucaacgugaucguguucgacggcaaguccaagugcgacgagagcgccgcccgguccgccagcgucuacuacucccagcucaugugccagccgauccugcugcucgaccaggcccugaucagcgacgugggggacagcaccgagguguccgucaagauguucgacgcguacguggacaccuucagcgccaccuucuccgugcccauggagaagcugcgcgcccucgucgccacggcccacagcgagcuggcgaagggcguggcccuggacggcgugcucuccaccuucgucagcgccgcccggcagggggugguggacaccgacgucgacaccaaggacgugaucgagugccugaagcugucccaccacagcgaccucgaggugacgggcgacuccugcaacaacuucaugcugaccuacaacaaggucgagaacaugacgccccgcgaccugggggccugcaucgacugcaacgcgcggcacaucaacgcccagguggccaagagccacaacgugucccucaucuggaacgucaaggacuacaugagccuguccgagcagcugcgcaagcagauccggagcgccgcgaagaagaacaacauccccuuccgccugaccugcgccaccacccgccagguggugaacgucaucaccaccaagaucucccucaagggcggcugaggacuagucccuguucccagagcccacuuuuuuuucuuuuuuugaaauaaaauagccugucuuucagaucucaaaggcucuuuucagagccaccaaaaaaaaaaaaaaaaaaaaaaaaaaaaaaaaaaaaaaaaaaaaaaaaaaaaaaaaaaaaaaaaaaaaaaaaaaaaaaaaaaaaaaaaaaaaaaaaaaaaa

SEQ ID NO: 19484 - RNA, 5789 nt, Artificial Sequence
  BatCoV/HKU9-1 BF_005I__NC_009021.1__non-structural protein 3 (NSP3) mRNA gc
aggagagucccgcagucggcguccagcggcucugcuuguucgugugugugucguugcaggccuuauucaagcuuaccaugggcgugagcaaggucaccuucggggacgaggaggugcacaccauccccaacacggugaccgucaacuucuccuacgacgugugcgagggccuggacgccauccucgacaaggugauggccccguuccaggucgaggaggggaccaagcuggaggaccuggcgugcguggugcagaaggccgucuacgagcgccucagcgaccuguucuccgacugccccgccgagcugcggcccaucaaccucgaggacuuccugaccagcgagugcuucguguacuccaaggacuacgagaagauccugaugcccgagauguacuucagccucgaggacgccgugccggucgacgacgagaugguggacgacaucgaggacacgguggagcaggccuccgacagcgacgaccaguggcugggcgacgagggggcggaggacugcgacaacaccauccaggacgucgacguggccaccuccaugaccacgcccugcggcuacaccaagaucgccgagcacguguacaucaagugcgccgacaucguccaggaggcgcgcaacuacagcuacgccgugcuggugaacgccgccaacgucaaccuccaccacggcgggggcguggccggggcgcugaaccgggccaccaacaacgccaugcagaaggaguccagcgaguacaucaaggccaacggcucccugcagcccgggggccacgugcuccugagcucccacggccuggccagccacgggauccuccacgucgugggccccgacaagcgccuggggcaggaccuggcgcuccuggacgccgucuacgccgccuacaccggcuucgacuccgugcugacgccgcucgugagcgccggcaucuucggguucaccgucgaggagucccugugcagccuggugaagaacguggcgugcaccaccuacgucgugguguacgaccggcagcucuacgagcgcgcccuggccacgagcuucgacguccccggcccccaguccagcgugcagcacgugcccgccaucgacugggccgaggcggucgaggugcaggaguccaucguggaccaggucgagaccccgagccugggggccguggacaccguggacuccaacgccgacagcggccucaacgagaccgcccggucccccgagaacgucguggggagcgugcccgacgacgucguggcggacguggaguccugcguccgcgaccuggugcgccagguggucaagaaggugaagcgggacaagcggcccccgcccaucgugccccagcagacggucgagcagcagccccaggagaucagcuccccgggcgacugcaacaccgugcugguggacgucgugagcauguccuucagcgccauggugaacuucggcaaggagaaggggcuccugauccccgucgugaucgacuaccccgccuuccugaaggugcucaagcgcuucucccccaaggagggccuguucagcuccaacggguacgaguucuacggcuacagccgggacaagccgcugcacgaggucuccaaggaccucaacagccuggggcgcccccugaucaugauccccuucggcuucaucgugaacggccagacccucgccgugagcgccgucuccaugcgggggcugaccgugccccacacgguggucgugccgagcgaguccagcgugccccuguaccgcgcguacuucaacggcgucuucuccggggacaccaccgccgugcaggacuucguggucgacauccuccugaacggcgcccgggacugggacgugcugcagaccacgugcaccgucgaccgcaagguguacaagaccaucugcaagcgggggaacaccuaccugugcuucgacgacacgaaccucuacgccaucaccggcgacgugguccugaaguucgccaccgugagcaaggcgcgcgccuaccuggagaccaagcucugcgcccccgagccgcugaucaaggugcugacgaccgucgacggcaucaacuacuccaccgugcucgugagcaccgcccaguccuaccgggcccagaucgggaccgucuucugcgacggccacgacuggagcaacaagaaccccaugcccacggacgaggggacccaccuguacaagcaggacaacuucuccagcgcggaggugaccgccauccgcgaguacuacggcguggacgacuccaacaucaucgcccgcgccaugagcauccggaagaccguccagacguggcccuacaccgugguggacggccgcguccugcucgcgcagcgggacuccaacugcuaccugaacguggccaucagccugcuccaggacaucgacguguccuucagcaccccgugggucugccgcgccuacgacgcccugaagggcgggaacccccugcccauggccgaggugcucaucgcgcuggggaaggccacccccggcgugagcgacgacgcccacaugguccuguccgccgugcucaaccacgggacggugaccgcccggcgcgucaugcagaccgugugcgagcacugcggcgugagccagauggucuucaccggcacggacgcgugcaccuucuacggguccguggugcuggacgaccuguacgccccggucagcguggugugccagugcggccggcccgccauccgcuacgucuccgagcagaagucccccuggcuccugaugagcugcacccccacccaggugccgcuggacacgagcgggaucuggaagaccgccaucguguuccggggccccgucaccgccgggcacuacauguacgcggugaacggcacccucaucuccguguacgacgccaacacgcgccggcgcaccagcgaccugaagcugcccgccaccgacauccucuacggccccaccuccuucacgagcgacuccaaggucgagaccuacuaccuggacggggugaagcggaccaccaucgacccggacuucagcaaguacgugaagcgcggcgacuacuacuucacgaccgcccccaucgaggucguggcggcccccaagcuggugaccuccuacgacggguucuaccucagcuccugccagaacccccagcuggccgagagcuucaacaaggccaucaacgccaccaagacgggcccgaugaagcugcucaccauguaccccaacgucgcgggggacgugguggccaucuccgacgacaacgucguggcccaccccuacggcagccugcacaugggcaagcccgugcuguucgucacccggccgaacaccuggaagaagcucgugccccugcugagcacggucguggugaacacccccaacaccuacgacguccucgccguggacccgcugcccgugaacaacgagaccuccgaggagcccaucagcgucaaggcccccaucccgcuguacgggcucaaggcgaccauggugcugaacggcacgaccuacgugcccgggaacaagggccaccuccucugccugaaggaguucacccugaccgaccuccagacguucuacgucgagggggugcagcccuucgugcugcugaaggccucccaccucagcaagguccugggccugcgcguguccgacagcucccuccacgugaaccaccugagcaagggcgucguguacgccuacgccgccacccggcugaccacccgcgugacgaccucccuccucgggggccuggucacccggagcgugcgcaagaccgcggacuucgugcgcuccacgaaccccgggagcaagugcgucggccugcugugccuguucuaccagcuguucaugcgguucuggcugcuggugaagaagccgcccaucgugaaggucuccggcaucaucgccuacaacaccgggugcggcgugacgaccugcgugcucaacuaccugcgcagccggugcgggaacaucuccuggagccgccugcucaagcugcugcgguacaugcucuacaucugguucgucuggaccugccugaccaucugcggcguguggcuguccgagcccuacgcccccagccucgugacccgcuucaaguacuuccuggggaucgucaugccgugcgacuacgugcuggugaacgagaccggcacgggcuggcuccaccaccugugcauggccgggauggacucccuggacuaccccgcccuccggaugcagcagcaccgcuacggcagccccuacaacuacaccuacauccugaugcugcucgaggcguucuucgccuaccugcuguacacccccgcccucccgaucgucgggauccuggccgugcugcaccucaucgugcuguaccugcccaucccccucggcaacagcuggcuggucguguuccuguacuacaucauccggcucgugcccuucaccuccaugcugcgcauguacaucgucaucgcguuccuguggcugugcuacaagggguuccuccacgugcgguacggcugcaacaacguggccugccugaugugcuacaagaagaacgucgccaagcgcaucgagugcagcacgguggugaacggcgucaagcggauguucuacgugaacgccaacgggggcacccacuucugcaccaagcacaacuggaacugcguguccugcgacaccuacacggucgacagcaccuucaucugccgccagguggcccuggaccucuccgcgcaguucaagcggccgaucauccacaccgacgaggccuacuacgaggugaccagcgucgaggugcgcaacggguacgucuacugcuacuucgaguccgacggccagcggagcuacgagcgcuuccccauggacgccuucacgaacguguccaagcugcacuacagcgagcugaagggggccgcccccgcguucaacgugcucgucuucgacgccaccaaccggaucgaggagaacgccgugaagaccgccgccaucuacuacgcgcagcuggccugcaagcccauccugcucguggacaagcgcauggucggcguggugggcgacgacgccaccaucgcccgggcgauguucgaggccuacgcccagaacuaccugcugaaguacuccaucgccauggacaaggucaagcaccucuacagcacggcccugcagcagaucuccagcgggaugaccguggaguccgugcugaaggucuucgugggcagcacccgcgcggaggccaaggaccucgaguccgacguggacaccaacgaccuggucagcugcauccgccugugccaccaggaggggugggaguggacgaccgacuccuggaacaaccucgugccgaccuacaucaagcaggacacccugagcacccuggaggugggccaguucaugacggccaacgccaaguacgucaacgccaacaucgcgaagggcgccgccgugaaccucaucuggcgguacgccgacuucaucaagcugagcgaguccaugcgccggcagcugaagguggccgcgcgcaagaccgggcucaaccugcuggucaccaccagcucccucaaggccgacgugcccugcauggugacgcccuucaagaucaucggcugaggacuagucccuguucccagagcccacuuuuuuuucuuuuuuugaaauaaaauagccugucuuucagaucucaaaggcucuuuucagagccaccaaaaaaaaaaaaaaaaaaaaaaaaaaaaaaaaaaaaaaaaaaaaaaaaaaaaaaaaaaaaaaaaaaaaaaaaaaaaaaaaaaaaaaaaaaaaaaaaaaaaa

SEQ ID NO: 19485 - RNA, 5141 nt, Artificial Sequence
  PEDV/NPL-PEDv/2013/P10__KJ778616.1__non-structural protein 3 (NSP3) mRNA gc
aggagagucccgcagucggcguccagcggcucugcuuguucgugugugugucguugcaggccuuauucaagcuuaccaugggcgacgugaaguucagcgacgaggucuccgugaagaccaucgaccccguguacaaggucagccuggaguucgaguucgaguccgagaccaucauggccgugcucaacaaggccguggggaacugcaucaaggucacgggcgggugggacgacgugguggaguacaucaacgucgcgaucgaggugcugaaggaccacaucgacgugccgaaguacuacaucuacgacgaggagggcgggaccgaccccaaccugcccgucauggugagccaguggccccucaacgacgacaccaucucccaggaccugcuggacguggaggucgugaccgacgccccgguggacuucgagggcgacgaggucgacagcuccgaccccgacaagguggccgacguggccaacagcgagcccgaggacgacggccucaacgucgcccccgagacgaacguggaguccgagguggaggaggucgcggccacccugagcuucaucaaggacaccccguccaccgugacgaaggaccccuucgccuucgacuucgccagcuacgggggccugaagguccuccgccagucccacaacaacugcugggugaccagcacccuggugcagcugcagcuccuggggaucgucgacgaccccgcgauggagcuguucuccgccggccggguggggcccauggugcgcaagugcuacgagagccagaaggccauccucggcucccugggcgacgucagcgccugccuggagucccucaccaaggaccugcacacgcugaagaucacgugcagcguggugugcgggugcggcaccggggagcggaucuacgacggcugcgccuuccgcaugaccccgacccucgagcccuuccccuacggcgcgugcgcccagugcgcccagguccugaugcacaccuucaagagcaucguggggaccggcaucuucugccgggacaccacggcccugucccucgacagccugguggucaagccccugugcgccgcggccuucaucgggaaggacuccggccacuacgugaccaacuucuacgacgccgccauggccaucgacggguacggccgccaccagaucaaguacgacacccucaacaccaucugcgugaaggacgucaacuggacggcgccguucgugcccgacguggagcccguccuggagcugguggugaagcccuucuacagcuacaagaacgucgacuucuaccagggcgacuucuccgaccucgugaagcugccgugcgacuucguggucaacgccgccaacgagaaccugagccacgggggcgggaucgccaaggccaucgacguguacaccaagggcaugcuccagaagugcuccaacgacuacaucaaggcgcacgggcccaucaaggugggccggggcgucaugcuggaggcccuggggcucaagguguucaacguggucggcccccgcaaggggaagcacgcccccgagcugcuggugaaggccuacaagagcguguucgcgaacuccggcgucgcccucaccccgcugaucagcguggggaucuucuccgugccccuggaggagagccucuccgccuuccuggccugcgucggcgaccggcacugcaagugcuucugcuacagcgacaaggagcgcgaggccaucaucaacuacauggacggccugguggacgcgaucuucaaggacgcccucguggacaccacgcccguccaggaggacgugcagcaggucucccagaagcccgugcugccgaacuucgagcccuuccggaucgagggggcccacgccuucuacgagugcaaccccgagggccugaugagccugggggccgacaagcucgugcuguucaccaacuccaaccuggacuucugcagcgugggcaagugccucaacaacgucaccggcggggcgcugcuggaggccaucaacguguucaagaaguccaacaagaccgugccggccggcaacugcgucacguucgagugcgccgacaugaucagcaucaccaugguggugcuccccagcgacggggacgccaacuacgacaagaacuacgcgcgcgccgucgugaaggucuccaagcugaagggcaagcugcuccuggccgugggggacgccaugcuguacagcaagcucucccaccugagcgugcugggcuucgucuccacccccgacgacguggagcgguucuacgcgaacaagagcguggucaucaaggugaccgaggacacgcgcuccgugaagaccgucaagguggagagcaccgugaccuacggccagcagaucgggcccugccucgucaacgacaccguggugacggacaacaagccggucguggccgacguggucgccaagguggugcccuccgccaacugggacagccacuacggcuucgacaaggccggggaguuccacaugcuggaccacaccggcuucgcguuccccuccgaggucgugaacgggcggcgcgugcugaagaccaccgacaacaacugcugggucaacgugacgugccuccagcugcaguucgcccgguuccgcuucaagagcgccggccugcaggccaugugggaguccuacugcaccggcgacguggccauguucguccacuggcucuacuggcugaccgggguggacaagggccagcccagcgacuccgagaacgcgcugaacaugcucagcaaguacaucgugccggccggguccgucaccaucgagcgggugacgcacgacggcugcugcugcagcaagcgcguggucaccgcccccguggugaacgccagcguccugaagcuggggguggaggacggccucugcccccacggccugaacuacaucgacaagguggucguggugaaggggaccaccaucgucgugaacgugggcaagcccgucguggccccgucccaccuguuccucaagggggugagcuacacgaccuuccuggacaacggcaacggggucgcgggccacuacaccguguucgaccacgacaccggcauggugcacgacggggacgucuucgugcccggcgaccugaacgucucccccgugacgaacguggucgugagcgagcagaccgccguggucaucaaggaccccgugaagaagguggagcucgacgccaccaagcugcuggacaccaugaacuacgccuccgagcgguucuucagcuucggggacuucaugucccgcaaccucaucacggucuuccuguacauccugagcauccucggccugugcuuccgcgcguuccggaagcgcgacgugaaggugcuggccggcgucccgcagcggaccgggaucauccuccgcaaguccgugcgguacaacgccaaggcccugggcguguucuucaagcugaagcucuacugguucaagguccuggggaaguucagccugggcaucuacgcccucuacgcgcugcuguucaugaccauccgcuucacccccaucgggggccccgugugcgacgacguggucgccggcuacgccaacuccagcuucgacaagaacgaguacugcaacuccgugaucugcaaggugugccucuacggguaccaggagcugagcgacuucucccacacgcaggucguguggcagcaccuccgggacccccugaucggcaacgugaugccguucuucuaccuggccuuccuggccaucuucgggggcgucuacgugaaggcgaucacccucuacuucaucuuccaguaccugaacauccuggggguguuccucggccugcagcagagcaucugguuccugcagcucguccccuucgacguguucggcgacgagaucguggucuucuucaucgugacccgcgugcugauguuccugaagcacgucuuccucgggugcgacaaggccuccugcguggccugcagcaaguccgcccggcugaagcgcgugcccguccagaccaucuuccagggcacgagcaagagcuucuacgugcacgccaacgggggcuccaaguucugcaagaagcacaacuucuucugccugaacugcgacagcuacgggcccggcugcaccuucaucaacgacgugaucgcgaccgaggucggcaacguggugaagcucaacguccagccgaccgggcccgccacgauccugaucgacaagguggaguucuccaacggcuucuacuaccuguacagcggggacaccuucuggaaguacaacuucgacaucaccgacaacaaguacacgugcaaggagucccucaagaacugcagcaucaucaccgacuucaucguguucaacaacaacggcuccaacgucaaccaggugaagaacgccugcguguacuucagccagaugcugugcaagcccgucaagcugguggacuccgcccuccuggccagccuguccguggacuucggcgcgagccuccacuccgccuucgucagcgugcuguccaacagcuucgggaaggaccuguccagcugcaacgacaugcaggacugcaaguccacccucggcuucgacgacgucccgcuggacaccuucaacgccgccguggcggaggcccaccgguacgacgugcugcucaccgacaugagcuucaacaacuucaccacgagcuacgccaagcccgaggagaagcugcccguccacgacaucgcgaccugcaugcgcgugggggccaagaucgugaaccacaacguccuggugaaggacuccauccccguggucuggcucgugcgggacuucaucgcccugagcgaggagacccgcaaguacaucauccggaccacgaaggugaagggcaucaccuucaugcugaccuucaacgacugccgcaugcacaccacgaucccgaccgucugcaucgccaacaagaaggggugaggacuagucccuguucccagagcccacuuuuuuuucuuuuuuugaaauaaaauagccugucuuucagaucucaaaggcucuuuucagagccaccaaaaaaaaaaaaaaaaaaaaaaaaaaaaaaaaaaaaaaaaaaaaaaaaaaaaaaaaaaaaaaaaaaaaaaaaaaaaaaaaaaaaaaaaaaaaaaaaaaaaa

SEQ ID NO: 19486 - RNA, 6293 nt, Artificial Sequence
  MHV/A59__NC_048217.1__non-structural protein 3 (NSP3) mRNA gc
aggagagucccgcagucggcguccagcggcucugcuuguucgugugugugucguugcaggccuuauucaagcuuaccaugggcaagaagguggaguucaacgacaagcccaagguccgcaagaucccgagcacccggaagaucaagaucaccuucgcccuggacgccacguucgacuccgugcucagcaaggcgugcuccgaguucgagguggacaaggacgucacccuggacgagcugcucgacguggugcuggacgccgucgagagcacccugucccccugcaaggagcacgacgugaucgggaccaaggugugcgcccuccuggaccgccuggccggcgacuacgucuaccucuucgacgagggcggggacgaggugaucgcgccccggauguacugcagcuucuccgcccccgacgacgaggacugcguggccgccgacgucguggacgccgacgagaaccaggacgacgacgcggaggacagcgccgugcuggucgccgacacgcaggaggaggacgggguggccaagggccagguggaggccgacuccgagaucugcgucgcgcacaccggcagccaggaggagcuggccgagccggacgccguggggucccagacccccaucgccagcgccgaggagaccgaggugggcgaggcguccgaccgcgaggggaucgccgaggccaaggccacggucugcgccgacgcgguggacgccugccccgaccagguggaggccuucgagaucgagaaggucgaggacagcauccucgacgagcugcagaccgagcugaacgcccccgccgacaagaccuacgaggacgugcucgcguucgacgccgucugcuccgaggcccugagcgccuucuacgcggugccguccgacgagacccacuucaaggugugcggcuucuacagccccgccaucgagcggacgaacugcuggcugcgcuccacccucaucgucaugcagagccugccccuggaguucaaggaccucgagaugcagaagcuguggcugagcuacaaggccggguacgaccagugcuucguggacaagcucgugaaguccguccccaagagcaucauccugccgcagggcggcuacguggccgacuucgccuacuucuuccugucccagugcagcuucaaggcguacgccaacuggcggugccucgagugcgacauggagcugaagcugcaggggcucgacgccauguucuucuacggcgacguggucucccacaugugcaagugcgggaacagcaugacccugcuguccgccgacauccccuacacccuccacuucggcgugcgcgacgacaaguucugcgccuucuacacgccccggaagguguuccgcgcggccugcgccgucgacgugaacgacugccacagcauggccguggucgagggcaagcagaucgacgggaagguggugaccaaguucaucggcgacaaguucgacuucauggucggguacggcaugaccuucuccaugagccccuucgagcuggcccagcuguacggguccugcaucaccccgaacgugugcuucgugaagggcgacgucaucaagguggugcggcucgucaacgcggaggugaucgugaaccccgccaacggccgcauggcccacggggccggcgucgcgggggccaucgccgagaaggccggcagcgccuucaucaaggagacguccgacauggugaaggcgcagggggugugccaggucggcgagugcuacgagagcgccggcgggaagcugugcaagaaggugcugaacaucgugggccccgacgcccgggggcacggcaagcagugcuacucccuccuggagcgcgccuaccagcacaucaacaagugcgacaacgucgugaccacccugaucagcgccgggaucuucuccgugcccaccgacgucagccucacguaccugcugggcguggugaccaagaacgucauccucguguccaacaaccaggacgacuucgacgugaucgagaagugccaggucaccagcguggcgggcaccaaggcccugagccugcagcuggccaagaaccucugccgggacgugaaguucgucacgaacgccugcuccagccuguucuccgagagcugcuucguguccagcuacgacgugcugcaggaggucgaggcccuccgccacgacauccagcuggacgacgacgcgcggguguucgugcaggccaacauggacugccugccgaccgacuggcgccucgucaacaaguucgacuccguggacgggguccggaccaucaaguacuucgagugccccggcgggaucuucgugagcucccagggcaagaaguucggcuacgugcagaacgggagcuucaaggaggccuccgucagccagauccgcgcccugcuggcgaacaagguggacgugcucugcaccgucgacggcgugaacuuccgguccugcugcguggccgagggggaggucuucggcaagacgcuggggagcguguucugcgacggcaucaacgugaccaagguccgcugcuccgccaucuacaagggcaagguguucuuccaguacagcgaccuguccgaggccgaccucguggccgucaaggacgcguucggguucgacgagccccagcugcugaaguacuacaccaugcucggcaugugcaaguggcccgugguggucugcgggaacuacuucgccuucaagcagagcaacaacaacugcuacaucaacguggccugccugaugcugcagcaccucagccugaaguucccgaaguggcaguggcaggaggccuggaacgaguuccgcuccggcaagccccugcgguucgugagccucguccuggccaagggguccuucaaguucaacgagcccagcgacuccaucgacuucaugcgcguggugcugcgggaggcggaccucagcggcgcgaccugcaaccuggaguucgucugcaagugcggcgugaagcaggagcagcgcaaggggguggacgccgucaugcacuucggcacgcuggacaagggggaccucgugcggggcuacaacaucgccugcacgugcggguccaagcuggugcacugcacccaguucaacguccccuuccugaucugcagcaacaccccggagggccgcaagcuccccgacgacgugguggccgccaacaucuucaccggcggguccgucggccacuacacccacgugaagugcaagcccaaguaccagcuguacgacgccugcaacgugaacaaggucagcgaggccaaggggaacuucaccgacugccuguaccucaagaaccugaagcagaccuucuccagcgugcugaccacguucuaccucgacgacgugaagugcgucgaguacaagccggaccugucccaguacuacugcgagagcggcaaguacuacaccaagcccaucaucaaggcccaguuccggaccuucgagaagguggacgggguguacaccaacuucaagcuggucggccacuccaucgccgagaagcucaacgcgaagcugggcuucgacugcaacagccccuucguggaguacaagaucacggaguggcccaccgccaccggggacgugguccuggccuccgacgaccucuacgugagccgcuaccuguccggcugcaucaccuucgggaagccgguggucuggcugggccacgaggaggccagccucaagagccugacguacuucaaccggcccuccguggugugcgagaacaaguucaacguccugcccguggacgucagcgagcccaccgacaagggcccggugcccgcggccgugcucgucaccggggugcccggcgccgacgccuccgccggggcgggcaucgccaaggagcagaaggccugcgccagcgccuccguggaggaccaggucgugaccgaggugcgccaggagcccagcgucuccgcggccgacgugaaggaggugaagcugaacggggucaagaagccggugaagguggagggcagcgucguggugaacgaccccacguccgagaccaaggucgucaagagccuguccaucguggacguguacgacauguuccucaccggcugcaaguacgugguguggaccgccaacgagcugagccggcuggucaacucccccacggugcgcgaguacgugaagugggggaugggcaagaucgucacccccgccaagcuccugcugcuccgggacgagaagcaggaguucguggccccgaagguggucaaggcgaaggccaucgccugcuacugcgccgugaagugguuccugcuguacugcuucagcuggaucaaguucaacaccgacaacaaggugaucuacaccacggaggucgcguccaagcucaccuucaagcugugcugccuggccuucaagaacgcccuccagaccuucaacuggagcguggugucccgcggguucuuccuggucgccaccguguuccugcucugguucaacuuccuguacgccaacgugauccugagcgacuucuaccuccccaacaucggcccccugcccacguucgucgggcagaucguggcgugguucaagaccaccuucggcguguccaccaucugcgacuucuaccaggucacggaccugggcuaccggagcagcuucugcaacggguccauggugugcgagcucugcuucagcggcuucgacaugcuggacaacuacgacgccaucaacgugguccagcacgugguggaccgccggcuguccuucgacuacaucagccucuucaagcuggucguggagcuggugaucggguacucccucuacaccgucugcuucuacccgcuguucgugcugaucggcaugcagcuccugaccaccuggcugcccgaguucuucaugcucgagacgaugcacuggagcgcccgccuguucgucuucguggccaacaugcugcccgccuucacccuccugcgguucuacaucguggucaccgcgauguacaagguguacugccugugccgccacgugauguacgggugcuccaagcccggcugccucuucugcuacaagcgcaaccggagcguccgcgugaagugcuccaccguggucggcgggagccugcgguacuacgacgugauggccaacggcgggaccggcuucugcacgaagcaccaguggaacugccugaacugcaacuccuggaagccgggcaacaccuucaucacccacgaggccgccgccgaccucagcaaggagcugaagcgccccgugaaccccaccgacuccgcguacuacagcgucacggaggugaagcaggucgggugcuccaugcggcuguucuacgagcgcgacggccagcggguguacgacgacgugaacgccagccucuucguggacaugaacgggcugcugcacuccaaggucaagggcgugccggagacccacguggucgugguggagaacgaggccgacaaggccggguuccugggcgcggccgucuucuacgcccagagccucuaccgccccaugcugaugguggagaagaagcugaucaccaccgccaacacgggccucuccgugagccggaccauguucgaccuguacgucgacagccugcucaacgugcuggacguggaccgcaagucccugaccagcuucgucaacgccgcgcacaacucccucaaggagggggugcagcuggagcaggucauggacaccuucaucggcugcgcccggcgcaagugcgccaucgacagcgacguggagacgaaguccaucaccaagagcgugauguccgccgugaacgccggggucgacuucaccgacgagagcugcaacaaccuggugcccaccuacgugaaguccgacacgaucgucgcggccgaccucggcgugcugauccagaacaacgccaagcacgugcaggccaacgucgccaaggcggccaacguggccugcaucuggagcguggacgccuucaaccagcuguccgccgaccuccagcaccggcugcgcaaggcgugcagcaagaccgggcugaagaucaagcucaccuacaacaagcaggaggccaacguccccauccugaccacgccguucucccugaagggcggcugaggacuagucccuguucccagagcccacuuuuuuuucuuuuuuugaaauaaaauagccugucuuucagaucucaaaggcucuuuucagagccaccaaaaaaaaaaaaaaaaaaaaaaaaaaaaaaaaaaaaaaaaaaaaaaaaaaaaaaaaaaaaaaaaaaaaaaaaaaaaaaaaaaaaaaaaaaaaaaaaaaaaa

SEQ ID NO: 19487 - RNA, 6113 nt, Artificial Sequence
  SARS-CoV-2/Wuhan-Hu-1__NC_045512.2/MN908947.2__non-structural protein 3 (NSP3) mRNA gc R9946
aggagagucccgcagucggcguccagcggcucugcuuguucgugugugugucguugcaggccuuauucaagcuuaccauggcccccaccaaggugaccuucggcgacgacaccgucaucgaggugcagggguacaagagcgugaacaucaccuucgagcuggacgagcgcaucgacaagguccucaacgagaagugcuccgccuacaccguggagcugggcaccgaggugaacgaguucgcgugcgucguggccgacgccgugaucaagacgcugcagccggucagcgagcuccugacgccccuggggaucgaccucgacgagugguccauggccaccuacuaccuguucgacgagagcggcgaguucaagcuggccucccacauguacugcagcuucuacccgcccgacgaggacgaggaggagggggacugcgaggaggaggaguucgagcccuccacccaguacgaguacggcacggaggacgacuaccagggcaagccccucgaguucggggcgaccagcgccgcccugcagcccgaggaggagcaggaggaggacuggcuggacgacgacucccagcagaccgugggccagcaggacgggagcgaggacaaccagaccacgaccauccagaccaucguggagguccagccccagcucgagauggagcugaccccgguggugcagacgaucgaggucaacuccuucagcggcuaccugaagcucaccgacaacguguacaucaagaacgccgacaucguggaggaggcgaagaaggucaagcccaccgugguggucaacgccgccaacguguaccugaagcacgggggcggcguggccggggcccugaacaaggcgaccaacaacgccaugcaggucgaguccgacgacuacaucgccacgaacggcccccucaaggucgggggcagcugcgugcuguccggccacaaccuggccaagcacugccuccacgugguggggcccaacgucaacaagggcgaggacauccagcugcucaagagcgccuacgagaacuucaaccagcacgaggugcugcuggcgccgcugcucuccgccgggaucuucggcgccgaccccauccacagccugcgggugugcgucgacaccgugcgcaccaacguguaccuggccgucuucgacaagaaccucuacgacaagcugguguccagcuuccuggagaugaaguccgagaagcaggucgagcagaagaucgccgagauccccaaggaggaggugaagcccuucaucaccgagagcaagccgagcguggagcagcggaagcaggacgacaagaagaucaaggcgugcguggaggaggucacgaccacccucgaggagaccaaguuccugacggagaaccugcuccuguacaucgacaucaacgggaaccugcaccccgacuccgccacccucgugagcgacaucgacaucaccuuccugaagaaggacgcccccuacaucgugggcgacgucgugcaggagggcgugcugaccgccgucgugauccccacgaagaaggccgggggcaccaccgagaugcucgcgaaggcccugcgcaaggugccgaccgacaacuacaucacgaccuaccccgggcagggccugaacggguacaccgucgaggaggccaagaccgugcucaagaagugcaaguccgccuucuacauccugcccagcaucaucuccaacgagaagcaggagauccugggcaccgugagcuggaaccugcgggagaugcucgcgcacgccgaggagacgcgcaagcugaugcccgucugcguggagaccaaggccaucguguccaccauccagcggaaguacaagggcaucaagauccaggagggggucguggacuacggcgcccgcuucuacuucuacaccagcaagacgaccguggccucccugaucaacacccucaacgaccugaacgagacccuggucacgaugccgcucggguacgugacccacggccugaaccuggaggaggcggcccgguacaugcgcagccucaaggugcccgccaccgucuccgugagcucccccgacgccgugaccgccuacaacggguaccugacgagcuccagcaagacccccgaggagcacuucaucgagaccaucucccuggcgggcagcuacaaggacuggagcuacuccggccagagcacccagcucgggaucgaguuccugaagcggggcgacaaguccgucuacuacacgagcaacccgaccaccuuccaccuggacggggaggugaucaccuucgacaaccucaagacgcugcugucccuccgcgaggugcggaccaucaaggucuucaccaccguggacaacaucaaccugcacacccagguggucgacaugagcaugaccuacggccagcaguucggccccaccuaccuggacggggccgacgugaccaagaucaagccccacaacucccacgagggcaagacguucuacgugcucccgaacgacgacacccugcgcgucgaggccuucgaguacuaccacaccaccgaccccagcuuccuggggcgguacauguccgcccucaaccacacgaagaaguggaaguacccccaggugaacggccugaccagcaucaagugggccgacaacaacugcuaccuggcgaccgcccuccugacccugcagcagaucgagcucaaguucaacccgcccgcccugcaggacgccuacuaccgcgcgcgggccggggaggccgccaacuucugcgcccugauccucgcguacugcaacaagacggugggcgagcugggcgacguccgcgagaccauguccuaccuguuccagcacgccaaccucgacagcugcaagcgggugcugaacgucgugugcaagaccugcgggcagcagcagaccacccugaagggcguggaggccgucauguacauggggacgcucuccuacgagcaguucaagaagggcgugcagauccccugcacgugcgggaagcaggccaccaaguaccuggugcagcaggagagccccuucgucaugauguccgcgcccccggcccaguacgagcugaagcacggcaccuucacgugcgccagcgaguacaccggcaacuaccagugcgggcacuacaagcacaucaccuccaaggagacccucuacugcaucgacggcgcccugcugaccaagagcagcgaguacaaggggcccaucaccgacguguucuacaaggagaacuccuacaccaccacgaucaagcccgugaccuacaagcucgacggcgucgugugcaccgagaucgaccccaagcuggacaacuacuacaagaaggacaacagcuacuucaccgagcagccgaucgaccuggugcccaaccagcccuaccccaacgccuccuucgacaacuucaaguucgucugcgacaacaucaaguucgccgacgaccucaaccagcugacgggguacaagaagccggcgagccgcgagcugaaggugaccuucuuccccgaccucaacggcgacguggucgccaucgacuacaagcacuacacccccuccuucaagaagggcgccaagcugcugcacaagcccaucguguggcacgugaacaacgccaccaacaaggcgacguacaagccgaacaccuggugcauccggugccucuggagcaccaagcccgucgagaccuccaacagcuucgacgugcugaaguccgaggacgcccaggggauggacaaccuggccugcgaggaccucaagcccgugagcgaggaggucguggagaaccccacgauccagaaggacgugcuggagugcaacgucaagaccaccgagguggugggcgacaucauccugaagccggccaacaacucccucaagaucaccgaggaggucgggcacacggaccugauggccgcguacguggacaacagcucccugaccaucaagaagcccaacgagcucagccgcgugcugggccugaagacccucgccacccacgggcuggccgccgucaacuccgugcccugggacacgaucgccaacuacgcgaagccguuccugaacaagguggucagcaccaccaccaacaucgugacgcgcugccucaaccgggugugcaccaacuacaugcccuacuucuucacccugcugcuccagcugugcaccuucacgcgcuccaccaacagccggaucaaggccuccaugcccaccaccaucgccaagaacaccgucaagagcgugggcaaguucugccuggaggccagcuucaacuaccucaagucccccaacuucagcaagcugaucaacaucaucaucugguuccugcuccuguccgugugccugggcagccucaucuacuccacggccgcgcuggggguccugaugagcaaccucggcaugccguccuacugcaccggguaccgcgagggcuaccugaacagcaccaacgugaccaucgccacguacugcaccggcuccauccccugcagcgugugccuguccgggcucgacagccuggacaccuaccccucccuggagaccauccagaucacgaucagcuccuucaagugggaccucaccgccuucggccuggucgccgagugguuccuggccuacauccucuucacccgguucuucuacgugcuggggcuggcggccaucaugcagcuguucuucagcuacuucgccgugcacuucaucuccaacagcuggcucauguggcugaucaucaaccugguccagauggcccccaucuccgcgauggugcgcauguacaucuucuucgccagcuucuacuacguguggaaguccuacguccacgugguggacggcugcaacagcagcacgugcaugaugugcuacaagcggaaccgcgccacgcgggucgagugcaccaccaucgugaacgggguccgccgguccuucuacguguacgccaacggcggcaagggguucugcaagcuccacaacuggaacugcgugaacugcgacaccuucugcgccggcagcacguucaucuccgacgaggucgcgcgcgaccugagccugcaguucaagcggccgaucaaccccaccgaccaguccagcuacaucguggacuccgugaccgucaagaacgggagcauccaccucuacuucgacaaggccggccagaagaccuacgagcgccacucccugagccacuucgugaaccuggacaaccuccgggccaacaacacgaaggggucccugcccaucaacgugaucgucuucgacggcaagagcaagugcgaggaguccagcgccaaguccgccagcguguacuacucccagcugaugugccagcccauccuccugcuggaccaggcgcucgugagcgacgucggcgacagcgccgagguggccgugaagauguucgacgccuacgucaacaccuucuccagcaccuucaacgugccgauggagaagcugaagacccugguggccacggcggaggccgagcucgccaagaacgucucccuggacaacgugcugagcaccuucaucuccgccgcgcgccagggguucguggacagcgacgucgagaccaaggacgugguggagugccucaagcugucccaccagagcgacaucgaggucaccggcgacuccugcaacaacuacaugcugacguacaacaagguggagaacaugacgccccgggaccucggggccugcaucgacugcagcgcccgccacaucaacgcccagguggccaagucccacaacaucgcgcugaucuggaacgucaaggacuucaugagccuguccgagcagcuccggaagcagauccgcagcgccgccaagaagaacaaccugcccuucaagcugaccugcgccaccacccgccagguggugaacgucgugaccaccaagaucgcccucaagggcgggugaggacuagucccuguucccagagcccacuuuuuuuucuuuuuuugaaauaaaauagccugucuuucagaucucaaaggcucuuuucagagccaccaaaaaaaaaaaaaaaaaaaaaaaaaaaaaaaaaaaaaaaaaaaaaaaaaaaaaaaaaaaaaaaaaaaaaaaaaaaaaaaaaaaaaaaaaaaaaaaaaaaaa

SEQ ID NO: 19488 - RNA, 6113 nt, Artificial Sequence
  SARS-CoV-2/Wuhan/WIV05/2019__EPI_ISL_402128__non-structural protein 3 (NSP3) mRNA gc
aggagagucccgcagucggcguccagcggcucugcuuguucgugugugugucguugcaggccuuauucaagcuuaccauggcccccaccaaggugaccuucggcgacgacacggucaucgaggugcagggguacaagagcgugaacaucaccuucgagcuggacgagcgcaucgacaagguccucaacgagaagugcuccgccuacaccguggagcugggcaccgaggugaacgaguucgcgugcgucguggccgacgccgugaucaagacgcugcagccggucagcgagcuccugaccccccuggggaucgaccucgacgagugguccauggccaccuacuaccuguucgacgagagcggcgaguucaagcuggccucccacauguacugcagcuucuacccccccgacgaggacgaggaggagggggacugcgaggaggaggaguucgagccguccacccaguacgaguacggcacggaggacgacuaccagggcaagccccucgaguucggggcgaccagcgccgcccugcagcccgaggaggagcaggaggaggacuggcuggacgacgacucccagcagaccgugggccagcaggacgggagcgaggacaaccagaccacgaccauccagaccaucguggagguccagccccagcucgagauggagcugaccccgguggugcagacgaucgaggucaacuccuucagcggcuaccugaagcucaccgacaacguguacaucaagaacgccgacaucguggaggaggcgaagaaggucaagcccaccgugguggucaacgccgccaacguguaccugaagcacgggggcggcguggccggggcccugaacaaggcgaccaacaacgccaugcaggucgaguccgacgacuacaucgccacgaacggcccccucaagguggggggcagcugcguccuguccggccacaaccuggccaagcacugccuccacgugguggggcccaacgucaacaagggcgaggacauccagcugcugaagagcgccuacgagaacuucaaccagcacgaggugcuccuggcgccgcugcucuccgccgggaucuucggcgccgaccccauccacagccugcgggugugcgucgacaccgugcgcaccaacguguaccuggccgucuucgacaagaaccucuacgacaagcugguguccagcuuccuggagaugaagagcgagaagcagguggagcagaagaucgccgagauccccaaggaggaggucaagcccuucaucaccgaguccaagccgagcguggagcagcggaagcaggacgacaagaagaucaaggcgugcguggaggaggucacgaccacccucgaggagaccaaguuccugacggagaaccugcuccuguacaucgacaucaacgggaaccugcaccccgacuccgccacccucgugagcgacaucgacaucaccuuccugaagaaggacgcccccuacaucgugggcgacgucgugcaggagggcgugcugaccgccgucgugauccccacgaagaaggccgggggcaccaccgagaugcucgcgaaggcccugcgcaaggugccgaccgacaacuacaucacgaccuaccccgggcagggccugaacggguacaccgucgaggaggccaagaccgugcucaagaagugcaaguccgccuucuacauccugcccagcaucaucuccaacgagaagcaggagauccugggcaccgugagcuggaaccugcgggagaugcucgcgcacgccgaggagacgcgcaagcugaugcccgucugcguggagaccaaggccaucguguccaccauccagcggaaguacaagggcaucaagauccaggagggggucguggacuacggcgcccgcuucuacuucuacaccagcaagacgaccguggccucccugaucaacacccucaacgaccugaacgagacccuggucacgaugccgcucggguacgugacccacggccugaaccuggaggaggcggcccgguacaugcgcagccucaaggugcccgccaccgucuccgugagcucccccgacgccgugaccgccuacaacggguaccugacgagcuccagcaagacccccgaggagcacuucaucgagaccaucucccuggcgggcagcuacaaggacuggagcuacuccggccagagcacccagcucgggaucgaguuccugaagcggggcgacaaguccgucuacuacacgagcaacccgaccaccuuccaccuggacggggaggugaucaccuucgacaaccucaagacgcugcugucccuccgcgaggugcggaccaucaaggucuucaccaccguggacaacaucaaccugcacacgcagguggucgacaugagcaugaccuacggccagcaguucggccccaccuaccuggacggggccgacgugaccaagaucaagccccacaacucccacgagggcaagacguucuacgugcucccgaacgacgacacccugcgcgucgaggccuucgaguacuaccacaccaccgaccccagcuuccuggggcgguacauguccgcccucaaccacacgaagaaguggaaguacccccaggugaacggccugaccagcaucaagugggccgacaacaacugcuaccuggcgaccgcccuccugacccugcagcagaucgagcucaaguucaaccccccggcccugcaggacgccuacuaccgcgcgcgggccggggaggccgccaacuucugcgcccugauccucgcguacugcaacaagacggugggcgagcugggcgacguccgcgagaccauguccuaccuguuccagcacgccaaccucgacagcugcaagcgggugcugaacgucgugugcaagaccugcgggcagcagcagaccacccugaagggcguggaggccgucauguacauggggacgcucuccuacgagcaguucaagaagggcgugcagauccccugcaccugcgggaagcaggccaccaaguaccuggugcagcaggagagccccuucgucaugauguccgcccccccggcgcaguacgagcugaagcacggcaccuucacgugcgccagcgaguacaccggcaacuaccagugcgggcacuacaagcacaucaccuccaaggagacccucuacugcaucgacggcgcccugcugacgaagagcagcgaguacaaggggcccaucaccgacguguucuacaaggagaacuccuacaccaccacgaucaagcccgugaccuacaagcucgacggcgucgugugcaccgagaucgaccccaagcuggacaacuacuacaagaaggacaacagcuacuucaccgagcagccgaucgaccuggugcccaaccagcccuaccccaacgccuccuucgacaacuucaaguucgucugcgacaacaucaaguucgccgacgaccucaaccagcugacgggguacaagaagccggcgagccgcgagcugaaggugaccuucuuccccgaccucaacggcgacguggucgccaucgacuacaagcacuacacccccuccuucaagaagggcgccaagcugcugcacaagcccaucguguggcacgugaacaacgccaccaacaaggcgacguacaagccgaacaccuggugcauccggugccucuggagcaccaagcccgucgagaccuccaacagcuucgacgugcugaaguccgaggacgcccaggggauggacaaccuggccugcgaggaccucaagcccgugagcgaggaggucguggagaaccccacgauccagaaggacgugcuggagugcaacgucaagaccaccgagguggugggcgacaucauccugaagccggccaacaacucccucaagaucaccgaggaggucgggcacacggaccugauggccgcguacguggacaacagcucccugaccaucaagaagcccaacgagcucagccgcgugcugggccugaagacccucgccacccacgggcuggccgccgucaacuccgugcccugggacacgaucgccaacuacgcgaagccguuccugaacaagguggucagcaccaccaccaacaucgugacgcgcugccucaaccgggugugcaccaacuacaugcccuacuucuucacccugcugcuccagcugugcaccuucacgcgcuccaccaacagccggaucaaggccuccaugcccaccaccaucgccaagaacaccgucaagagcgugggcaaguucugccuggaggccagcuucaacuaccucaagucccccaacuucagcaagcugaucaacaucaucaucugguuccugcuccuguccgugugccugggcagccucaucuacuccacggccgcgcugagcguccugauguccaaccucgggaugccgagcuacugcaccggcuaccgcgagggguaccugaacuccaccaacgugaccaucgccacguacugcaccggcagcauccccugcuccgugugccugagcggccucgacucccuggacaccuaccccagccuggagaccauccagaucacgaucuccagcuucaagugggaccucaccgccuucgggcuggucgccgagugguuccuggccuacauccucuucacccgguucuucuacgugcugggccuggcggccaucaugcagcucuucuucuccuacuucgccgugcacuucaucagcaacuccuggcugauguggcugaucaucaaccugguccagauggcccccaucagcgcgauggugcgcauguacaucuucuucgccagcuucuacuacguguggaaguccuacguccacgugguggacgggugcaacagcuccaccugcaugaugugcuacaagcggaaccgcgccacgcgggucgagugcaccaccaucgugaacggcguccgccggagcuucuacguguacgccaacgggggcaagggcuucugcaagcuccacaacuggaacugcgugaacugcgacaccuucugcgccggguccacguucaucagcgacgaggucgcgcgcgaccugucccugcaguucaagcggccgaucaaccccaccgaccagagcuccuacaucguggacagcgugaccgucaagaacggcuccauccaccucuacuucgacaaggccgggcagaagaccuacgagcgccacagccugucccacuucgugaaccuggacaaccuccgggccaacaacacgaagggcagccugcccaucaacgugaucgucuucgacgggaaguccaagugcgaggagagcuccgccaagagcgccuccguguacuacagccagcugaugugccagcccauccuccugcuggaccaggcgcucgugagcgacgucggcgacuccgccgagguggccgugaagauguucgacgccuacgucaacaccuucagcuccaccuucaacgugccgauggagaagcugaagacccugguggccacggcggaggccgagcucgccaagaacgucagccuggacaacgugcuguccaccuucaucagcgccgcgcgccagggcuucguggacuccgacgucgagaccaaggacgugguggagugccucaagcugagccaccaguccgacaucgaggucaccggggacagcugcaacaacuacaugcugacguacaacaagguggagaacaugaccccccgggaccucggcgccugcaucgacugcuccgcccgccacaucaacgcccagguggccaagagccacaacaucgcgcugaucuggaacgucaaggacuucaugucccugagcgagcagcuccggaagcagauccgcuccgccgccaagaagaacaaccugcccuucaagcugaccugcgccaccacgcgccagguggugaacgucgugaccaccaagaucgcccucaaggggggcugaggacuagucccuguucccagagcccacuuuuuuuucuuuuuuugaaauaaaauagccugucuuucagaucucaaaggcucuuuucagagccaccaaaaaaaaaaaaaaaaaaaaaaaaaaaaaaaaaaaaaaaaaaaaaaaaaaaaaaaaaaaaaaaaaaaaaaaaaaaaaaaaaaaaaaaaaaaaaaaaaaaaa

SEQ ID NO: 19489 - RNA, 6113 nt, Artificial Sequence
  SARS-CoV-2__MT919525.1__non-structural protein 3 (NSP3) mRNA gc
aggagagucccgcagucggcguccagcggcucugcuuguucgugugugugucguugcaggccuuauucaagcuuaccauggcccccaccaaggugaccuucggcgacgacacggucaucgaggugcagggguacaagagcgugaacaucaccuucgagcuggacgagcgcaucgacaagguccucaacgagaagugcuccgccuacaccguggagcugggcaccgaggugaacgaguucgcgugcgucguggccgacgccgugaucaagacgcugcagccggucagcgagcuccugaccccccuggggaucgaccucgacgagugguccauggccaccuacuaccuguucgacgagagcggcgaguucaagcuggccucccacauguacugcagcuucuacccccccgacgaggacgaggaggagggggacugcgaggaggaggaguucgagccguccacccaguacgaguacggcacggaggacgacuaccagggcaagccccucgaguucggggcgaccagcgccgcccugcagcccgaggaggagcaggaggaggacuggcuggacgacgacucccagcagaccgugggccagcaggacgggagcgaggacaaccagaccacgaccauccagaccaucguggagguccagccccagcucgagauggagcugaccccgguggugcagacgaucgaggucaacuccuucagcggcuaccugaagcucaccgacaacguguacaucaagaacgccgacaucguggaggaggcgaagaaggucaagcccaccgugguggucaacgccgccaacguguaccugaagcacgggggcggcguggccggggcccugaacaaggcgaccaacaacgccaugcaggucgaguccgacgacuacaucgccacgaacggcccccucaagguggggggcagcugcguccuguccggccacaaccuggccaagcacugccuccacgugguggggcccaacgucaacaagggcgaggacauccagcugcugaagagcgccuacgagaacuucaaccagcacgaggugcuccuggcgccgcugcucuccgccgggaucuucggcgccgaccccauccacagccugcgggugugcgucgacaccgugcgcaccaacguguaccuggccgucuucgacaagaaccucuacgacaagcugguguccagcuuccuggagaugaagagcgagaagcagguggagcagaagaucgccgagauccccaaggaggaggucaagcccuucaucaccgaguccaagccgagcguggagcagcggaagcaggacgacaagaagaucaaggcgugcguggaggaggucacgaccacccucgaggagaccaaguuccugacggagaaccugcuccuguacaucgacaucaacgggaaccugcaccccgacuccgccacccucgugagcgacaucgacaucaccuuccugaagaaggacgcccccuacaucgugggcgacgucgugcaggagggcgugcugaccgccgucgugauccccacgaagaaggccgggggcaccaccgagaugcucgcgaaggcccugcgcaaggugccgaccgacaacuacaucacgaccuaccccgggcagggccugaacggguacaccgucgaggaggccaagaccgugcucaagaagugcaaguccgccuucuacauccugcccagcaucaucuccaacgagaagcaggagauccugggcaccgugagcuggaaccuccgggagaugcuggcgcacgccgaggagacgcgcaagcugaugcccgucugcguggagaccaaggccaucguguccaccauccagcggaaguacaagggcaucaagauccaggagggggucguggacuacggcgcccgcuucuacuucuacaccagcaagacgaccguggccucccugaucaacacccucaacgaccugaacgagacccuggucacgaugccgcucggguacgugacccacggccugaaccuggaggaggcggcccgguacaugcgcagccucaaggugcccgccaccgucuccgugagcucccccgacgccgugaccgccuacaacggguaccugacgagcuccagcaagacccccgaggagcacuucaucgagaccaucucccuggcgggcagcuacaaggacuggagcuacuccggccagagcacccagcucgggaucgaguuccugaagcggggcgacaaguccgucuacuacacgagcaacccgaccaccuuccaccuggacggggaggugaucaccuucgacaaccucaagacgcugcugucccuccgcgaggugcggaccaucaaggucuucaccaccguggacaacaucaaccugcacacgcagguggucgacaugagcaugaccuacggccagcaguucggccccaccuaccuggacggggccgacgugaccaagaucaagccccacaacucccacgagggcaagacguucuacgugcucccgaacgacgacacccugcgcgucgaggccuucgaguacuaccacaccaccgaccccagcuuccuggggcgguacauguccgcccucaaccacacgaagaaguggaaguacccccaggugaacggccugaccagcaucaagugggccgacaacaacugcuaccuggcgaccgcccuccugacccugcagcagaucgagcucaaguucaaccccccggcccugcaggacgccuacuaccgcgcgcgggccggggaggccgccaacuucugcgcccugauccucgcguacugcuccaagacggugggcgagcugggcgacguccgcgagaccaugagcuaccuguuccagcacgccaaccucgacuccugcaagcgggugcugaacgucgugugcaagaccugcgggcagcagcagaccacccugaagggcguggaggccgucauguacauggggacgcucagcuacgagcaguucaagaagggcgugcagauccccugcaccugcgggaagcaggccaccaaguaccuggugcagcaggagucccccuucgucaugaugagcgcccccccggcgcaguacgagcugaagcacggcaccuucacgugcgccuccgaguacaccggcaacuaccagugcgggcacuacaagcacaucaccagcaaggagacccucuacugcaucgacggcgcccugcugacgaagagcuccgaguacaaggggcccaucaccgacguguucuacaaggagaacagcuacaccaccacgaucaagcccgugaccuacaagcucgacggcgucgugugcaccgagaucgaccccaagcuggacaacuacuacaagaaggacaacuccuacuucaccgagcagccgaucgaccuggugcccaaccagcccuaccccaacgccagcuucgacaacuucaaguucgucugcgacaacaucaaguucgccgacgaccucaaccagcugacgggguacaagaagccggcgucccgcgagcugaaggugaccuucuuccccgaccucaacggcgacguggucgccaucgacuacaagcacuacacccccagcuucaagaagggcgccaagcugcugcacaagcccaucguguggcacgugaacaacgccaccaacaaggcgacguacaagccgaacaccuggugcauccggugccucugguccaccaagcccgucgagaccagcaacuccuucgacgugcugaagagcgaggacgcccaggggauggacaaccuggccugcgaggaccucaagcccguguccgaggaggucguggagaaccccacgauccagaaggacgugcuggagugcaacgucaagaccaccgagguggugggcgacaucauccugaagccggccaacaacagccucaagaucaccgaggaggucgggcacacggaccugauggccgcguacguggacaacuccagccugaccaucaagaagcccaacgagcucucccgcgugcugggccugaagacccucgccacccacgggcuggccgccgucaacagcgugcccugggacacgaucgccaacuacgcgaagccguuccugaacaagguggucuccaccaccaccaacaucgugacgcgcugccucaaccgggugugcaccaacuacaugcccuacuucuucacccugcugcuccagcugugcaccuucacccgcagcacgaacucccggaucaaggccagcaugcccaccaccaucgccaagaacaccgucaagagcgugggcaaguucugccuggaggccuccuucaacuaccucaagagccccaacuucuccaagcugaucaacaucaucaucugguuccugcuccugagcgugugccugggcucccucaucuacagcacggccgcgcuggggguccugauguccaaccucggcaugccgagcuacugcaccggguaccgcgagggcuaccugaacuccaccaacgugaccaucgccacguacugcaccggcagcauccccugcuccgugugccugagcgggcucgacucccuggacaccuaccccagccuggagaccauccagaucacgaucuccagcuucaagugggaccucaccgccuucggccuggucgccgagugguuccuggccuacauccucuucacccgguucuucuacgugcuggggcuggcggccaucaugcagcucuucuucuccuacuucgccgugcacuucaucagcaacuccuggcugauguggcugaucaucaaccugguccagauggcccccaucagcgcgauggugcgcauguacaucuucuucgccagcuucuacuacguguggaaguccuacguccacgugguggacggcugcaacagcuccaccugcaugaugugcuacaagcggaaccgcgccacgcgggucgagugcaccaccaucgugaacgggguccgccggagcuucuacguguacgccaacggcggcaagggguucugcaagcuccacaacuggaacugcgugaacugcgacaccuucugcgccggcuccacguucaucagcgacgaggucgcgcgcgaccugucccugcaguucaagcggccgaucaaccccaccgaccagagcuccuacaucguggacagcgugaccgucaagaacggguccauccaccucuacuucgacaaggccggccagaagaccuacgagcgccacagccugucccacuucgugaaccuggacaaccuccgggccaacaacacgaaggggagccugcccaucaacgugaucgucuucgacggcaaguccaagugcgaggagagcuccgccaagagcgccuccguguacuacagccagcugaugugccagcccauccuccugcuggaccaggcgcucgugagcgacgucggcgacuccgccgagguggccgugaagauguucgacgccuacgucaacaccuucagcuccaccuucaacgugccgauggagaagcugaagacccugguggccacggcggaggccgagcucgccaagaacgucagccuggacaacgugcuguccaccuucaucagcgccgcgcgccagggguucguggacuccgacgucgagaccaaggacgugguggagugccucaagcugagccaccaguccgacaucgaggucaccggcgacagcugcaacaacuacaugcugacguacaacaagguggagaacaugaccccccgggaccucggggccugcaucgacugcuccgcccgccacaucaacgcccagguggccaagagccacaacaucgcgcugaucuggaacgucaaggacuucaugucccugagcgagcagcuccggaagcagauccgcuccgccgccaagaagaacaaccugcccuucaagcugaccugcgccaccacgcgccagguggugaacgucgugaccaccaagaucgcccucaagggcgggugaggacuagucccuguucccagagcccacuuuuuuuucuuuuuuugaaauaaaauagccugucuuucagaucucaaaggcucuuuucagagccaccaaaaaaaaaaaaaaaaaaaaaaaaaaaaaaaaaaaaaaaaaaaaaaaaaaaaaaaaaaaaaaaaaaaaaaaaaaaaaaaaaaaaaaaaaaaaaaaaaaaaa

SEQ ID NO: 19490 - RNA, 6113 nt, Artificial Sequence
  SARS-CoV-2__MT919768.1__non-structural protein 3 (NSP3) mRNA gc
aggagagucccgcagucggcguccagcggcucugcuuguucgugugugugucguugcaggccuuauucaagcuuaccauggcccccaccaaggugaccuucggcgacgacacggucaucgaggugcagggguacaagagcgugaacaucaccuucgagcuggacgagcgcaucgacaagguccucaacgagaagugcuccgccuacaccguggagcugggcaccgaggugaacgaguucgcgugcgucguggccgacgccgugaucaagacgcugcagccggucagcgagcuccugaccccccuggggaucgaccucgacgagugguccauggccaccuacuaccuguucgacgagagcggcgaguucaagcuggccucccacauguacugcagcuucuacccccccgacgaggacgaggaggagggggacugcgaggaggaggaguucgagccguccacccaguacgaguacggcacggaggacgacuaccagggcaagccccucgaguucggggcgaccagcgccgcccugcagcccgaggaggagcaggaggaggacuggcuggacgacgacucccagcagaccgugggccagcaggacgggagcgaggacaaccagaccacgaccauccagaccaucguggagguccagccccagcucgagauggagcugaccccgguggugcagacgaucgaggucaacuccuucagcggcuaccugaagcucaccgacaacguguacaucaagaacgccgacaucguggaggaggcgaagaaggucaagcccaccgugguggucaacgccgccaacguguaccugaagcacgggggcggcguggccggggcccugaacaaggcgaccaacaacgccaugcaggucgaguccgacgacuacaucgccacgaacggcccccucaagguggggggcagcugcguccuguccggccacaaccuggccaagcacugccuccacgugguggggcccaacgucaacaagggcgaggacauccagcugcugaagagcgccuacgagaacuucaaccagcacgaggugcuccuggcgccgcugcucuccgccgggaucuucggcgccgaccccauccacagccugcgggugugcgucgacaccgugcgcaccaacguguaccuggccgucuucgacaagaaccucuacgacaagcugguguccagcuuccuggagaugaagagcgagaagcagguggagcagaagaucgccgagauccccaaggaggaggucaagcccuucaucaccgaguccaagccgagcguggagcagcggaagcaggacgacaagaagaucaaggcgugcguggaggaggucacgaccacccucgaggagaccaaguuccugacggagaaccugcuccuguacaucgacaucaacgggaaccugcaccccgacuccgccacccucgugagcgacaucgacaucaccuuccugaagaaggacgcccccuacaucgugggcgacgucgugcaggagggcgugcugaccgccgucgugauccccacgaagaaggccgggggcaccaccgagaugcucgcgaaggcccugcgcaaggugccgaccgacaacuacaucacgaccuaccccgggcagggccugaacggguacaccgucgaggaggccaagaccgugcucaagaagugcaaguccgccuucuacauccugcccagcaucaucuccaacgagaagcaggagauccugggcaccgugagcuggaaccuccgggagaugcuggcgcacgccgaggagacgcgcaagcugaugcccgucugcguggagaccaaggccaucguguccaccauccagcggaaguacaagggcaucaagauccaggagggggucguggacuacggcgcccgcuucuacuucuacaccagcaagacgaccguggccucccugaucaacacccucaacgaccugaacgagacccuggucacgaugccgcucggguacgugacccacggccugaaccuggaggaggcggcccgguacaugcgcagccucaaggugcccgccaccgucuccgugagcucccccgacgccgugaccgccuacaacggguaccugacgagcuccagcaagacccccgaggagcacuucaucgagaccaucucccuggcgggcagcuacaaggacuggagcuacuccggccagagcacccagcucgggaucgaguuccugaagcggggcgacaaguccgucuacuacacgagcaacccgaccaccuuccaccuggacggggaggugaucaccuucgacaaccucaagacgcugcugucccuccgcgaggugcggaccaucaaggucuucaccaccguggacaacaucaaccugcacacgcagguggucgacaugagcaugaccuacggccagcaguucggccccaccuaccuggacggggccgacgugaccaagaucaagccccacaacucccacgagggcaagacguucuacgugcucccgaacgacgacacccugcgcgucgaggccuucgaguacuaccacaccaccgaccccagcuuccuggggcgguacauguccgcccucaaccacacgaagaaguggaaguacccccaggugaacggccugaccagcaucaagugggccgacaacaacugcuaccuggcgaccgcccuccugacccugcagcagaucgagcucaaguucaaccccccggcccugcaggacgccuacuaccgcgcgcgggccggggaggccgccaacuucugcgcccugauccucgcguacugcaacaagacggugggcgagcugggcgacguccgcgagaccauguccuaccuguuccagcacgccaaccucgacagcugcaagcgggugcugaacgucgugugcaagaccugcgggcagcagcagaccacccugaagggcguggaggccgucauguacauggggacgcucuccuacgagcaguucaagaagggcgugcagauccccugcaccugcgggaagcaggccaccaaguaccuggugcagcaggagagccccuucgucaugauguccgcccccccggcgcaguacgagcugaagcacggcaccuucacgugcgccagcgaguacaccggcaacuaccagugcgggcacuacaagcacaucaccuccaaggagacccucuacugcaucgacggcgcccugcugacgaagagcagcgaguacaaggggcccaucaccgacguguucuacaaggagaacuccuacaccaccacgaucaagcccgugaccuacaagcucgacggcgucgugugcaccgagaucgaccccaagcuggacaacuacuacaagaaggacaacagcuacuucaccgagcagccgaucgaccuggugcccaaccagcccuaccccaacgccuccuucgacaacuucaaguucgucugcgacaacaucaaguucgccgacgaccucaaccagcugacgggguacaagaagccggcgagccgcgagcugaaggugaccuucuuccccgaccucaacggcgacguggucgccaucgacuacaagcacuacacccccuccuucaagaagggcgccaagcugcugcacaagcccaucguguggcacgugaacaacgccaccaacaaggcgacguacaagccgaacaccuggugcauccggugccucuggagcaagaagcccgucgagaccuccaacagcuucgacgugcugaaguccgaggacgcccaggggauggacaaccuggccugcgaggaccucaagcccgugagcgaggaggucguggagaaccccaccauccagaaggacgugcuggagugcaacgucaagacgaccgagguggugggcgacaucauccugaagccggccaacaacucccucaagaucaccgaggaggucgggcacaccgaccugauggccgcguacguggacaacagcucccugacgaucaagaagcccaacgagcucagccgcgugcugggccugaagacccucgccacccacgggcuggccgccgucaacuccgugcccugggacaccaucgccaacuacgcgaagccguuccugaacaagguggucagcacgaccaccaacaucgugacccgcugccucaaccgggugugcacgaacuacaugcccuacuucuucacccugcugcuccagcugugcaccuucacccgcuccaccaacagccggaucaaggccuccaugcccacgaccaucgccaagaacaccgucaagagcgugggcaaguucugccuggaggccagcuucaacuaccucaagucccccaacuucagcaagcugaucaacaucaucaucugguuccugcuccuguccgugugccugggcagccucaucuacuccaccgccgcgcuggggguccugaugagcaaccucggcaugccguccuacugcacgggguaccgcgagggcuaccugaacagcaccaacgugaccaucgccaccuacugcacgggcuccauccccugcagcgugugccuguccgggcucgacagccuggacaccuaccccucccuggagaccauccagaucaccaucagcuccuucaagugggaccucacggccuucggccuggucgccgagugguuccuggccuacauccucuucacccgguucuucuacgugcuggggcuggcggccaucaugcagcucuucuucagcuacuucgccgugcacuucaucuccaacagcuggcugauguggcugaucaucaaccugguccagauggcccccaucuccgcgauggugcgcauguacaucuucuucgccagcuucuacuacguguggaagagcuacguccacgugguggacggcugcaacuccagcaccugcaugaugugcuacaagcggaaccgcgccacccgggucgagugcacgaccaucgugaacgggguccgccgguccuucuacguguacgccaacggcggcaagggguucugcaagcuccacaacuggaacugcgugaacugcgacaccuucugcgccggcagcaccuucaucuccgacgaggucgcgcgcgaccugagccugcaguucaagcggccgaucaaccccacggaccaguccagcuacaucguggacuccgugaccgucaagaacgggagcauccaccucuacuucgacaaggccggccagaagaccuacgagcgccacucccugagccacuucgugaaccuggacaaccuccgggccaacaacaccaaggggucccugcccaucaacgugaucgucuucgacggcaagagcaagugcgaggaguccagcgccaaguccgccagcguguacuacucccagcugaugugccagcccauccuccugcuggaccaggcgcucgugagcgacgucggcgacagcgccgagguggccgugaagauguucgacgccuacgucaacacguucuccagcaccuucaacgugccgauggagaagcugaagacccugguggccaccgcggaggccgagcucgccaagaacgucucccuggacaacgugcugagcacguucaucuccgccgcgcgccagggguucguggacagcgacgucgagaccaaggacgugguggagugccucaagcugucccaccagagcgacaucgaggucaccggcgacuccugcaacaacuacaugcugaccuacaacaagguggagaacaugacgccccgggaccucggggccugcaucgacugcagcgcccgccacaucaacgcccagguggccaagucccacaacaucgcgcugaucuggaacgucaaggacuucaugagccuguccgagcagcuccggaagcagauccgcagcgccgccaagaagaacaaccugcccuucaagcugaccugcgccaccacccgccagguggugaacgucgugacgaccaagaucgcccucaagggcgggugaggacuagucccuguucccagagcccacuuuuuuuucuuuuuuugaaauaaaauagccugucuuucagaucucaaaggcucuuuucagagccaccaaaaaaaaaaaaaaaaaaaaaaaaaaaaaaaaaaaaaaaaaaaaaaaaaaaaaaaaaaaaaaaaaaaaaaaaaaaaaaaaaaaaaaaaaaaaaaaaaaaaa

SEQ ID NO: 19491 - RNA, 6113 nt, Artificial Sequence
  SARS-CoV-2__MT919771.1__non-structural protein 3 (NSP3) mRNA gc
aggagagucccgcagucggcguccagcggcucugcuuguucgugugugugucguugcaggccuuauucaagcuuaccauggcccccaccaaggugaccuucggcgacgacacggucaucgaggugcagggguacaagagcgugaacaucaccuucgagcuggacgagcgcaucgacaagguccucaacgagaagugcuccgccuacaccguggagcugggcaccgaggugaacgaguucgcgugcgucguggccgacgccgugaucaagacgcugcagccggucagcgagcuccugaccccccuggggaucgaccucgacgagugguccauggccaccuacuaccuguucgacgagagcggcgaguucaagcuggccucccacauguacugcagcuucuacccccccgacgaggacgaggaggagggggacugcgaggaggaggaguucgagccguccacccaguacgaguacggcacggaggacgacuaccagggcaagccccucgaguucggggcgaccagcgccgcccugcagcccgaggaggagcaggaggaggacuggcuggacgacgacucccagcagaccgugggccagcaggacgggagcgaggacaaccagaccacgaccauccagaccaucguggagguccagccccagcucgagauggagcugaccccgguggugcagacgaucgaggucaacuccuucagcggcuaccugaagcucaccgacaacguguacaucaagaacgccgacaucguggaggaggcgaagaaggucaagcccaccgugguggucaacgccgccaacguguaccugaagcacgggggcggcguggccggggcccugaacaaggcgaccaacaacgccaugcaggucgaguccgacgacuacaucgccacgaacggcccccucaagguggggggcagcugcguccuguccggccacaaccuggccaagcacugccuccacgugguggggcccaacgucaacaagggcgaggacauccagcugcugaagagcgccuacgagaacuucaaccagcacgaggugcuccuggcgccgcugcucuccgccgggaucuucggcgccgaccccauccacagccugcgggugugcgucgacaccgugcgcaccaacguguaccuggccgucuucgacaagaaccucuacgacaagcugguguccagcuuccuggagaugaagagcgagaagcagguggagcagaagaucgccgagauccccaaggaggaggucaagcccuucaucaccgaguccaagccgagcguggagcagcggaagcaggacgacaagaagaucaaggcgugcguggaggaggucacgaccacccucgaggagaccaaguuccugacggagaaccugcuccuguacaucgacaucaacgggaaccugcaccccgacuccgccacccucgugagcgacaucgacaucaccuuccugaagaaggacgcccccuacaucgugggcgacgucgugcaggagggcgugcugaccgccgucgugauccccacgaagaaggccgggggcaccaccgagaugcucgcgaaggcccugcgcaaggugccgaccgacaacuacaucacgaccuaccccgggcagggccugaacggguacaccgucgaggaggccaagaccgugcucaagaagugcaaguccgccuucuacauccugcccagcaucaucuccaacgagaagcaggagauccugggcaccgugagcuggaaccuccgggagaugcuggcgcacgccgaggagacgcgcaagcugaugcccgucugcguggagaccaaggccaucguguccaccauccagcggaaguacaagggcaucaagauccaggagggggucguggacuacggcgcccgcuucuacuucuacaccagcaagacgaccguggccucccugaucaacacccucaacgaccugaacgagacccuggucacgaugccgcucggguacgugacccacggccugaaccuggaggaggcggcccgguacaugcgcagccucaaggugcccgccaccgucuccgugagcucccccgacgccgugaccgccuacaacggguaccugacgagcuccagcaagacccccgaggagcacuucaucgagaccaucucccuggcgggcagcuacaaggacuggagcuacuccggccagagcacccagcucgggaucgaguuccugaagcggggcgacaaguccgucuacuacacgagcaacccgaccaccuuccaccuggacggggaggugaucaccuucgacaaccucaagacgcugcugucccuccgcgaggugcggaccaucaaggucuucaccaccguggacaacaucaaccugcacacgcagguggucgacaugagcaugaccuacggccagcaguucggccccaccuaccuggacggggccgacgugaccaagaucaagccccacaacucccacgagggcaagacguucuacgugcucccgaacgacgacacccugcgcgucgaggccuucgaguacuaccacaccaccgaccccagcuuccuggggcgguacauguccgcccucaaccacacgaagaaguggaaguacccccaggugaacggccugaccagcaucaagugggccgacaacaacugcuaccuggcgaccgcccuccugacccugcagcagaucgagcucaaguucaaccccccggcccugcaggacgccuacuaccgcgcgcgggccggggaggccgccaacuucugcgcccugauccucgcguacugcaacaagacggugggcgagcugggcgacguccgcgagaccauguccuaccuguuccagcacgccaaccucgacagcugcaagcgggugcugaacgucgugugcaagaccugcgggcagcagcagaccacccugaagggcguggaggccgucauguacauggggacgcucuccuacgagcaguucaagaagggcgugcagauccccugcaccugcgggaagcaggccaccaaguaccuggugcagcaggagagccccuucgucaugauguccgcccccccggcgcaguacgagcugaagcacggcaccuucacgugcgccagcgaguacaccggcaacuaccagugcgggcacuacaagcacaucaccuccaaggagacccucuacugcaucgacggcgcccugcugacgaagagcagcgaguacaaggggcccaucaccgacguguucuacaaggagaacuccuacaccaccacgaucaagcccgugaccuacaagcucgacggcgucgugugcaccgagaucgaccccaagcuggacaacuacuacaagaaggacaacagcuacuucaccgagcagccgaucgaccuggugcccaaccagcccuaccccaacgccuccuucgacaacuucaaguucgucugcgacaacaucaaguucgccgacgaccucaaccagcugacgggguacaagaagccggcgagccgcgagcugaaggugaccuucuuccccgaccucaacggcgacguggucgccaucgacuacaagcacuacacccccuccuucaagaagggcgccaagcugcugcacaagcccaucguguggcacgugaacaacgccaccaacaaggcgacguacaagccgaacaccuggugcauccggugccucuggagcaccaagcccgucgagaccuccaacagcuucgacgugcugaaguccgaggacgcccaggggauggacaaccuggccugcgaggaccucaagcccgugagcgaggaggucguggagaaccccacgauccagaaggacgugcuggagugcaacgucaagaccaccgagguggugggcgacaucauccugaagccggccaacaacucccucaagaucaccgaggaggucgggcacacggaccugauggccgcguacguggacaacagcucccugaccaucaagaagcccaacgagcucagccgcgugcugggccugaagacccucgccacccacgggcuggccgccgucaacuccgugcccugggacacgaucgccaacuacgcgaagccguuccugaacaagguggucagcaccaccaucaacaucgugacccgcugccucaaccgggugugcacgaacuacaugcccuacuucuucacccugcugcuccagcugugcaccuucacccgcuccaccaacagccggaucaaggccuccaugcccacgaccaucgccaagaacaccgucaagagcgugggcaaguucugccuggaggccagcuucaacuaccucaagucccccaacuucagcaagcugaucaacaucaucaucugguuccugcuccuguccgugugccugggcagccucaucuacuccaccgccgcgcuggggguccugaugagcaaccucggcaugccguccuacugcacgggguaccgcgagggcuaccugaacagcaccaacgugaccaucgccaccuacugcacgggcuccauccccugcagcgugugccuguccgggcucgacagccuggacaccuaccccucccuggagaccauccagaucaccaucagcuccuucaagugggaccucacggccuucggccuggucgccgagugguuccuggccuacauccucuucacccgguucuucuacgugcuggggcuggcggccaucaugcagcucuucuucagcuacuucgccgugcacuucaucuccaacagcuggcugauguggcugaucaucaaccugguccagauggcccccaucuccgcgauggugcgcauguacaucuucuucgccagcuucuacuacguguggaagagcuacguccacgugguggacggcugcaacuccagcaccugcaugaugugcuacaagcggaaccgcgccacccgggucgagugcacgaccaucgugaacgggguccgccgguccuucuacguguacgccaacggcggcaagggguucugcaagcuccacaacuggaacugcgugaacugcgacaccuucugcgccggcagcaccuucaucuccgacgaggucgcgcgcgaccugagccugcaguucaagcggccgaucaaccccacggaccaguccagcuacaucguggacuccgugaccgucaagaacgggagcauccaccucuacuucgacaaggccggccagaagaccuacgagcgccacucccugagccacuucgugaaccuggacaaccuccgggccaacaacaccaaggggucccugcccaucaacgugaucgucuucgacggcaagagcaagugcgaggaguccagcgccaaguccgccagcguguacuacucccagcugaugugccagcccauccuccugcuggaccaggcgcucgugagcgacgucggcgacagcgccgagguggccgugaagauguucgacgccuacgucaacacguucuccagcaccuucaacgugccgauggagaagcugaagacccugguggccaccgcggaggccgagcucgccaagaacgucucccuggacaacgugcugagcacguucaucuccgccgcgcgccagggguucguggacagcgacgucgagaccaaggacgugguggagugccucaagcugucccaccagagcgacaucgaggucaccggcgacuccugcaacaacuacaugcugaccuacaacaagguggagaacaugacgccccgggaccucggggccugcaucgacugcagcgcccgccacaucaacgcccagguggccaagucccacaacaucgcgcugaucuggaacgucaaggacuucaugagccuguccgagcagcuccggaagcagauccgcagcgccgccaagaagaacaaccugcccuucaagcugaccugcgccaccacccgccagguggugaacgucgugacgaccaagaucgcccucaagggcgggugaggacuagucccuguucccagagcccacuuuuuuuucuuuuuuugaaauaaaauagccugucuuucagaucucaaaggcucuuuucagagccaccaaaaaaaaaaaaaaaaaaaaaaaaaaaaaaaaaaaaaaaaaaaaaaaaaaaaaaaaaaaaaaaaaaaaaaaaaaaaaaaaaaaaaaaaaaaaaaaaaaaaa

SEQ ID NO: 19492 - RNA, 6113 nt, Artificial Sequence
  SARS-CoV-2__MT919775.1__non-structural protein 3 (NSP3) mRNA gc
aggagagucccgcagucggcguccagcggcucugcuuguucgugugugugucguugcaggccuuauucaagcuuaccauggcccccaccaaggugaccuucggcgacgacacggucaucgaggugcagggguacaagagcgugaacaucaccuucgagcuggacgagcgcaucgacaagguccucaacgagaagugcuccgccuacaccguggagcugggcaccgaggugaacgaguucgcgugcgucguggccgacgccgugaucaagacgcugcagccggucagcgagcuccugaccccccuggggaucgaccucgacgagugguccauggccaccuacuaccuguucgacgagagcggcgaguucaagcuggccucccacauguacugcagcuucuacccccccgacgaggacgaggaggagggggacugcgaggaggaggaguucgagccguccacccaguacgaguacggcacggaggacgacuaccagggcaagccccucgaguucggggcgaccagcgccgcccugcagcccgaggaggagcaggaggaggacuggcuggacgacgacucccagcagaccgugggccagcaggacgggagcgaggacaaccagaccacgaccauccagaccaucguggagguccagccccagcucgagauggagcugaccccgguggugcagacgaucgaggucaacuccuucagcggcuaccugaagcucaccgacaacguguacaucaagaacgccgacaucguggaggaggcgaagaaggucaagcccaccgugguggucaacgccgccaacguguaccugaagcacgggggcggcguggccggggcccugaacaaggcgaccaacaacgccaugcaggucgaguccgacgacuacaucgccacgaacggcccccucaagguggggggcagcugcguccuguccggccacaaccuggccaagcacugccuccacgugguggggcccaacgucaacaagggcgaggacauccagcugcugaagagcgccuacgagaacuucaaccagcacgaggugcuccuggcgccgcugcucuccgccgggaucuucggcgccgaccccauccacagccugcgggugugcgucgacaccgugcgcaccaacguguaccuggccgucuucgacaagaaccucuacgacaagcugguguccagcuuccuggagaugaagagcgagaagcagguggagcagaagaucgccgagauccccaaggaggaggucaagcccuucaucaccgaguccaagccgagcguggagcagcggaagcaggacgacaagaagaucaaggcgugcguggaggaggucacgaccacccucgaggagaccaaguuccugacggagaaccugcuccuguacaucgacaucaacgggaaccugcaccccgacuccgccacccucgugagcgacaucgacaucaccuuccugaagaaggacgcccccuacaucgugggcgacgucgugcaggagggcgugcugaccgccgucgugauccccacgaagaaggccgggggcaccaccgagaugcucgcgaaggcccugcgcaaggugccgaccgacaacuacaucacgaccuaccccgggcagggccugaacggguacaccgucgaggaggccaagaccgugcucaagaagugcaaguccgccuucuacauccugcccagcaucaucuccaacgagaagcaggagauccugggcaccgugagcuggaaccuccgggagaugcuggcgcacgccgaggagacgcgcaagcugaugcccgucugcguggagaccaaggccaucguguccaccauccagcggaaguacaagggcaucaagauccaggagggggucguggacuacggcgcccgcuucuacuucuacaccagcaagacgaccguggccucccugaucaacacccucaacgaccugaacgagacccuggucacgaugccgcucggguacgugacccacggccugaaccuggaggaggcggcccgguacaugcgcagccucaaggugcccgccaccgucuccgugagcucccccgacgccgugaccgccuacaacggguaccugacgagcuccagcaagacccccgaggagcacuucaucgagaccaucucccuggcgggcagcuacaaggacuggagcuacuccggccagagcacccagcucgggaucgaguuccugaagcggggcgacaaguccgucuacuacacgagcaacccgaccaccuuccaccuggacggggaggugaucaccuucgacaaccucaagacgcugcugucccuccgcgaggugcggaccaucaaggucuucaccaccguggacaacaucaaccugcacacgcagguggucgacaugagcaugaccuacggccagcaguucggccccaccuaccuggacggggccgacgugaccaagaucaagccccacaacucccacgagggcaagacguucuacgugcucccgaacgacgacacccugcgcgucgaggccuucgaguacuaccacaccaccgaccccagcuuccuggggcgguacauguccgcccucaaccacacgaagaaguggaaguacccccaggugaacggccugaccagcaucaagugggccgacaacaacugcuaccuggcgaccgcccuccugacccugcagcagaucgagcucaaguucaaccccccggcccugcaggacgccuacuaccgcgcgcgggccggggaggccgccaacuucugcgcccugauccucgcguacugcaacaagacggugggcgagcugggcgacguccgcgagaccauguccuaccuguuccagcacgccaaccucgacagcugcaagcgggugcugaacgucgugugcaagaccugcgggcagcagcagaccacccugaagggcguggaggccgucauguacauggggacgcucuccuacgagcaguucaagaagggcgugcagauccccugcaccugcgggaagcaggccaccaaguaccuggugcagcaggagagccccuucgucaugauguccgcccccccggcgcaguacgagcugaagcacggcaccuucacgugcgccagcgaguacaccggcaacuaccagugcgggcacuacaagcacaucaccuccaaggagacccucuacugcaucgacggcgcccugcugacgaagagcagcgaguacaaggggcccaucaccgacguguucuacaaggagaacuccuacaccaccacgaucaagcccgugaccuacaagcucgacggcgucgugugcaccgagaucgaccccaagcuggacaacuacuacaagaaggacaacagcuacuucaccgagcagccgaucgaccuggugcccaaccagcccuaccccaacgccuccuucgacaacuucaaguucgucugcgacaacaucaaguucgccgacgaccucaaccagcugacgggguacaagaagccggcgagccgcgagcugaaggugaccuucuuccccgaccucaacggcgacguggucgccaucgacuacaagcacuacacccccuccuucaagaagggcgccaagcugcugcacaagcccaucguguggcacgugaacaacgccaccaacaaggcgacguacaagccgaacaccuggugcauccggugccucuggagcaccaagcccgucgagaccuccaacagcuucgacgugcugaaguccgaggacgcccaggggauggacaaccuggccugcgaggaccucaagcccgugagcgaggaggucguggagaaccccacgauccagaaggacgugcuggagugcaacgucaagaccaccgagguggugggcgacaucauccugaagccggccaacaacucccucaagaucaccgaggaggucgggcacacggaccugauggccgcguacguggacaacagcucccugaccaucaagaagcccaacgagcucagccgcgugcugggccugaagacccucgccacccacgggcuggccgccgucaacuccgugcccugggacacgaucgccaacuacgcgaagccguuccugaacaagguggucagcaccaccaccaacaucgugacgcgcugccucaaccgggugugcaccaacuacaugcccuacuucuucacccugcugcuccagcugugcaccuucacccgcuccacgaacagccggaucaaggccuccaugcccaccaccaucgccaagaacaccgucaagagcgugggcaaguucugccuggaggccagcuucaacuaccucaagucccccaacuucagcaagcugaucaacaucaucaucugguuccugcuccuguccgugugccugggcagccucaucuacuccacggccgcgcuggggguccugaugagcaaccucggcaugccguccuacugcaccggguaccgcgagggcuaccugaacagcaucaacgugaccaucgccaccuacugcacgggcuccauccccugcagcgugugccuguccgggcucgacagccuggacaccuaccccucccuggagaccauccagaucaccaucagcuccuucaagugggaccucacggccuucggccuggucgccgagugguuccuggccuacauccucuucacccgguucuucuacgugcuggggcuggcggccaucaugcagcucuucuucagcuacuucgccgugcacuucaucuccaacagcuggcugauguggcugaucaucaaccugguccagauggcccccaucuccgcgauggugcgcauguacaucuucuucgccagcuucuacuacguguggaagagcuacguccacgugguggacggcugcaacuccagcaccugcaugaugugcuacaagcggaaccgcgccacccgggucgagugcacgaccaucgugaacgggguccgccgguccuucuacguguacgccaacggcggcaagggguucugcaagcuccacaacuggaacugcgugaacugcgacaccuucugcgccggcagcaccuucaucuccgacgaggucgcgcgcgaccugagccugcaguucaagcggccgaucaaccccacggaccaguccagcuacaucguggacuccgugaccgucaagaacgggagcauccaccucuacuucgacaaggccggccagaagaccuacgagcgccacucccugagccacuucgugaaccuggacaaccuccgggccaacaacaccaaggggucccugcccaucaacgugaucgucuucgacggcaagagcaagugcgaggaguccagcgccaaguccgccagcguguacuacucccagcugaugugccagcccauccuccugcuggaccaggcgcucgugagcgacgucggcgacagcgccgagguggccgugaagauguucgacgccuacgucaacacguucuccagcaccuucaacgugccgauggagaagcugaagacccugguggccaccgcggaggccgagcucgccaagaacgucucccuggacaacgugcugagcacguucaucuccgccgcgcgccagggguucguggacagcgacgucgagaccaaggacgugguggagugccucaagcugucccaccagagcgacaucgaggucaccggcgacuccugcaacaacuacaugcugaccuacaacaagguggagaacaugacgccccgggaccucggggccugcaucgacugcagcgcccgccacaucaacgcccagguggccaagucccacaacaucgcgcugaucuggaacgucaaggacuucaugagccuguccgagcagcuccggaagcagauccgcagcgccgccaagaagaacaaccugcccuucaagcugaccugcgccaccacccgccagguggugaacgucgugacgaccaagaucgcccucaagggcgggugaggacuagucccuguucccagagcccacuuuuuuuucuuuuuuugaaauaaaauagccugucuuucagaucucaaaggcucuuuucagagccaccaaaaaaaaaaaaaaaaaaaaaaaaaaaaaaaaaaaaaaaaaaaaaaaaaaaaaaaaaaaaaaaaaaaaaaaaaaaaaaaaaaaaaaaaaaaaaaaaaaaaa

SEQ ID NO: 19493 - RNA, 6113 nt, Artificial Sequence
  SARS-CoV-2__MT919776.1__non-structural protein 3 (NSP3) mRNA gc
aggagagucccgcagucggcguccagcggcucugcuuguucgugugugugucguugcaggccuuauucaagcuuaccauggcccccaccaaggugaccuucggcgacgacacggucaucgaggugcagggguacaagagcgugaacaucaccuucgagcuggacgagcgcaucgacaagguccucaacgagaagugcuccgccuacaccguggagcugggcaccgaggugaacgaguucgcgugcgucguggccgacgccgugaucaagacgcugcagccggucagcgagcuccugaccccccuggggaucgaccucgacgagugguccauggccaccuacuaccuguucgacgagagcggcgaguucaagcuggccucccacauguacugcagcuucuacccccccgacgaggacgaggaggagggggacugcgaggaggaggaguucgagccguccacccaguacgaguacggcacggaggacgacuaccagggcaagccccucgaguucggggcgaccagcgccgcccugcagcccgaggaggagcaggaggaggacuggcuggacgacgacucccagcagaccgugggccagcaggacgggagcgaggacaaccagaccacgaccauccagaccaucguggagguccagccccagcucgagauggagcugaccccgguggugcagacgaucgaggucaacuccuucagcggcuaccugaagcucaccgacaacguguacaucaagaacgccgacaucguggaggaggcgaagaaggucaagcccaccgugguggucaacgccgccaacguguaccugaagcacgggggcggcguggccggggcccugaacaaggcgaccaacaacgccaugcaggucgaguccgacgacuacaucgccacgaacggcccccucaagguggggggcagcugcguccuguccggccacaaccuggccaagcacugccuccacgugguggggcccaacgucaacaagggcaaggacauccagcugcugaagagcgccuacgagaacuucaaccagcacgaggugcuccuggcgccgcugcucuccgccgggaucuucggcgccgaccccauccacagccugcgggugugcgucgacaccgugcgcaccaacguguaccuggccgucuucgacaagaaccucuacgacaagcugguguccagcuuccuggagaugaagagcgagaagcagguggagcagaagaucgccgagauccccaaggaggaggucaagcccuucaucaccgaguccaagccgagcguggagcagcggaagcaggacgacaagaagaucaaggcgugcguggaggaggucacgaccacccucgaggagaccaaguuccugacggagaaccugcuccuguacaucgacaucaacgggaaccugcaccccgacuccgccacccucgugagcgacaucgacaucaccuuccugaagaaggacgcccccuacaucgugggcgacgucgugcaggagggcgugcugaccgccgucgugauccccacgaagaaggccgggggcaccaccgagaugcucgcgaaggcccugcgcaaggugccgaccgacaacuacaucacgaccuaccccgggcagggccugaacggguacaccgucgaggaggccaagaccgugcucaagaagugcaaguccgccuucuacauccugcccagcaucaucuccaacgagaagcaggagauccugggcaccgugagcuggaaccuccgggagaugcuggcgcacgccgaggagacgcgcaagcugaugcccgucugcguggagaccaaggccaucguguccaccauccagcggaaguacaagggcaucaagauccaggagggggucguggacuacggcgcccgcuucuacuucuacaccagcaagacgaccguggccucccugaucaacacccucaacgaccugaacgagacccuggucacgaugccgcucggguacgugacccacggccugaaccuggaggaggcggcccgguacaugcgcagccucaaggugcccgccaccgucuccgugagcucccccgacgccgugaccgccuacaacggguaccugacgagcuccagcaagacccccgaggagcacuucaucgagaccaucucccuggcgggcagcuacaaggacuggagcuacuccggccagagcacccagcucgggaucgaguuccugaagcggggcgacaaguccgucuacuacacgagcaacccgaccaccuuccaccuggacggggaggugaucaccuucgacaaccucaagacgcugcugucccuccgcgaggugcggaccaucaaggucuucaccaccguggacaacaucaaccugcacacgcagguggucgacaugagcaugaccuacggccagcaguucggccccaccuaccuggacggggccgacgugaccaagaucaagccccacaacucccacgagggcaagacguucuacgugcucccgaacgacgacacccugcgcgucgaggccuucgaguacuaccacaccaccgaccccagcuuccuggggcgguacauguccgcccucaaccacacgaagaaguggaaguacccccaggugaacggccugaccagcaucaagugggccgacaacaacugcuaccuggcgaccgcccuccugacccugcagcagaucgagcucaaguucaaccccccggcccugcaggacgccuacuaccgcgcgcgggccggggaggccgccaacuucugcgcccugauccucgcguacugcaacaagacggugggcgagcugggcgacguccgcgagaccauguccuaccuguuccagcacgccaaccucgacagcugcaagcgggugcugaacgucgugugcaagaccugcgggcagcagcagaccacccugaagggcguggaggccgucauguacauggggacgcucuccuacgagcaguucaagaagggcgugcagauccccugcaccugcgggaagcaggccaccaaguaccuggugcagcaggagagccccuucgucaugauguccgcccccccggcgcaguacgagcugaagcacggcaccuucacgugcgccagcgaguacaccggcaacuaccagugcgggcacuacaagcacaucaccuccaaggagacccucuacugcaucgacggcgcccugcugacgaagagcagcgaguacaaggggcccaucaccgacguguucuacaaggagaacuccuacaccaccacgaucaagcccgugaccuacaagcucgacggcgucgugugcaccgagaucgaccccaagcuggacaacuacuacaagaaggacaacagcuacuucaccgagcagccgaucgaccuggugcccaaccagcccuaccccaacgccuccuucgacaacuucaaguucgucugcgacaacaucaaguucgccgacgaccucaaccagcugacgggguacaagaagccggcgagccgcgagcugaaggugaccuucuuccccgaccucaacggcgacguggucgccaucgacuacaagcacuacacccccuccuucaagaagggcgccaagcugcugcacaagcccaucguguggcacgugaacaacgccaccaacaaggcgacguacaagccgaacaccuggugcauccggugccucuggagcaccaagcccgucgagaccuccaacagcuucgacgugcugaaguccgaggacgcccaggggauggacaaccuggccugcgaggaccucaagcccgugagcgaggaggucguggagaaccccacgauccagaaggacgugcuggagugcaacgucaagaccaccgagguggugggcgacaucauccugaagccggccaacaacucccucaagaucaccgaggaggucgggcacacggaccugauggccgcguacguggacaacagcucccugaccaucaagaagcccaacgagcucagccgcgugcugggccugaagacccucgccacccacgggcuggccgccgucaacuccgugcccugggacacgaucgccaacuacgcgaagccguuccugaacaagguggucagcaccaccaccaacaucgugacgcgcugccucaaccgggugugcaccaacuacaugcccuacuucuucacccugcugcuccagcugugcaccuucacccgcuccacgaacagccggaucaaggccuccaugcccaccaccaucgccaagaacaccgucaagagcgugggcaaguucugccuggaggccagcuucaacuaccucaagucccccaacuucagcaagcugaucaacaucaucaucugguuccugcuccuguccgugugccugggcagccucaucuacuccacggccgcgcuggggguccugaugagcaaccucggcaugccguccuacugcaccggguaccgcgagggcuaccugaacagcaccaacgugaccaucgccacguacugcaccggcuccauccccugcagcgugugccuguccgggcucgacagccuggacaccuaccccucccuggagaccauccagaucacgaucagcuccuucaagugggaccucaccgccuucggccuggucgccgagugguuccuggccuacauccucuucacccgguucuucuacgugcuggggcuggcggccaucaugcagcucuucuucagcuacuucgccgugcacuucaucuccaacagcuggcugauguggcugaucaucaaccugguccagauggcccccaucuccgcgauggugcgcauguacaucuucuucgccagcuucuacuacguguggaagagcuacguccacgugguggacggcugcaacuccagcaccugcaugaugugcuacaagcggaaccgcgccacgcgggucgagugcaccaccaucgugaacgggguccgccgguccuucuacguguacgccaacggcggcaagggguucugcaagcuccacaacuggaacugcgugaacugcgacaccuucugcgccggcagcacguucaucuccgacgaggucgcgcgcgaccugagccugcaguucaagcggccgaucaaccccaccgaccaguccagcuacaucguggacuccgugaccgucaagaacgggagcauccaccucuacuucgacaaggccggccagaagaccuacgagcgccacucccugagccacuucgugaaccuggacaaccuccgggccaacaacacgaaggggucccugcccaucaacgugaucgucuucgacggcaagagcaagugcgaggaguccagcgccaaguccgccagcguguacuacucccagcugaugugccagcccauccuccugcuggaccaggcgcucgugagcgacgucggcgacagcgccgagguggccgugaagauguucgacgccuacgucaacaccuucuccagcaccuucaacgugccgauggagaagcugaagacccugguggccacggcggaggccgagcucgccaagaacgucucccuggacaacgugcugagcaccuucaucuccgccgcgcgccagggguucguggacagcgacgucgagaccaaggacgugguggagugccucaagcugucccaccagagcgacaucgaggucaccggcgacuccugcaacaacuacaugcugacguacaacaagguggagaacaugaccccccgggaccucggggccugcaucgacugcagcgcccgccacaucaacgcccagguggccaagucccacaacaucgcgcugaucuggaacgucaaggacuucaugagccuguccgagcagcuccggaagcagauccgcagcgccgccaagaagaacaaccugcccuucaagcugaccugcgccaccacgcgccagguggugaacgucgugaccaccaagaucgcccucaagggcgggugaggacuagucccuguucccagagcccacuuuuuuuucuuuuuuugaaauaaaauagccugucuuucagaucucaaaggcucuuuucagagccaccaaaaaaaaaaaaaaaaaaaaaaaaaaaaaaaaaaaaaaaaaaaaaaaaaaaaaaaaaaaaaaaaaaaaaaaaaaaaaaaaaaaaaaaaaaaaaaaaaaaaa

SEQ ID NO: 19494 - RNA, 6113 nt, Artificial Sequence
  SARS-CoV-2__MT919777.1__non-structural protein 3 (NSP3) mRNA gc
aggagagucccgcagucggcguccagcggcucugcuuguucgugugugugucguugcaggccuuauucaagcuuaccauggcccccaccaaggugaccuucggcgacgacacggucaucgaggugcagggguacaagagcgugaacaucaccuucgagcuggacgagcgcaucgacaagguccucaacgagaagugcuccgccuacaccguggagcugggcaccgaggugaacgaguucgcgugcgucguggccgacgccgugaucaagacgcugcagccggucagcgagcuccugaccccccuggggaucgaccucgacgagugguccauggugaccuacuaccuguucgacgagagcggcgaguucaagcuggccucccacauguacugcagcuucuacccccccgacgaggacgaggaggagggggacugcgaggaggaggaguucgagccguccacccaguacgaguacggcacggaggacgacuaccagggcaagccccucgaguucggggccaccagcgcggcccugcagcccgaggaggagcaggaggaggacuggcuggacgacgacucccagcagaccgugggccagcaggacgggagcgaggacaaccagaccacgaccauccagaccaucgucgaggugcagccccagcucgagauggagcugaccccggugguccagacgaucgaggugaacuccuucagcggcuaccugaagcucaccgacaacguguacaucaagaacgccgacaucgucgaggaggugaagaaggugaagcccaccgucguggugaacgccgcgaacgucuaccugaagcacgggggcggcguggccggggcccugaacaaggccaccaacaacgccaugcaggucgaguccgacgacuacaucgcgacgaacggcccccucaagguggggggcagcugcgugcuguccggccacaaccuggccaagcacugccuccacgucguggggcccaacgugaacaagggcgaggacauccagcugcugaagagcgccuacgagaacuucaaccagcacgagguccuccuggccccgcugcucuccgccgggaucuucggcgcggaccccauccacagccugcgggugugcguggacaccguccgcaccaacguguaccuggccguguucgacaagaaccucuacgacaagcuggucuccagcuuccuggagaugaagagcgagaagcagguggagcagaagaucgccgagauccccaaggaggaggugaagcccuucaucaccgaguccaagccgagcgucgagcagcggaagcaggacgacaagaagaucaaggccugcguggaggaggugacgaccacccucgaggagaccaaguuccugacggagaaccugcuccuguacaucgacaucaacgggaaccugcaccccgacuccgccacccucgucagcgacaucgacaucaccuuccugaagaaggacgcgcccuacaucgugggcgacgugguccaggagggcgugcugaccgccguggucauccccacgaagaaggccgggggcaccaccgagaugcucgccaaggcccugcgcaaggugccgaccgacaacuacaucacgaccuaccccgggcagggccugaacggguacaccguggaggaggcgaagaccguccucaagaagugcaaguccgccuucuacauccugcccagcaucaucuccaacgagaagcaggagauccugggcaccgugagcuggaaccuccgggagaugcuggcccacgccgaggagacgcgcaagcugaugcccgugugcgucgagaccaaggcgaucguguccaccauccagcggaaguacaagggcaucaagauccaggaggggguggucgacuacggcgcccgcuucuacuucuacaccagcaagacgaccguggccucccugaucaacacccucaacgaccugaacgagacccuggugacgaugccgcucggguacgucacccacggccugaaccuggaggaggccgcccgguacaugcgcagccucaaggugcccgcgaccguguccgucagcucccccgacgccgugaccgccuacaacggguaccugacgagcuccagcaagacccccgaggagcacuucaucgagaccaucucccuggccggcagcuacaaggacuggagcuacuccggccagagcacccagcucgggaucgaguuccugaagcggggcgacaaguccguguacuacacgagcaacccgaccaccuuccaccuggacggggaggucaucaccuucgacaaccucaagacgcugcugucccuccgcgaggugcggaccaucaagguguucaccaccgucgacaacaucaaccugcacacgcaggugguggacaugagcaugaccuacggccagcaguucggccccaccuaccuggacggggccgacgucaccaagaucaagccccacaacucccacgagggcaagacguucuacgugcucccgaacgacgacacccugcgcguggaggcguucgaguacuaccacaccaccgaccccagcuuccuggggcgguacauguccgcccucaaccacacgaagaaguggaaguacccccaggucaacggccugaccagcaucaagugggccgacaacaacugcuaccuggccaccgcccuccugacccugcagcagaucgagcucaaguucaaccccccggcgcugcaggacgccuacuaccgcgcccgggccggggaggcggccaacuucugcgcccugauccucgccuacugcaacaagacggugggcgagcugggcgacguccgcgagaccauguccuaccuguuccagcacgccaaccucgacagcugcaagcgggugcugaacguggucugcaagaccugcgggcagcagcagaccacccugaagggcguggaggcggugauguacauggggacgcucuccuacgagcaguucaagaagggcguccagauccccugcaccugcgggaagcaggccaccaaguaccuggugcagcaggagagccccuucgugaugauguccgcccccccggcccaguacgagcugaagcacggcaccuucacgugcgccagcgaguacaccggcaacuaccagugcgggcacuacaagcacaucaccuccaaggagacccucuacugcaucgacggcgcgcugcugacgaagagcagcgaguacaaggggcccaucaccgacgucuucuacaaggagaacuccuacaccaccacgaucaagcccgugaccuacaagcucgacggcguggucugcaccgagaucgaccccaagcuggacaacuacuacaagaaggacaacagcuacuucaccgagcagccgaucgaccuggugcccaaccagcccuaccccaacgccuccuucgacaacuucaaguucgugugcgacaacaucaaguucgccgacgaccucaaccagcugacgggguacaagaagccggccagccgcgagcugaaggucaccuucuuccccgaccucaacggcgacgugguggccaucgacuacaagcacuacacccccuccuucaagaagggcgcgaagcugcugcacaagcccaucgucuggcacgugaacaacgccaccaacaaggccacguacaagccgaacaccuggugcauccggugccucuggagcaccaagcccguggagaccuccaacagcuucgacguccugaaguccgaggacgcccaggggauggacaaccuggcgugcgaggaccucaagcccgugagcgaggagguggucgagaaccccacgauccagaaggacgugcuggagugcaacgugaagaccaccgaggucgugggcgacaucauccugaagccggccaacaacucccucaagaucaccgaggagguggggcacacggaccugauggccgccuacgucgacaacagcucccugaccaucaagaagcccaacgagcucagccgcgugcugggccugaagacccucgccacccacgggcuggcggccgugaacuccguccccugggacacgaucgccaacuacgccaagccguuccugaacaagguggugagcaccaccaccaacaucgucacgcgcugccucaaccgggugugcaccaacuacaugcccuacuucuucacccugcugcuccagcugugcaccuucacccgcuccacgaacagccggaucaaggccuccaugcccaccaccaucgcgaagaacaccgugaagagcgucggcaaguucugccuggaggccagcuucaacuaccucaagucccccaacuucagcaagcugaucaacaucaucaucugguuccugcuccuguccgugugccugggcagccucaucuacuccacggccgcccugggggugcugaugagcaaccucggcaugccguccuacugcaccggguaccgcgagggcuaccugaacagcaccaacgucaccaucgccacguacugcaccggcuccauccccugcagcgugugccuguccgggcucgacagccuggacaccuaccccucccuggagaccauccagaucacgaucagcuccuucaagugggaccucaccgcguucggccugguggccgagugguuccuggccuacauccucuucacccgguucuucuacguccuggggcuggccgccaucaugcagcucuucuucagcuacuucgcggugcacuucaucuccaacagcuggcugauguggcugaucaucaaccuggugcagauggcccccaucuccgccaugguccgcauguacaucuucuucgccagcuucuacuacguguggaagagcuacgugcacgucguggacggcugcaacuccagcaccugcaugaugugcuacaagcggaaccgcgcgacgcgggucgagugcaccaccaucgugaacggggugcgccgguccuucuacgucuacgccaacggcggcaagggguucugcaagcuccacaacuggaacugcgugaacugcgacaccuucugcgccggcagcacguucaucuccgacgagguggcccgcgaccugagccugcaguucaagcggccgaucaaccccaccgaccaguccagcuacaucgucgacuccgugaccgugaagaacgggagcauccaccucuacuucgacaaggccggccagaagaccuacgagcgccacucccugagccacuucgucaaccuggacaaccuccgggcgaacaacacgaaggggucccugcccaucaacgugaucguguucgacggcaagagcaagugcgaggaguccagcgccaaguccgccagcgucuacuacucccagcugaugugccagcccauccuccugcuggaccaggcccucgugagcgacgugggcgacagcgccgaggucgcggugaagauguucgacgccuacgugaacaccuucuccagcaccuucaacgucccgauggagaagcugaagacccugguggccacggccgaggccgagcucgcgaagaacgugucccuggacaacguccugagcaccuucaucuccgccgcccgccagggguucguggacagcgacguggagaccaaggacgucguggagugccucaagcugucccaccagagcgacaucgaggugaccggcgacuccugcaacaacuacaugcugacguacaacaaggucgagaacaugaccccccgggaccucggggccugcaucgacugcagcgcgcgccacaucaacgcccagguggccaagucccacaacaucgcccugaucuggaacgugaaggacuucaugagccuguccgagcagcuccggaagcagauccgcagcgccgcgaagaagaacaaccugcccuucaagcugaccugcgccaccacgcgccaggucgugaacguggucaccaccaagaucgcccucaagggcgggugaggacuagucccuguucccagagcccacuuuuuuuucuuuuuuugaaauaaaauagccugucuuucagaucucaaaggcucuuuucagagccaccaaaaaaaaaaaaaaaaaaaaaaaaaaaaaaaaaaaaaaaaaaaaaaaaaaaaaaaaaaaaaaaaaaaaaaaaaaaaaaaaaaaaaaaaaaaaaaaaaaaaa

SEQ ID NO: 19495 - RNA, 6113 nt, Artificial Sequence
  SARS-CoV-2__MT919783.1__non-structural protein 3 (NSP3) mRNA gc
aggagagucccgcagucggcguccagcggcucugcuuguucgugugugugucguugcaggccuuauucaagcuuaccauggcccccaccaaggugaccuucggcgacgacacggucaucgaggugcagggguacaagagcgugaacaucaccuucgagcuggacgagcgcaucgacaagguccucaacgagaagugcuccgccuacaccguggagcugggcaccgaggugaacgaguucgcgugcgucguggccgacgccgugaucaagacgcugcagccggucagcgagcuccugaccccccuggggaucgaccucgacgagugguccauggccaccuacuaccuguucgacgagagcggcgaguucaagcuggccucccacauguacugcagcuucuacccccccgacgaggacgaggaggagggggacugcgaggaggaggaguucgagccguccacccaguacgaguacggcacggaggacgacuaccagggcaagccccucgaguucggggcgaccagcgccgcccugcagcccgaggaggagcaggaggaggacuggcuggacgacgacucccagcagaccgugggccagcaggacgggagcgaggacaaccagaccacgaccauccagaccaucguggagguccagccccagcucgagauggagcugaccccgguggugcagacgaucgaggucaacuccuucagcggcuaccugaagcucaccgacaacguguacaucaagaacgccgacaucguggaggaggcgaagaaggucaagcccaccgugguggucaacgccgccaacguguaccugaagcacgggggcggcguggccggggcccugaacaaggcgaccaacaacgccaugcaggucgaguccgacgacuacaucgccacgaacggcccccucaagguggggggcagcugcguccuguccggccacaaccuggccaagcacugccuccacgugguggggcccaacgucaacaagggcgaggacauccagcugcugaagagcgccuacgagaacuucaaccagcacgaggugcuccuggcgccgcugcucuccgccgggaucuucggcgccgaccccauccacagccugcgggugugcgucgacaccgugcgcaccaacguguaccuggccgucuucgacaagaaccucuacgacaagcugguguccagcuuccuggagaugaagagcgagaagcagguggagcagaagaucgccgagauccccaaggaggaggucaagcccuucaucaccgaguccaagccgagcguggagcagcggaagcaggacgacaagaagaucaaggcgugcguggaggaggucacgaccacccucgaggagaccaaguuccugacggagaaccugcuccuguacaucgacaucaacgggaaccugcaccccgacuccgccacccucgugagcgacaucgacaucaccuuccugaagaaggacgcccccuacaucgugggcgacgucgugcaggagggcgugcugaccgccgucgugauccccacgaagaaggccgggggcaccaccgagaugcucgcgaaggcccugcgcaaggugccgaccgacaacuacaucacgaccuaccccgggcagggccugaacggguacaccgucgaggaggccaagaccgugcucaagaagugcaaguccgccuucuacauccugcccagcaucaucuccaacgagaagcaggagauccugggcaccgugagcuggaaccuccgggagaugcuggcgcacgccgaggagacgcgcaagcugaugcccgucugcguggagaccaaggccaucguguccaccauccagcggaaguacaagggcaucaagauccaggagggggucguggacuacggcgcccgcuucuacuucuacaccagcaagacgaccguggccucccugaucaacacccucaacgaccugaacgagacccuggucacgaugccgcucggguacgugacccacggccugaaccuggaggaggcggcccgguacaugcgcagccucaaggugcccgccaccgucuccgugagcucccccgacgccgugaccgccuacaacggguaccugacgagcuccagcaagacccccgaggagcacuucaucgagaccaucucccuggcgggcagcuacaaggacuggagcuacuccggccagagcacccagcucgggaucgaguuccugaagcggggcgacaaguccgucuacuacacgagcaacccgaccaccuuccaccuggacggggaggugaucaccuucgacaaccucaagacgcugcugucccuccgcgaggugcggaccaucaaggucuucaccaccguggacaacaucaaccugcacacgcagguggucgacaugagcaugaccuacggccagcaguucggccccaccuaccuggacggggccgacgugaccaagaucaagccccacaacucccacgagggcaagacguucuacgugcucccgaacgacgacacccugcgcgucgaggccuucgaguacuaccacaccaccgaccccagcuuccuggggcgguacauguccgcccucaaccacacgaagaaguggaaguacccccaggugaacggccugaccagcaucaagugggccgacaacaacugcuaccuggcgaccgcccuccugacccugcagcagaucgagcucaaguucaaccccccggcccugcaggacgccuacuaccgcgcgcgggccggggaggccgccaacuucugcgcccugauccucgcguacugcaacaagacggugggcgagcugggcgacguccgcgagaccauguccuaccuguuccagcacgccaaccucgacagcugcaagcgggugcugaacgucgugugcaagaccugcgggcagcagcagaccacccugaagggcguggaggccgucauguacauggggacgcucuccuacgagcaguucaagaagggcgugcagauccccugcaccugcgggaagcaggccaccaaguaccuggugcagcaggagagccccuucgucaugauguccgcccccccggcgcaguacgagcugaagcacggcaccuucacgugcgccagcgaguacaccggcaacuaccagugcgggcacuacaagcacaucaccuccaaggagacccucuacugcaucgacggcgcccugcugacgaagagcagcgaguacaaggggcccaucaccgacguguucuacaaggagaacuccuacaccaccacgaucaagcccgugaccuacaagcucgacggcaucgucugcaccgagaucgaccccaagcuggacaacuacuacaagaaggacaacagcuacuucaccgagcagccgaucgaccuggugcccaaccagcccuaccccaacgccuccuucgacaacuucaaguucgugugcgacaacaucaaguucgccgacgaccucaaccagcugacgggguacaagaagccggcgagccgcgagcugaaggucaccuucuuccccgaccucaacggcgacgugguggccaucgacuacaagcacuacacccccuccuucaagaagggcgccaagcugcugcacaagcccaucgucuggcacgugaacaacgccaccaacaaggcgacguacaagccgaacaccuggugcauccggugccucuggagcaccaagcccguggagaccuccaacagcuucgacguccugaaguccgaggacgcccaggggauggacaaccuggccugcgaggaccucaagcccgugagcgaggagguggucgagaaccccacgauccagaaggacgugcuggagugcaacgugaagaccaccgaggucgugggcgacaucauccugaagccggccaacaacucccucaagaucaccgaggagguggggcacacggaccugauggccgcguacgucgacaacagcucccugaccaucaagaagcccaacgagcucagccgcgugcugggccugaagacccucgccacccacgggcuggccgccgugaacuccguccccugggacacgaucgccaacuacgcgaagccguuccugaacaagguggugagcaccaccaccaacaucgucacgcgcugccucaaccgggugugcaccaacuacaugcccuacuucuucacccugcugcuccagcugugcaccuucacccgcuccacgaacagccggaucaaggccuccaugcccaccaccaucgccaagaacaccgugaagagcgucggcaaguucugccuggaggccagcuucaacuaccucaagucccccaacuucagcaagcugaucaacaucaucaucugguuccugcuccuguccgugugccugggcagccucaucuacuccacggccgcgcugggggugcugaugagcaaccucggcaugccguccuacugcaccggguaccgcgagggcuaccugaacagcaccaacgucaccaucgccacguacugcaccggcuccauccccugcagcgugugccuguccgggcucgacagccuggacaccuaccccucccuggagaccauccagaucacgaucagcuccuucaagugggaccucaccgccuucggccugguggccgagugguuccuggccuacauccucuucacccgguucuucuacguccuggggcuggcggccaucaugcagcucuucuucagcuacuucgccgugcacuucaucuccaacagcuggcugauguggcugaucaucaaccuggugcagauggcccccaucuccgcgaugguccgcauguacaucuucuucgccagcuucuacuacguguggaagagcuacgugcacgucguggacggcugcaacuccagcaccugcaugaugugcuacaagcggaaccgcgccacgcggguggagugcaccaccaucgucaacggggugcgccgguccuucuacgucuacgccaacggcggcaagggguucugcaagcuccacaacuggaacugcgugaacugcgacaccuucugcgccggcagcacguucaucuccgacgagguggcgcgcgaccugagccugcaguucaagcggccgaucaaccccaccgaccaguccagcuacaucgucgacuccgugaccgugaagaacgggagcauccaccucuacuucgacaaggccggccagaagaccuacgagcgccacucccugagccacuucgucaaccuggacaaccuccgggccaacaacacgaaggggucccugcccaucaacgugaucguguucgacggcaagagcaagugcgaggaguccagcgccaaguccgccagcgucuacuacucccagcugaugugccagcccauccuccugcuggaccaggcgcucgugagcgacgugggcgacagcgccgaggucgccgugaagauguucgacgccuacgugaacaccuucuccagcaccuucaacgucccgauggagaagcugaagacccugguggccacggcggaggccgagcucgccaagaacgugucccuggacaacguccugagcaccuucaucuccgccgcgcgccagggguucguggacagcgacguggagaccaaggacgucguggagugccucaagcugucccaccagagcgacaucgaggugaccggcgacuccugcaacaacuacaugcugacguacaacaaggucgagaacaugaccccccgggaccucggggccugcaucgacugcagcgcccgccacaucaacgcccagguggccaagucccacaacaucgcgcugaucuggaacgugaaggacuucaugagccuguccgagcagcuccggaagcagauccgcagcgccgccaagaagaacaaccugcccuucaagcugaccugcgccaccacgcgccaggucgugaacguggucaccaccaagaucgcccucaagggcgggugaggacuagucccuguucccagagcccacuuuuuuuucuuuuuuugaaauaaaauagccugucuuucagaucucaaaggcucuuuucagagccaccaaaaaaaaaaaaaaaaaaaaaaaaaaaaaaaaaaaaaaaaaaaaaaaaaaaaaaaaaaaaaaaaaaaaaaaaaaaaaaaaaaaaaaaaaaaaaaaaaaaaa

SEQ ID NO: 19496 - RNA, 6113 nt, Artificial Sequence
  SARS-CoV-2__MT919784.1__non-structural protein 3 (NSP3) mRNA gc
aggagagucccgcagucggcguccagcggcucugcuuguucgugugugugucguugcaggccuuauucaagcuuaccauggcccccaccaaggugaccuucggcgacgacacggucaucgaggugcagggguacaagagcgugaacaucaccuucgagcuggacgagcgcaucgacaagguccucaacgagaagugcuccgccuacaccguggagcugggcaccgaggugaacgaguucgcgugcgucguggccgacgccgugaucaagacgcugcagccggucagcgagcuccugaccccccuggggaucgaccucgacgagugguccauggugaccuacuaccuguucgacgagagcggcgaguucaagcuggccucccacauguacugcagcuucuacccccccgacgaggacgaggaggagggggacugcgaggaggaggaguucgagccguccacccaguacgaguacggcacggaggacgacuaccagggcaagccccucgaguucggggccaccagcgcggcccugcagcccgaggaggagcaggaggaggacuggcuggacgacgacucccagcagaccgugggccagcaggacgggagcgaggacaaccagaccacgaccauccagaccaucgucgaggugcagccccagcucgagauggagcugaccccggugguccagacgaucgaggugaacuccuucagcggcuaccugaagcucaccgacaacguguacaucaagaacgccgacaucgucgaggaggccaagaaggugaagcccaccguggucgugaacgcggccaacguguaccugaagcacgggggcggcgucgccggggcccugaacaaggccaccaacaacgcgaugcagguggaguccgacgacuacaucgccacgaacggcccccucaaggucgggggcagcugcgugcuguccggccacaaccuggccaagcacugccuccacguggucgggcccaacgugaacaagggcgaggacauccagcugcugaagagcgccuacgagaacuucaaccagcacgaggugcuccuggccccgcugcucuccgcggggaucuucggcgccgaccccauccacagccugcgggucugcguggacaccgugcgcaccaacgucuaccuggccguguucgacaagaaccucuacgacaagcugguguccagcuuccuggagaugaagagcgagaagcaggucgagcagaagaucgccgagauccccaaggaggaggugaagcccuucaucaccgaguccaagccgagcguggagcagcggaagcaggacgacaagaagaucaaggccugcgucgaggaggugacgaccacccucgaggagaccaaguuccugacggagaaccugcuccuguacaucgacaucaacgggaaccugcaccccgacuccgcgacccucgugagcgacaucgacaucaccuuccugaagaaggacgcccccuacaucgucggcgacguggugcaggagggcguccugaccgccguggugauccccacgaagaaggccgggggcaccaccgagaugcucgccaaggcgcugcgcaaggucccgaccgacaacuacaucacgaccuaccccgggcagggccugaacggguacaccguggaggaggccaagaccgugcucaagaagugcaaguccgccuucuacauccugcccagcaucaucuccaacgagaagcaggagauccugggcaccgucagcuggaaccuccgggagaugcuggcccacgcggaggagacgcgcaagcugaugcccgugugcguggagaccaaggccaucgucuccaccauccagcggaaguacaagggcaucaagauccaggagggggugguggacuacggcgcccgcuucuacuucuacaccagcaagacgaccgucgccucccugaucaacacccucaacgaccugaacgagacccuggugacgaugccgcucggguacgugacccacggccugaaccuggaggaggccgcgcgguacaugcgcagccucaagguccccgccaccguguccgugagcucccccgacgccgucaccgccuacaacggguaccugacgagcuccagcaagacccccgaggagcacuucaucgagaccaucucccuggccggcagcuacaaggacuggagcuacuccggccagagcacccagcucgggaucgaguuccugaagcggggcgacaaguccguguacuacacgagcaacccgaccaccuuccaccuggacggggaggugaucaccuucgacaaccucaagacgcugcugucccuccgcgagguccggaccaucaagguguucaccaccguggacaacaucaaccugcacacgcaggucguggacaugagcaugaccuacggccagcaguucggccccaccuaccuggacggggcggacgugaccaagaucaagccccacaacucccacgagggcaagacguucuacguccucccgaacgacgacacccugcgcguggaggccuucgaguacuaccacaccaccgaccccagcuuccuggggcgguacauguccgcccucaaccacacgaagaaguggaaguacccccaggugaacggccugaccagcaucaagugggccgacaacaacugcuaccuggccaccgcgcuccugacccugcagcagaucgagcucaaguucaaccccccggcccugcaggacgccuacuaccgcgcccgggcgggggaggccgccaacuucugcgcccugauccucgccuacugcaacaagacggucggcgagcugggcgacgugcgcgagaccauguccuaccuguuccagcacgcgaaccucgacagcugcaagcggguccugaacguggugugcaagaccugcgggcagcagcagaccacccugaagggcgucgaggccgugauguacauggggacgcucuccuacgagcaguucaagaagggcgugcagauccccugcaccugcgggaagcaggccaccaaguaccugguccagcaggagagccccuucgugaugauguccgcccccccggcccaguacgagcugaagcacggcaccuucacgugcgcgagcgaguacaccggcaacuaccagugcgggcacuacaagcacaucaccuccaaggagacccucuacugcaucgacggcgcccugcugacgaagagcagcgaguacaaggggcccaucaccgacguguucuacaaggagaacuccuacaccaccacgaucaagcccgucaccuacaagcucgacggcguggugugcaccgagaucgaccccaagcuggacaacuacuacaagaaggacaacagcuacuucaccgagcagccgaucgaccugguccccaaccagcccuaccccaacgccuccuucgacaacuucaaguucgugugcgacaacaucaaguucgccgacgaccucaaccagcugacgggguacaagaagccggccagccgcgagcugaaggugaccuucuuccccgaccucaacggcgacgucguggcgaucgacuacaagcacuacacccccuccuucaagaagggcgccaagcugcugcacaagcccaucguguggcacgucaacaacgccaccaacaaggccacguacaagccgaacaccuggugcauccggugccucuggagcaccaagcccguggagaccuccaacagcuucgacgugcugaaguccgaggacgcgcaggggauggacaaccuggccugcgaggaccucaagcccgucagcgaggaggugguggagaaccccacgauccagaaggacguccuggagugcaacgugaagaccaccgagguggucggcgacaucauccugaagccggccaacaacucccucaagaucaccgaggagguggggcacacggaccugauggccgccuacguggacaacagcucccugaccaucaagaagcccaacgagcucagccgcguccugggccugaagacccucgcgacccacgggcuggccgccgugaacuccgugcccugggacacgaucgccaacuacgccaagccguuccugaacaaggucgugagcaccaccaccaacaucgugacgcgcugccucaaccgggucugcaccaacuacaugcccuacuucuucacccugcugcuccagcugugcaccuucacccgcuccacgaacagccggaucaaggcguccaugcccaccaccaucgccaagaacaccgugaagagcgugggcaaguucugccuggaggccagcuucaacuaccucaagucccccaacuucagcaagcugaucaacaucaucaucugguuccugcuccuguccgucugccugggcagccucaucuacuccacggccgcccugggggugcugaugagcaaccucggcaugccguccuacugcaccggguaccgcgagggcuaccugaacagcaccaacgugaccaucgcgacguacugcaccggcuccauccccugcagcgucugccuguccgggcucgacagccuggacaccuaccccucccuggagaccauccagaucacgaucagcuccuucaagugggaccucaccgccuucggccugguggccgagugguuccuggccuacauccucuucacccgguucuucuacgugcuggggcuggccgcgaucaugcagcucuucuucagcuacuucgccguccacuucaucuccaacagcuggcugauguggcugaucaucaaccuggugcagauggcccccaucuccgccauggugcgcauguacaucuucuucgcgagcuucuacuacgucuggaagagcuacgugcacguggucgacggcugcaacuccagcaccugcaugaugugcuacaagcggaaccgcgccacgcggguggagugcaccaccaucgucaacggggugcgccgguccuucuacguguacgccaacggcggcaagggguucugcaagcuccacaacuggaacugcgucaacugcgacaccuucugcgccggcagcacguucaucuccgacgagguggcccgcgaccugagccugcaguucaagcggccgaucaaccccaccgaccaguccagcuacaucguggacuccgucaccgugaagaacgggagcauccaccucuacuucgacaaggcgggccagaagaccuacgagcgccacucccugagccacuucgugaaccuggacaaccuccgggccaacaacacgaaggggucccugcccaucaacgucaucguguucgacggcaagagcaagugcgaggaguccagcgccaaguccgccagcguguacuacucccagcugaugugccagcccauccuccugcuggaccaggcccucgucagcgacgugggcgacagcgcggagguggccgucaagauguucgacgccuacgugaacaccuucuccagcaccuucaacgugccgauggagaagcugaagacccuggucgccacggccgaggcggagcucgccaagaacgugucccuggacaacgugcugagcaccuucaucuccgccgcccgccagggguucgucgacagcgacguggagaccaaggacguggucgagugccucaagcugucccaccagagcgacaucgaggugaccggcgacuccugcaacaacuacaugcugacguacaacaagguggagaacaugaccccccgggaccucggggcgugcaucgacugcagcgcccgccacaucaacgcccaggucgccaagucccacaacaucgcccugaucuggaacgugaaggacuucaugagccuguccgagcagcuccggaagcagauccgcagcgcggccaagaagaacaaccugcccuucaagcugaccugcgccaccacgcgccagguggucaacguggugaccaccaagaucgcccucaagggcgggugaggacuagucccuguucccagagcccacuuuuuuuucuuuuuuugaaauaaaauagccugucuuucagaucucaaaggcucuuuucagagccaccaaaaaaaaaaaaaaaaaaaaaaaaaaaaaaaaaaaaaaaaaaaaaaaaaaaaaaaaaaaaaaaaaaaaaaaaaaaaaaaaaaaaaaaaaaaaaaaaaaaaa

SEQ ID NO: 19497 - RNA, 6113 nt, Artificial Sequence
  SARS-CoV-2__MT919785.1__non-structural protein 3 (NSP3) mRNA gc
aggagagucccgcagucggcguccagcggcucugcuuguucgugugugugucguugcaggccuuauucaagcuuaccauggcccccaccaaggugaccuucggcgacgacacggucaucgaggugcagggguacaagagcgugaacaucaccuucgagcuggacgagcgcaucgacaagguccucaacgagaagugcuccgccuacaccguggagcugggcaccgaggugaacgaguucgcgugcgucguggccgacgccgugaucaagacgcugcagccggucagcgagcuccugaccccccuggggaucgaccucgacgagugguccauggccaccuacuaccuguucgacgagagcggcgaguucaagcuggccucccacauguacugcagcuucuacccccccgacgaggacgaggaggagggggacugcgaggaggaggaguucgagccguccacccaguacgaguacggcacggaggacgacuaccagggcaagccccucgaguucggggcgaccagcgccgcccugcagcccgaggaggagcaggaggaggacuggcuggacgacgacucccagcagaccgugggccagcaggacgggagcgaggacaaccagaccacgaccauccagaccaucguggagguccagccccagcucgagauggagcugaccccgguggugcagacgaucgaggucaacuccuucagcggcuaccugaagcucaccgacaacguguacaucaagaacgccgacaucguggaggaggcgaagaaggucaagcccaccgugguggucaacgccgccaacguguaccugaagcacgggggcggcguggccggggcccugaacaaggcgaccaacaacgccaugcaggucgaguccgacgacuacaucgccacgaacggcccccucaagguggggggcagcugcguccuguccggccacaaccuggccaagcacugccuccacgugguggggcccaacgucaacaagggcgaggacauccagcugcugaagagcgccuacgagaacuucaaccagcacgaggugcuccuggcgccgcugcucuccgccgggaucuucggcgccgaccccauccacagccugcgggugugcgucgacaccgugcgcaccaacguguaccuggccgucuucgacaagaaccucuacgacaagcugguguccagcuuccuggagaugaagagcgagaagcagguggagcagaagaucgccgagauccccaaggaggaggucaagcccuucaucaccgaguccaagccgagcguggagcagcggaagcaggacgacaagaagaucaaggcgugcguggaggaggucacgaccacccucgaggagaccaaguuccugacggagaaccugcuccuguacaucgacaucaacgggaaccugcaccccgacuccgccacccucgugagcgacaucgacaucaccuuccugaagaaggacgcccccuacaucgugggcgacgucgugcaggagggcgugcugaccgccgucgugauccccacgaagaaggccgggggcaccaccgagaugcucgcgaaggcccugcgcaaggugccgaccgacaacuacaucacgaccuaccccgggcagggccugaacggguacaccgucgaggaggccaagaccgugcucaagaagugcaaguccgccuucuacauccugcccagcaucaucuccaacgagaagcaggagauccugggcaccgugagcuggaaccuccgggagaugcuggcgcacgccgaggagacgcgcaagcugaugcccgucugcguggagaccaaggccaucguguccaccauccagcggaaguacaagggcaucaagauccaggagggggucguggacuacggcgcccgcuucuacuucuacaccagcaagacgaccguggccucccugaucaacacccucaacgaccugaacgagacccuggucacgaugccgcucggguacgugacccacggccugaaccuggaggaggcggcccgguacaugcgcagccucaaggugcccgccaccgucuccgugagcucccccgacgccgugaccgccuacaacggguaccugacgagcuccagcaagacccccgaggagcacuucaucgagaccaucucccuggcgggcagcuacaaggacuggagcuacuccggccagagcacccagcucgggaucgaguuccugaagcggggcgacaaguccgucuacuacacgagcaacccgaccaccuuccaccuggacggggaggugaucaccuucgacaaccucaagacgcugcugucccuccgcgaggugcggaccaucaaggucuucaccaccguggacaacaucaaccugcacacgcagguggucgacaugagcaugaccuacggccagcaguucggccccaccuaccuggacggggccgacgugaccaagaucaagccccacaacucccacgagggcaagacguucuacgugcucccgaacgacgacacccugcgcgucgaggccuucgaguacuaccacaccaccgaccccagcuuccuggggcgguacauguccgcccucaaccacacgaagaaguggaaguacccccaggugaacggccugaccagcaucaagugggccgacaacaacugcuaccuggcgaccgcccuccugacccugcagcagaucgagcucaaguucaaccccccggcccugcaggacgccuacuaccgcgcgcgggccggggaggccgccaacuucugcgcccugauccucgcguacugcaacaagacggugggcgagcugggcgacguccgcgagaccauguccuaccuguuccagcacgccaaccucgacagcugcaagcgggugcugaacgucgugugcaagaccugcgggcagcagcagaccacccugaagggcguggaggccgucauguacauggggacgcucuccuacgagcaguucaagaagggcgugcagauccccugcaccugcgggaagcaggccaccaaguaccuggugcagcaggagagccccuucgucaugauguccgcccccccggcgcaguacgagcugaagcacggcaccuucacgugcgccagcgaguacaccggcaacuaccagugcgggcacuacaagcacaucaccuccaaggagacccucuacugcaucgacggcgcccugcugacgaagagcagcgaguacaaggggcccaucaccgacguguucuacaaggagaacuccuacaccaccacgaucaagcccgugaccuacaagcucgacggcaucgucugcaccgagaucgaccccaagcuggacaacuacuacaagaaggacaacagcuacuucaccgagcagccgaucgaccuggugcccaaccagcccuaccccaacgccuccuucgacaacuucaaguucgugugcgacaacaucaaguucgccgacgaccucaaccagcugacgggguacaagaagccggcgagccgcgagcugaaggucaccuucuuccccgaccucaacggcgacgugguggccaucgacuacaagcacuacacccccuccuucaagaagggcgccaagcugcugcacaagcccaucgucuggcacgugaacaacgccaccaacaaggcgacguacaagccgaacaccuggugcauccggugccucuggagcaccaagcccguggagaccuccaacagcuucgacguccugaaguccgaggacgcccaggggauggacaaccuggccugcgaggaccucaagcccgugagcgaggagguggucgagaaccccacgauccagaaggacgugcuggagugcaacgugaagaccaccgaggucgugggcgacaucauccugaagccggccaacaacucccucaagaucaucgaggagguggggcacaccgaccugauggccgcguacgucgacaacagcucccugacgaucaagaagcccaacgagcucagccgcgugcugggccugaagacccucgccacccacgggcuggccgccgugaacuccguccccugggacaccaucgccaacuacgcgaagccguuccugaacaagguggugagcacgaccaccaacaucgucacccgcugccucaaccgggugugcacgaacuacaugcccuacuucuucacccugcugcuccagcugugcaccuucacccgcuccaccaacagccggaucaaggccuccaugcccacgaccaucgccaagaacaccgugaagagcgucggcaaguucugccuggaggccagcuucaacuaccucaagucccccaacuucagcaagcugaucaacaucaucaucugguuccugcuccuguccgugugccugggcagccucaucuacuccaccgccgcgcugggggugcugaugagcaaccucggcaugccguccuacugcacgggguaccgcgagggcuaccugaacagcaccaacgucaccaucgccaccuacugcacgggcuccauccccugcagcgugugccuguccgggcucgacagccuggacaccuaccccucccuggagaccauccagaucaccaucagcuccuucaagugggaccucacggccuucggccugguggccgagugguuccuggccuacauccucuucacccgguucuucuacguccuggggcuggcggccaucaugcagcucuucuucagcuacuucgccgugcacuucaucuccaacagcuggcugauguggcugaucaucaaccuggugcagauggcccccaucuccgcgaugguccgcauguacaucuucuucgccagcuucuacuacguguggaagagcuacgugcacgucguggacggcugcaacuccagcaccugcaugaugugcuacaagcggaaccgcgccacccggguggagugcacgaccaucgucaacggggugcgccgguccuucuacgucuacgccaacggcggcaagggguucugcaagcuccacaacuggaacugcgugaacugcgacaccuucugcgccggcagcaccuucaucuccgacgagguggcgcgcgaccugagccugcaguucaagcggccgaucaaccccacggaccaguccagcuacaucgucgacuccgugaccgugaagaacgggagcauccaccucuacuucgacaaggccggccagaagaccuacgagcgccacucccugagccacuucgucaaccuggacaaccuccgggccaacaacaccaaggggucccugcccaucaacgugaucguguucgacggcaagagcaagugcgaggaguccagcgccaaguccgccagcgucuacuacucccagcugaugugccagcccauccuccugcuggaccaggcgcucgugagcgacgugggcgacagcgccgaggucgccgugaagauguucgacgccuacgugaacacguucuccagcaccuucaacgucccgauggagaagcugaagacccugguggccaccgcggaggccgagcucgccaagaacgugucccuggacaacguccugagcacguucaucuccgccgcgcgccagggguucguggacagcgacguggagaccaaggacgucguggagugccucaagcugucccaccagagcgacaucgaggugaccggcgacuccugcaacaacuacaugcugaccuacaacaaggucgagaacaugacgccccgggaccucggggccugcaucgacugcagcgcccgccacaucaacgcccagguggccaagucccacaacaucgcgcugaucuggaacgugaaggacuucaugagccuguccgagcagcuccggaagcagauccgcagcgccgccaagaagaacaaccugcccuucaagcugaccugcgccaccacccgccaggucgugaacguggucacgaccaagaucgcccucaagggcgggugaggacuagucccuguucccagagcccacuuuuuuuucuuuuuuugaaauaaaauagccugucuuucagaucucaaaggcucuuuucagagccaccaaaaaaaaaaaaaaaaaaaaaaaaaaaaaaaaaaaaaaaaaaaaaaaaaaaaaaaaaaaaaaaaaaaaaaaaaaaaaaaaaaaaaaaaaaaaaaaaaaaaa

SEQ ID NO: 19498 - RNA, 6113 nt, Artificial Sequence
  SARS-CoV-2__MT919788.1__non-structural protein 3 (NSP3) mRNA gc
aggagagucccgcagucggcguccagcggcucugcuuguucgugugugugucguugcaggccuuauucaagcuuaccauggcccccaccaaggugaccuucggcgacgacacggucaucgaggugcagggguacaagagcgugaacaucaccuucgagcuggacgagcgcaucgacaagguccucaacgagaagugcuccgccuacaccguggagcugggcaccgaggugaacgaguucgcgugcgucguggccgacgccgugaucaagacgcugcagccggucagcgagcuccugaccccccuggggaucgaccucgacgagugguccauggccaccuacuaccuguucgacgagagcggcgaguucaagcuggccucccacauguacugcagcuucuacccccccgacgaggacgaggaggagggggacugcgaggaggaggaguucgagccguccacccaguacgaguacggcacggaggacgacuaccagggcaagccccucgaguucggggcgaccagcgccgcccugcagcccgaggaggagcaggaggaggacuggcuggacgacgacucccagcagaccgugggccagcaggacgggagcgaggacaaccagaccacgaccauccagaccaucguggagguccagccccagcucgagauggagcugaccccgguggugcagacgaucgaggucaacuccuucagcggcuaccugaagcucaccgacaacguguacaucaagaacgccgacaucguggaggaggcgaagaaggucaagcccaccgugguggucaacgccgccaacguguaccugaagcacgggggcggcguggccggggcccugaacaaggcgaccaacaacgccaugcaggucgaguccgacgacuacaucgccacgaacggcccccucaagguggggggcagcugcguccuguccggccacaaccuggccaagcacugccuccacgugguggggcccaacgucaacaagggcgaggacauccagcugcugaagagcgccuacgagaacuucaaccagcacgaggugcuccuggcgccgcugcucuccgccgggaucuucggcgccgaccccauccacagccugcgggugugcgucgacaccgugcgcaccaacguguaccuggccgucuucgacaagaaccucuacgacaagcugguguccagcuuccuggagaugaagagcgagaagcagguggagcagaagaucgccgagauccccaaggaggaggucaagcccuucaucaccgaguccaagccgagcguggagcagcggaagcaggacgacaagaagaucaaggcgugcguggaggaggucacgaccacccucgaggagaccaaguuccugacggagaaccugcuccuguacaucgacaucaacgggaaccugcaccccgacuccgccacccucgugagcgacaucgacaucaccuuccugaagaaggacgcccccuacaucgugggcgacgucgugcaggagggcgugcugaccgccgucgugauccccacgaagaaggccgggggcaccaccgagaugcucgcgaaggcccugcgcaaggugccgaccgacaacuacaucacgaccuaccccgggcagggccugaacggguacaccgucgaggaggccaagaccgugcucaagaagugcaaguccgccuucuacauccugcccagcaucaucuccaacgagaagcaggagauccugggcaccgugagcuggaaccuccgggagaugcuggcgcacgccgaggagacgcgcaagcugaugcccgucugcguggagaccaaggccaucguguccaccauccagcggaaguacaagggcaucaagauccaggagggggucguggacuacggcgcccgcuucuacuucuacaccagcaagacgaccguggccucccugaucaacacccucaacgaccugaacgagacccuggucacgaugccgcucggguacgugacccacggccugaaccuggaggaggcggcccgguacaugcgcagccucaaggugcccgccaccgucuccgugagcucccccgacgccgugaccgccuacaacggguaccugacgagcuccagcaagacccccgaggagcacuucaucgagaccaucucccuggcgggcagcuacaaggacuggagcuacuccggccagagcacccagcucgggaucgaguuccugaagcggggcgacaaguccgucuacuacacgagcaacccgaccaccuuccaccuggacggggaggugaucaccuucgacaaccucaagacgcugcugucccuccgcgaggugcggaccaucaaggucuucaccaccguggacaacaucaaccugcacacgcagguggucgacaugagcaugaccuacggccagcaguucggccccaccuaccuggacggggccgacgugaccaagaucaagccccacaacucccacgagggcaagacguucuacgugcucccgaacgacgacacccugcgcgucgaggccuucgaguacuaccacaccaccgaccccagcuuccuggggcgguacauguccgcccucaaccacacgaagaaguggaaguacccccaggugaacggccugaccagcaucaagugggccgacaacaacugcuaccuggcgaccgcccuccugacccugcagcagaucgagcucaaguucaaccccccggcccugcaggacgccuacuaccgcgcgcgggccggggaggccgccaacuucugcgcccugauccucgcguacugcaacaagacggugggcgagcugggcgacguccgcgagaccauguccuaccuguuccagcacgccaaccucgacagcugcaagcgggugcugaacgucgugugcaagaccugcgggcagcagcagaccacccugaagggcguggaggccgucauguacauggggacgcucuccuacgagcaguucaagaagggcgugcagauccccugcaccugcgggaagcaggccaccaaguaccuggugcagcaggagagccccuucgucaugauguccgcccccccggcgcaguacgagcugaagcacggcaccuucacgugcgccagcgaguacaccggcaacuaccagugcgggcacuacaagcacaucaccuccaaggagacccucuacugcaucgacggcgcccugcugacgaagagcagcgaguacaaggggcccaucaccgacguguucuacaaggagaacuccuacaccaccacgaucaagcccgugaccuacaagcucgacggcgucgugugcaccgagaucgaccccaagcuggacaacuacuacaagaaggacaacagcuacuucaccgagcagccgaucgaccuggugcccaaccagcccuaccccaacgccuccuucgacaacuucaaguucgucugcgacaacaucaaguucgccgacgaccucaaccagcugacgggguacaagaagccggcgagccgcgagcugaaggugaccuucuuccccgaccucaacggcgacguggucgccaucgacuacaagcacuacacccccuccuucaagaagggcgccaagcugcugcacaagcccaucguguggcacgugaacaacgccaccaacaaggcgacguacaagccgaacaccuggugcauccggugccucuggagcaccaagcccgucgagaccuccaacagcuucgacgugcugaaguccgaggacgcccaggggauggacaaccuggccugcgaggaccucaagcccgugagcgaggaggucguggagaaccccacgauccagaaggacgugcuggagugcaacgucaagaccaccgagguggugggcgacaucauccugaagccggccaacaacucccucaagaucaccgaggaggucgggcacacggaccugauggccgcguacguggacaacagcucccugaccaucaagaagcccaacgagcucagccgcgugcugggccugaagacccucgccacccacgggcuggccgccgucaacuccgugcccugggacacgaucgccaacuacgcgaagccguuccugaacaagguggucagcaccaccaccaacaucgugacgcgcugccucaaccgggugugcaccaacuacaugcccuacuucuucacccugcugcuccagcugugcaccuucacccgcuccacgaacagccggaucaaggccuccaugcccaccaccaucgccaagaacaccgucaagagcgugggcaaguucugccuggaggccagcuucaacuaccucaagucccccaacuucagcaagcugaucaacaucaucaucugguuccugcuccuguccgugugccugggcagccucaucuacuccacggccgcgcuggggguccugaugagcaaccucggcaucccguccuacugcaccggguaccgcgagggcuaccugaacagcaccaacgugaccaucgccacguacugcaccggcuccauccccugcagcgugugccuguccgggcucgacagccuggacaccuaccccucccuggagaccauccagaucacgaucagcuccuucaagugggaccucaccgccuucggccuggucgccgagugguuccuggccuacauccucuucacccgguucuucuacgugcuggggcuggcggccaucaugcagcucuucuucagcuacuucgccgugcacuucaucuccaacagcuggcugauguggcugaucaucaaccugguccagauggcccccaucuccgcgauggugcgcauguacaucuucuucgccagcuucuacuacguguggaagagcuacguccacgugguggacggcugcaacuccagcaccugcaugaugugcuacaagcggaaccgcgccacgcgggucgagugcaccaccaucgugaacgggguccgccgguccuucuacguguacgccaacggcggcaagggguucugcaagcuccacaacuggaacugcgugaacugcgacaccuucugcgccggcagcacguucaucuccgacgaggucgcgcgcgaccugagccugcaguucaagcggccgaucaaccccaccgaccaguccagcuacaucguggacuccgugaccgucaagaacgggagcauccaccucuacuucgacaaggccggccagaagaccuacgagcgccacucccugagccacuucgugaaccuggacaaccuccgggccaacaacacgaaggggucccugcccaucaacgugaucgucuucgacggcaagagcaagugcgaggaguccagcgccaaguccgccagcguguacuacucccagcugaugugccagcccauccuccugcuggaccaggcgcucgugagcgacgucggcgacagcgccgagguggccgugaagauguucgacgccuacgucaacaccuucuccagcaccuucaacgugccgauggagaagcugaagacccugguggccacggcggaggccgagcucgccaagaacgucucccuggacaacgugcugagcaccuucaucuccgccgcgcgccagggguucguggacagcgacgucgagaccaaggacgugguggagugccucaagcugucccaccagagcgacaucgaggucaccggcgacuccugcaacaacuacaugcugacguacaacaagguggagaacaugaccccccgggaccucggggccugcaucgacugcagcgcccgccacaucaacgcccagguggccaagucccacaacaucgcgcugaucuggaacgucaaggacuucaugagccuguccgagcagcuccggaagcagauccgcagcgccgccaagaagaacaaccugcccuucaagcugaccugcgccaccacgcgccagguggugaacgucgugaccaccaagaucgcccucaagggcgggugaggacuagucccuguucccagagcccacuuuuuuuucuuuuuuugaaauaaaauagccugucuuucagaucucaaaggcucuuuucagagccaccaaaaaaaaaaaaaaaaaaaaaaaaaaaaaaaaaaaaaaaaaaaaaaaaaaaaaaaaaaaaaaaaaaaaaaaaaaaaaaaaaaaaaaaaaaaaaaaaaaaaa

SEQ ID NO: 19499 - RNA, 6113 nt, Artificial Sequence
  SARS-CoV-2__MT919996.1__non-structural protein 3 (NSP3) mRNA gc
aggagagucccgcagucggcguccagcggcucugcuuguucgugugugugucguugcaggccuuauucaagcuuaccauggcccccaccaaggugaccuucggcgacgacacggucaucgaggugcagggguacaagagcgugaacaucaccuucgagcuggacgagcgcaucgacaagguccucaacgagaagugcuccgccuacaccguggagcugggcaccgaggugaacgaguucgcgugcgucguggccgacgccgugaucaagacgcugcagccggucagcgagcuccugaccccccuggggaucgaccucgacgagugguccauggccaccuacuaccuguucgacgagagcggcgaguucaagcuggccucccacauguacugcagcuucuacccccccgacgaggacgaggaggagggggacugcgaggaggaggaguucgagccguccacccaguacgaguacggcacggaggacgacuaccagggcaagccccucgaguucggggcgaccagcgccgcccugcagcccgaggaggagcaggaggaggacuggcuggacgacgacucccagcagaccgugggccagcaggacgggagcgaggacaaccagaccacgaccauccagaccaucguggagguccagccccagcucgagauggagcugaccccgguggugcagacgaucgaggucaacuccuucagcggcuaccugaagcucaccgacaacguguacaucaagaacgccgacaucguggaggaggcgaagaaggucaagcccaccgugguggucaacgccgccaacguguaccugaagcacgggggcggcguggccggggcccugaacaaggcgaccaacaacgccaugcaggucgaguccgacgacuacaucgccacgaacggcccccucaagguggggggcagcugcguccuguccggccacaaccuggccaagcacugccuccacgugguggggcccaacgucaacaagggcgaggacauccagcugcugaagagcgccuacgagaacuucaaccagcacgaggugcuccuggcgccgcugcucuccgccgggaucuucggcgccgaccccauccacagccugcgggugugcgucgacaccgugcgcaccaacguguaccuggccgucuucgacaagaaccucuacgacaagcugguguccagcuuccuggagaugaagagcgagaagcagguggagcagaagaucgccgagauccccaaggaggaggucaagcccuucaucaccgaguccaagccgagcguggagcagcggaagcaggacgacaagaagaucaaggcgugcguggaggaggucacgaccacccucgaggagaccaaguuccugacggagaaccugcuccuguacaucgacaucaacgggaaccugcaccccgacuccgccacccucgugagcgacaucgacaucaccuuccugaagaaggacgcccccuacaucgugggcgacgucgugcaggagggcgugcugaccgccgucgugauccccacgaagaaggccgggggcaccaccgagaugcucgcgaaggcccugcgcaaggugccgaccgacaacuacaucacgaccuaccccgggcagggccugaacggguacaccgucgaggaggccaagaccgugcucaagaagugcaaguccgccuucuacauccugcccagcaucaucuccaacgagaagcaggagauccugggcaccgugagcuggaaccuccgggagaugcuggcgcacgccgaggagacgcgcaagcugaugcccgucugcguggagaccaaggccaucguguccaccauccagcggaaguacaagggcaucaagauccaggagggggucguggacuacggcgcccgcuucuacuucuacaccagcaagacgaccguggccucccugaucaacacccucaacgaccugaacgagacccuggucacgaugccgcucggguacgugacccacggccugaaccuggaggaggcggcccgguacaugcgcagccucaaggugcccgccaccgucuccgugagcucccccgacgccgugaccgccuacaacggguaccugacgagcuccagcaagacccccgaggagcacuucaucgagaccaucucccuggcgggcagcuacaaggacuggagcuacuccggccagagcacccagcucgggaucgaguuccugaagcggggcgacaaguccgucuacuacacgagcaacccgaccaccuuccaccuggacggggaggugaucaccuucgacaaccucaagacgcugcugucccuccgcgaggugcggaccaucaaggucuucaccaccguggacaacaucaaccugcacacgcagguggucgacaugagcaugaccuacggccagcaguucggccccaccuaccuggacggggccgacgugaccaagaucaagccccacaacucccacgagggcaagacguucuacgugcucccgaacgacgacacccugcgcgucgaggccuucgaguacuaccacaccaccgaccccagcuuccuggggcgguacauguccgcccucaaccacacgaagaaguggaaguacccccaggugaacggccugaccagcaucaagugggccgacaacaacugcuaccuggcgaccgcccuccugacccugcagcagaucgagcucaaguucaaccccccggcccugcaggacgccuacuaccgcgcgcgggccggggaggccgccaacuucugcgcccugauccucgcguacugcaacaagacggugggcgagcugggcgacguccgcgagaccauguccuaccuguuccagcacgccaaccucgacagcugcaagcgggugcugaacgucgugugcaagaccugcgggcagcagcagaccacccugaagggcguggaggccgucauguacauggggacgcucuccuacgagcaguucaagaagggcgugcagauccccugcaccugcgggaagcaggccaccaaguaccuggugcagcaggagagccccuucgucaugauguccgcccccccggcgcaguacgagcugaagcacggcaccuucacgugcgccagcgaguacaccggcaacuaccagugcgggcacuacaagcacaucaccuccaaggagacccucuacugcaucgacggcgcccugcugacgaagagcagcgaguacaaggggcccaucaccgacguguucuacaaggagaacuccuacaccaccacgaucaagcccgugaccuacaagcucgacggcgucgugugcaccgagaucgaccccaagcuggacaacuacuacaagaaggacaacagcuacuucaccgagcagccgaucgaccuggugcccaaccagcccuaccccaacgccuccuucgacaacuucaaguucgucugcgacaacaucaaguucgccgacgaccucaaccagcugacgggguacaagaagccggcgagccgcgagcugaaggugaccuucuuccccgaccucaacggcgacguggucgccaucgacuacaagcacuacacccccuccuucaagaagggcgccaagcugcugcacaagcccaucguguggcacgugaacaacgccaccaacaaggcgacguacaagccgaacaccuggugcauccggugccucuggagcaccaagcccgucgagaccuccaacagcuucgacgugcugaaguccgaggacgcccaggggauggacaaccuggccugcgaggaccucaagcccgugagcgaggaggucguggagaaccccacgauccagaaggacgugcuggagugcaacgucaagaccaccgagguggugggcgacaucauccugaagccggccaacaacucccucaagaucaccgaggaggucgggcacacggaccugauggccgcguacguggacaacagcucccugaccaucaagaagcccaacgagcucuuccgcgugcugggccugaagacccucgccacccacgggcuggccgccgucaacagcgugcccugggacacgaucgccaacuacgcgaagccguuccugaacaagguggucuccaccaccaccaacaucgugacgcgcugccucaaccgggugugcaccaacuacaugcccuacuucuucacccugcugcuccagcugugcaccuucacccgcagcacgaacucccggaucaaggccagcaugcccaccaccaucgccaagaacaccgucaaguccgugggcaaguucugccuggaggccagcuucaacuaccucaagagccccaacuucuccaagcugaucaacaucaucaucugguuccugcuccugagcgugugccugggcucccucaucuacagcacggccgcgcuggggguccugauguccaaccucggcaugccgagcuacugcaccggguaccgcgagggcuaccugaacuccaccaacgugaccaucgccacguacugcaccggcagcauccccugcuccgugugccugagcgggcucgacucccuggacaccuaccccagccuggagaccauccagaucacgaucuccagcuucaagugggaccucaccgccuucggccuggucgccgagugguuccuggccuacauccucuucacccgguucuucuacgugcuggggcuggcggccaucaugcagcucuucuucuccuacuucgccgugcacuucaucagcaacuccuggcugauguggcugaucaucaaccugguccagauggcccccaucagcgcgauggugcgcauguacaucuucuucgccuccuucuacuacguguggaagagcuacguccacgugguggacggcugcaacagcuccaccugcaugaugugcuacaagcggaaccgcgccacgcgggucgagugcaccaccaucgugaacgggguccgccggagcuucuacguguacgccaacggcggcaagggguucugcaagcuccacaacuggaacugcgugaacugcgacaccuucugcgccggcuccacguucaucagcgacgaggucgcgcgcgaccugucccugcaguucaagcggccgaucaaccccaccgaccagagcuccuacaucguggacagcgugaccgucaagaacggguccauccaccucuacuucgacaaggccggccagaagaccuacgagcgccacagccugucccacuucgugaaccuggacaaccuccgggccaacaacacgaaggggagccugcccaucaacgugaucgucuucgacggcaaguccaagugcgaggagagcuccgccaagagcgccuccguguacuacagccagcugaugugccagcccauccuccugcuggaccaggcgcucguguccgacgucggcgacagcgccgagguggccgugaagauguucgacgccuacgucaacaccuucagcuccaccuucaacgugccgauggagaagcugaagacccugguggccacggcggaggccgagcucgccaagaacgucagccuggacaacgugcuguccaccuucaucagcgccgcgcgccagggguucguggacuccgacgucgagaccaaggacgugguggagugccucaagcugagccaccaguccgacaucgaggucaccggcgacagcugcaacaacuacaugcugacguacaacaagguggagaacaugaccccccgggaccucggggccugcaucgacugcuccgcccgccacaucaacgcccagguggccaagagccacaacaucgcgcugaucuggaacgucaaggacuucaugucccugagcgagcagcuccggaagcagauccgcuccgccgccaagaagaacaaccugcccuucaagcugaccugcgccaccacgcgccagguggugaacgucgugaccaccaagaucgcccucaagggcgggugaggacuagucccuguucccagagcccacuuuuuuuucuuuuuuugaaauaaaauagccugucuuucagaucucaaaggcucuuuucagagccaccaaaaaaaaaaaaaaaaaaaaaaaaaaaaaaaaaaaaaaaaaaaaaaaaaaaaaaaaaaaaaaaaaaaaaaaaaaaaaaaaaaaaaaaaaaaaaaaaaaaaa

SEQ ID NO: 19500 - RNA, 6113 nt, Artificial Sequence
  SARS-CoV-2__MT919997.1__non-structural protein 3 (NSP3) mRNA gc
aggagagucccgcagucggcguccagcggcucugcuuguucgugugugugucguugcaggccuuauucaagcuuaccauggcccccaccaaggugaccuucggcgacgacacggucaucgaggugcagggguacaagagcgugaacaucaccuucgagcuggacgagcgcaucgacaagguccucaacgagaagugcuccgccuacaccguggagcugggcaccgaggugaacgaguucgcgugcgucguggccgacgccgugaucaagacgcugcagccggucagcgagcuccugaccccccuggggaucgaccucgacgagugguccauggccaccuacuaccuguucgacgagagcggcgaguucaagcuggccucccacauguacugcagcuucuaccccuccgacgaggacgaggaggagggggacugcgaggaggaggaguucgagcccagcacccaguacgaguacggcacggaggacgacuaccagggcaagccgcucgaguucggggcgaccuccgccgcccugcagcccgaggaggagcaggaggaggacuggcuggacgacgacagccagcagaccgugggccagcaggacggguccgaggacaaccagaccacgaccauccagaccaucguggagguccagccccagcucgagauggagcugacccccguggugcagacgaucgaggucaacagcuucuccggcuaccugaagcucaccgacaacguguacaucaagaacgccgacaucguggaggaggcgaagaaggucaagccgaccgugguggucaacgccgccaacguguaccugaagcacgggggcggcguggccggggcccugaacaaggcgaccaacaacgccaugcaggucgagagcgacgacuacaucgccacgaacggcccccucaagguggggggcuccugcguccugagcggccacaaccuggccaagcacugccuccacgugguggggcccaacgucaacaagggcgaggacauccagcugcugaaguccgccuacgagaacuucaaccagcacgaggugcuccuggcgccccugcucagcgccgggaucuucggcgccgacccgauccacucccugcgggugugcgucgacaccgugcgcaccaacguguaccuggccgucuucgacaagaaccucuacgacaagcuggugagcagcuuccuggagaugaaguccgagaagcagguggagcagaagaucgccgagauccccaaggaggaggucaagcccuucaucaccgagagcaagcccuccguggagcagcggaagcaggacgacaagaagaucaaggcgugcguggaggaggucacgaccacccucgaggagaccaaguuccugacggagaaccugcuccuguacaucgacaucaacgggaaccugcacccggacagcgccacccucguguccgacaucgacaucaccuuccugaagaaggacgcccccuacaucgugggcgacgucgugcaggagggcgugcugaccgccgucgugauccccacgaagaaggccgggggcaccaccgagaugcucgcgaaggcccugcgcaaggugcccaccgacaacuacaucacgaccuacccggggcagggccugaacggguacaccgucgaggaggccaagaccgugcucaagaagugcaagagcgccuucuacauccugcccuccaucaucagcaacgagaagcaggagauccugggcaccguguccuggaaccuccgggagaugcuggcgcacgccgaggagacgcgcaagcugaugcccgucugcguggagaccaaggccaucgugagcaccauccagcggaaguacaagggcaucaagauccaggagggggucguggacuacggcgcccgcuucuacuucuacaccuccaagacgaccguggccagccugaucaacacccucaacgaccugaacgagacccuggucacgaugccccucggguacgugacccacggccugaaccuggaggaggcggcccgguacaugcgcucccucaaggugccggccaccgucagcguguccagccccgacgccgugaccgccuacaacggguaccugacguccagcuccaagacccccgaggagcacuucaucgagaccaucagccuggcgggcagcuacaaggacugguccuacagcggccaguccacccagcucgggaucgaguuccugaagcggggcgacaagagcgucuacuacacguccaaccccaccaccuuccaccuggacggggaggugaucaccuucgacaaccucaagacgcugcugagccuccgcgaggugcggaccaucaaggucuucaccaccguggacaacaucaaccugcacacgcagguggucgacauguccaugaccuacggccagcaguucggcccgaccuaccuggacggggccgacgugaccaagaucaagccccacaacagccacgagggcaagacguucuacgugcuccccaacgacgacacccugcgcgucgaggccuucgaguacuaccacaccaccgacccguccuuccuggggcgguacaugagcgcccucaaccacacgaagaaguggaaguacccccaggugaacggccugaccuccaucaagugggccgacaacaacugcuaccuggcgaccgcccuccugacccugcagcagaucgagcucaaguucaacccccccgcccugcaggacgccuacuaccgcgcgcgggccggggaggccgccaacuucugcgcccugauccucgcguacugcaacaagacggugggcgagcugggcgacguccgcgagaccaugagcuaccuguuccagcacgccaaccucgacuccugcaagcgggugcugaacgucgugugcaagaccugcgggcagcagcagaccacccugaagggcguggaggccgucauguacauggggacgcucagcuacgagcaguucaagaagggcgugcagaucccgugcaccugcgggaagcaggccaccaaguaccuggugcagcaggagucccccuucgucaugaugagcgccccccccgcgcaguacgagcugaagcacggcaccuucacgugcgccuccgaguacaccggcaacuaccagugcgggcacuacaagcacaucaccagcaaggagacccucuacugcaucgacggcgcccugcugacgaagagcuccgaguacaaggggccgaucaccgacguguucuacaaggagaacagcuacaccaccacgaucaagcccgugaccuacaagcucgacggcgucgugugcaccgagaucgaccccaagcuggacaacuacuacaagaaggacaacuccuacuucaccgagcagcccaucgaccuggugccgaaccagcccuaccccaacgccagcuucgacaacuucaaguucgucugcgacaacaucaaguucgccgacgaccucaaccagcugacgggguacaagaagcccgcgucccgcgagcugaaggugaccuucuucccggaccucaacggcgacguggucgccaucgacuacaagcacuacacccccagcuucaagaagggcgccaagcugcugcacaagcccaucguguggcacgugaacaacgccaccaacaaggcgacguacaagcccaacaccuggugcauccggugccucugguccaccaagccggucgagaccagcaacuccuucgacgugcugaagagcgaggacgcccaggggauggacaaccuggccugcgaggaccucaagcccguguccgaggaggucguggagaaccccacgauccagaaggacgugcuggagugcaacgucaagaccaccgagguggugggcgacaucauccugaagcccgccaacaacagccucaagaucaccgaggaggucgggcacacggaccugauggccgcguacguggacaacuccagccugaccaucaagaagccgaacgagcucucccgcgugcugggccugaagacccucgccacccacgggcuggccgccgucaacagcgugcccugggacacgaucgccaacuacgcgaagcccuuccugaacaagguggucuccaccaccaccaacaucgugacgcgcugccucaaccgggugugcaccaacuacaugccguacuucuucacccugcugcuccagcugugcaccuucacccgcagcacgaacucccggaucaaggccagcaugcccaccaccaucgccaagaacaccgucaagagcgugggcaaguucugccuggaggccuccuucaacuaccucaagagccccaacuucuccaagcugaucaacaucaucaucugguuccugcuccugagcgugugccugggcucccucaucuacagcacggccgcgcuggggguccugauguccaaccucggcaugcccagcuacugcaccggguaccgcgagggcuaccugaacuccaccaacgugaccaucgccacguacugcaccggcagcaucccgugcuccgugugccugagcgggcucgacucccuggacaccuaccccagccuggagaccauccagaucacgaucuccagcuucaagugggaccucaccgccuucggccuggucgccgagugguuccuggccuacauccucuucacccgguucuucuacgugcuggggcuggcggccaucaugcagcucuucuucuccuacuucgccgugcacuucaucagcaacuccuggcugauguggcugaucaucaaccugguccagauggcccccaucagcgcgauggugcgcauguacaucuucuucgccagcuucuacuacguguggaaguccuacguccacgugguggacggcugcaacagcuccaccugcaugaugugcuacaagcggaaccgcgccacgcgggucgagugcaccaccaucgugaacgggguccgccggagcuucuacguguacgccaacggcggcaagggguucugcaagcuccacaacuggaacugcgugaacugcgacaccuucugcgccggcuccacguucaucagcgacgaggucgcgcgcgaccugucccugcaguucaagcggcccaucaacccgaccgaccagagcuccuacaucguggacagcgugaccgucaagaacggguccauccaccucuacuucgacaaggccggccagaagaccuacgagcgccacagccugucccacuucgugaaccuggacaaccuccgggccaacaacacgaaggggagccugcccaucaacgugaucgucuucgacggcaaguccaagugcgaggagagcuccgccaagagcgccuccguguacuacagccagcugaugugccagcccauccuccugcuggaccaggcgcucgugagcgacgucggcgacuccgccgagguggccgugaagauguucgacgccuacgucaacaccuucagcuccaccuucaacgugcccauggagaagcugaagacccugguggccacggcggaggccgagcucgccaagaacgucagccuggacaacgugcuguccaccuucaucagcgccgcgcgccagggguucguggacuccgacgucgagaccaaggacgugguggagugccucaagcugagccaccaguccgacaucgaggucaccggcgacagcugcaacaacuacaugcugacguacaacaagguggagaacaugaccccgcgggaccucggggccugcaucgacugcuccgcccgccacaucaacgcccagguggccaagagccacaacaucgcgcugaucuggaacgucaaggacuucaugucccugagcgagcagcuccggaagcagauccgcuccgccgccaagaagaacaaccugcccuucaagcugaccugcgccaccacgcgccagguggugaacgucgugaccaccaagaucgcccucaagggcgggugaggacuagucccuguucccagagcccacuuuuuuuucuuuuuuugaaauaaaauagccugucuuucagaucucaaaggcucuuuucagagccaccaaaaaaaaaaaaaaaaaaaaaaaaaaaaaaaaaaaaaaaaaaaaaaaaaaaaaaaaaaaaaaaaaaaaaaaaaaaaaaaaaaaaaaaaaaaaaaaaaaaaa

SEQ ID NO: 19501 - RNA, 6113 nt, Artificial Sequence
  SARS-CoV-2__MT919999.1__non-structural protein 3 (NSP3) mRNA gc
aggagagucccgcagucggcguccagcggcucugcuuguucgugugugugucguugcaggccuuauucaagcuuaccauggcccccaccaaggugaccuucggcgacgacacggucaucgaggugcagggguacaagagcgugaacaucaccuucgagcuggacgagcgcaucgacaagguccucaacgagaagugcuccgccuacaccguggagcugggcaccgaggugaacgaguucgcgugcgucguggccgacgccgugaucaagacgcugcagccggucagcgagcuccugaccccccuggggaucgaccucgacgagugguccauggccaccuacuaccuguucgacgagagcggcgaguucaagcuggccucccacauguacugcagcuucuacccccccgacgaggacgaggaggagggggacugcgaggaggaggaguucgagccguccacccaguacgaguacggcacggaggacgacuaccagggcaagccccucgaguucggggcgaccagcgccgcccugcagcuggaggaggagcaggaggaggacuggcucgacgacgacucccagcagaccgugggccagcaggacgggagcgaggacaaccagaccacgaccauccagaccaucguggagguccagccccagcuggagauggagcugacccccguggugcagacgaucgaggucaacuccuucagcggcuaccucaagcugaccgacaacguguacaucaagaacgccgacaucguggaggaggcgaagaaggucaagccgaccgugguggucaacgccgccaacguguaccugaagcacgggggcggcguggccggggcccucaacaaggcgaccaacaacgccaugcaggucgaguccgacgacuacaucgccacgaacggcccccugaagguggggggcagcugcguccuguccggccacaaccucgccaagcacugccugcacgugguggggcccaacgucaacaagggcgaggacauccagcugcucaagagcgccuacgagaacuucaaccagcacgaggugcugcuggcgccccuccuguccgccgggaucuucggcgccgacccgauccacagccugcgggugugcgucgacaccgugcgcaccaacguguaccucgccgucuucgacaagaaccuguacgacaagcugguguccagcuuccucgagaugaagagcgagaagcagguggagcagaagaucgccgagauccccaaggaggaggucaagcccuucaucaccgaguccaagcccagcguggagcagcggaagcaggacgacaagaagaucaaggcgugcguggaggaggucacgaccacccuggaggagaccaaguuccugacggagaaccuccugcuguacaucgacaucaacgggaaccuccacccggacuccgccacccuggugagcgacaucgacaucaccuuccugaagaaggacgcccccuacaucgugggcgacgucgugcaggagggcgugcucaccgccgucgugauccccacgaagaaggccgggggcaccaccgagaugcuggcgaaggcccugcgcaaggugcccaccgacaacuacaucacgaccuacccggggcagggccucaacggguacaccgucgaggaggccaagaccgugcugaagaagugcaaguccgccuucuacauccugcccagcaucaucuccaacgagaagcaggagauccucggcaccgugagcuggaaccugcgggagaugcuggcgcacgccgaggagacgcgcaagcugaugcccgucugcguggagaccaaggccaucguguccaccauccagcggaaguacaagggcaucaagauccaggagggggucguggacuacggcgcccgcuucuacuucuacaccagcaagacgaccguggccucccucaucaacacccugaacgaccugaacgagacccucgucacgaugccccugggguacgugacccacggccugaaccucgaggaggcggcccgguacaugcgcagccugaaggugccggccaccgucuccgugagcucccccgacgccgugaccgccuacaacggguaccugacgagcuccagcaagacccccgaggagcacuucaucgagaccaucucccucgcgggcagcuacaaggacuggagcuacuccggccagagcacccagcuggggaucgaguuccugaagcggggcgacaaguccgucuacuacacgagcaaccccaccaccuuccaccucgacggggaggugaucaccuucgacaaccugaagacgcugcucucccugcgcgaggugcggaccaucaaggucuucaccaccguggacaacaucaaccugcacacgcagguggucgacaugagcaugaccuacggccagcaguucggcccgaccuaccucgacggggccgacgugaccaagaucaagccccacaacucccacgagggcaagacguucuacgugcugcccaacgacgacacccugcgcgucgaggccuucgaguacuaccacaccaccgacccgagcuuccucgggcgguacauguccgcccugaaccacacgaagaaguggaaguacccccaggugaacggccugaccagcaucaagugggccgacaacaacugcuaccucgcgaccgcccugcugacccuccagcagaucgagcugaaguucaacccccccgcccugcaggacgccuacuaccgcgcgcgggccggggaggccgccaacuucugcgcccucauccuggcguacugcaacaagacggugggcgagcugggcgacguccgcgagaccauguccuaccucuuccagcacgccaaccuggacagcugcaagcgggugcugaacgucgugugcaagaccugcgggcagcagcagaccacccucaagggcguggaggccgucauguacauggggacgcuguccuacgagcaguucaagaagggcgugcagaucccgugcaccugcgggaagcaggccaccaaguaccuggugcagcaggagagccccuucgucaugauguccgccccccccgcgcaguacgagcucaagcacggcaccuucacgugcgccagcgaguacaccggcaacuaccagugcgggcacuacaagcacaucaccuccaaggagacccuguacugcaucgacggcgcccugcucacgaagagcagcgaguacaaggggccgaucaccgacguguucuacaaggagaacuccuacaccaccacgaucaagcccgugaccuacaagcuggacggcgucgugugcaccgagaucgaccccaagcuggacaacuacuacaagaaggacaacagcuacuucaccgagcagcccaucgaccucgugccgaaccagcccuaccccaacgccuccuucgacaacuucaaguucgucugcgacaacaucaaguucgccgacgaccugaaccagcugacgggguacaagaagcccgcgagccgcgagcucaaggugaccuucuucccggaccugaacggcgacguggucgccaucgacuacaagcacuacacccccuccuucaagaagggcgccaagcugcuccacaagcccaucguguggcacgugaacaacgccaccaacaaggcgacguacaagcccaacaccuggugcauccggugccuguggagcaccaagccggucgagaccuccaacagcuucgacgugcugaaguccgaggacgcccaggggauggacaaccucgccugcgaggaccugaagcccgugagcgaggaggucguggagaaccccacgauccagaaggacgugcuggagugcaacgucaagaccaccgagguggugggcgacaucauccucaagcccgccaacaacucccugaagaucaccgaggaggucgggcacacggaccugauggccgcguacguggacaacagcucccucaccaucaagaagccgaacgagcugagccgcgugcugggccucaagacccuggccacccacgggcuggccgccgucaacuccgugcccugggacacgaucgccaacuacgcgaagcccuuccucaacaagguggucagcaccaccaccaacaucgugacgcgcugccugaaccgggugugcaccaacuacaugccguacuucuucacccugcuccugcagcugugcaccuucacccgcuccacgaacagccggaucaaggccuccaugcccaccaccaucgccaagaacaccgucaagagcgugggcaaguucugccucgaggccagcuucaacuaccugaagucccccaacuucagcaagcugaucaacaucaucaucugguuccuccugcuguccgugugccucggcagccugaucuacuccacggccgcgcuggggguccucaugagcaaccugggcaugcccuccuacugcaccggguaccgcgagggcuaccugaacagcaccaacgugaccaucgccacguacugcaccggcuccaucccgugcagcgugugccucuccgggcuggacagccuggacaccuaccccucccucgagaccauccagaucacgaucagcuccuucaagugggaccugaccgccuucggccuggucgccgagugguuccucgccuacauccuguucacccgguucuucuacgugcuggggcucgcggccaucaugcagcuguucuucagcuacuucgccgugcacuucaucuccaacagcuggcugauguggcugaucaucaaccucguccagauggcccccaucuccgcgauggugcgcauguacaucuucuucgccagcuucuacuacguguggaagagcuacguccacgugguggacggcugcaacuccagcaccugcaugaugugcuacaagcggaaccgcgccacgcgggucgagugcaccaccaucgugaacgggguccgccgguccuucuacguguacgccaacggcggcaagggguucugcaagcugcacaacuggaacugcgugaacugcgacaccuucugcgccggcagcacguucaucuccgacgaggucgcgcgcgaccugagccuccaguucaagcggcccaucaacccgaccgaccaguccagcuacaucguggacuccgugaccgucaagaacgggagcauccaccuguacuucgacaaggccggccagaagaccuacgagcgccacucccugagccacuucgugaaccucgacaaccugcgggccaacaacacgaaggggucccugcccaucaacgugaucgucuucgacggcaagagcaagugcgaggaguccagcgccaaguccgccagcguguacuacucccagcucaugugccagcccauccugcugcucgaccaggcgcuggugagcgacgucggcgacagcgccgagguggccgugaagauguucgacgccuacgucaacaccuucuccagcaccuucaacgugcccauggagaagcugaagacccucguggccacggcggaggccgagcuggccaagaacgucucccuggacaacgugcucagcaccuucaucuccgccgcgcgccagggguucguggacagcgacgucgagaccaaggacgugguggagugccugaagcugucccaccagagcgacaucgaggucaccggcgacuccugcaacaacuacaugcucacguacaacaagguggagaacaugaccccgcgggaccugggggccugcaucgacugcagcgcccgccacaucaacgcccagguggccaagucccacaacaucgcgcugaucuggaacgucaaggacuucaugagccucuccgagcagcugcggaagcagauccgcagcgccgccaagaagaacaaccugcccuucaagcucaccugcgccaccacgcgccagguggugaacgucgugaccaccaagaucgcccugaagggcgggugaggacuagucccuguucccagagcccacuuuuuuuucuuuuuuugaaauaaaauagccugucuuucagaucucaaaggcucuuuucagagccaccaaaaaaaaaaaaaaaaaaaaaaaaaaaaaaaaaaaaaaaaaaaaaaaaaaaaaaaaaaaaaaaaaaaaaaaaaaaaaaaaaaaaaaaaaaaaaaaaaaaaa

SEQ ID NO: 19502 - RNA, 6113 nt, Artificial Sequence
  SARS-CoV-2__MT920003.1__non-structural protein 3 (NSP3) mRNA gc
aggagagucccgcagucggcguccagcggcucugcuuguucgugugugugucguugcaggccuuauucaagcuuaccauggcccccaccaaggugaccuucggcgacgacacggucaucgaggugcagggguacaagagcgugaacaucaccuucgagcuggacgagcgcaucgacaagguccucaacgagaagugcuccgccuacaccguggagcugggcaccgaggugaacgaguucgcgugcgucguggccgacgccgugaucaagacgcugcagccggucagcgagcuccugaccccccuggggaucgaccucgacgagugguccauggccaccuacuaccuguucgacgagagcggcgaguucaagcuggccucccacauguacugcagcuucuacccccccgacgaggacgaggaggagggggacugcgaggaggaggaguucgagccguccacccaguacgaguacggcacggaggacgacuaccagggcaagccccucgaguucggggcgaccagcgccgcccugcagcccgaggaggagcaggaggaggacuggcuggacgacgacucccagcagaccgugggccagcaggacgggagcgaggacaaccagaccacgaccauccagaccaucguggagguccagccccagcucgagauggagcugaccccgguggugcagacgaucgaggucaacuccuucagcggcuaccugaagcucaccgacaacguguacaucaagaacgccgacaucguggaggaggcgaagaaggucaagcccaccgugguggucaacgccgccaacguguaccugaagcacgggggcggcguggccggggcccugaacaaggcgaccaacaacgccaugcaggucgaguccgacgacuacaucgccacgaacggcccccucaagguggggggcagcugcguccuguccggccacaaccuggccaagcacugccuccacgugguggggcccaacgucaacaagggcgaggacauccagcugcugaagagcgccuacgagaacuucaaccagcacgaggugcuccuggcgccgcugcucuccgccgggaucuucggcgccgaccccauccacagccugcgggugugcgucgacaccgugcgcaccaacguguaccuggccgucuucgacaagaaccucuacgacaagcugguguccagcuuccuggagaugaagagcgagaagcagguggagcagaagaucgccgagauccccaaggaggaggucaagcccuucaucaccgaguccaagccgagcguggagcagcggaagcaggacgacaagaagaucaaggcgugcguggaggaggucacgaccacccucgaggagaccaaguuccugacggagaaccugcuccuguacaucgacaucaacgggaaccugcaccccgacuccgccacccucgugagcgacaucgacaucaccuuccugaagaaggacgcccccuacaucgugggcgacgucgugcaggagggcgugcugaccgccgucgugauccccacgaagaaggccgggggcaccaccgagaugcucgcgaaggcccugcgcaaggugccgaccgacaacuacaucacgaccuaccccgggcagggccugaacggguacaccgucgaggaggccaagaccgugcucaagaagugcaaguccgccuucuacauccugcccagcaucaucuccaacgagaagcaggagauccugggcaccgugagcuggaaccuccgggagaugcuggcgcacgccgaggagacgcgcaagcugaugcccgucugcguggagaccaaggccaucguguccaccauccagcggaaguacaagggcaucaagauccaggagggggucguggacuacggcgcccgcuucuacuucuacaccagcaagacgaccguggccucccugaucaacacccucaacgaccugaacgagacccuggucacgaugccgcucggguacgugacccacggccugaaccuggaggaggcggcccgguacaugcgcagccucaaggugcccgccaccgucuccgugagcucccccgacgccgugaccgccuacaacggguaccugacgagcuccagcaagacccccgaggagcacuucaucgagaccaucucccuggcgggcagcuacaaggacuggagcuacuccggccagagcacccagcucgggaucgaguuccugaagcggggcgacaaguccgucuacuacacgagcaacccgaccaccuuccaccuggacggggaggugaucaccuucgacaaccucaagacgcugcugucccuccgcgaggugcggaccaucaaggucuucaccaccguggacaacaucaaccugcacacgcagguggucgacaugagcaugaccuacggccagcaguucggccccaccuaccuggacggggccgacgugaccaagaucaagccccacaacucccacgagggcaagacguucuacgugcucccgaacgacgacacccugcgcgucgaggccuucgaguacuaccacaccaccgaccccagcuuccuggggcgguacauguccgcccucaaccacacgaagaaguggaaguacccccaggugaacggccugaccagcaucaagugggccgacaacaacugcuaccuggcgaccgcccuccugacccugcagcagaucgagcucaaguucaaccccccggcccugcaggacgccuacuaccgcgcgcgggccggggaggccgccaacuucugcgcccugauccucgcguacugcaacaagacggugggcgagcugggcgacguccgcgagaccauguccuaccuguuccagcacgccaaccucgacagcugcaagcgggugcugaacgucgugugcaagaccugcgggcagcagcagaccacccugaagggcguggaggccgucauguacauggggacgcucuccuacgagcaguucaagaagggcgugcagauccccugcaccugcgggaagcaggccaccaaguaccuggugcagcaggagagccccuucgucaugauguccgcccccccggcgcaguacgagcugaagcacggcaccuucacgugcgccagcgaguacaccggcaacuaccagugcgggcacuacaagcacaucaccuccaaggagacccucuacugcaucgacggcacgcugcugaccaagagcagcgaguacaaggggcccaucaccgacguguucuacaaggagaacuccuacaccacgaccaucaagcccgugaccuacaagcucgacggcgucgugugcaccgagaucgaccccaagcuggacaacuacuacaagaaggacaacagcuacuucacggagcagccgaucgaccuggugcccaaccagcccuaccccaacgccuccuucgacaacuucaaguucgucugcgacaacaucaaguucgccgacgaccucaaccagcugaccggguacaagaagccggccagccgcgagcugaaggugaccuucuuccccgaccucaacggcgacguggucgcgaucgacuacaagcacuacacccccuccuucaagaagggcgccaagcugcugcacaagcccaucguguggcacgugaacaacgccacgaacaaggccaccuacaagccgaacaccuggugcauccggugccucuggagcaccaagcccgucgagacguccaacagcuucgacgugcugaaguccgaggacgcgcaggggauggacaaccuggccugcgaggaccucaagcccgugagcgaggaggucguggagaaccccaccauccagaaggacgugcuggagugcaacgucaagaccaccgagguggugggcgacaucauccugaagccggccaacaacucccucaagaucacggaggaggucgggcacaccgaccugauggccgccuacguggacaacagcucccugaccaucaagaagcccaacgagcucagccgcgugcugggccugaagacccucgcgacgcacgggcuggccgccgucaacuccgugcccugggacaccaucgccaacuacgccaagccguuccugaacaagguggucagcaccaccacgaacaucgugacccgcugccucaaccgggugugcaccaacuacaugcccuacuucuucacccugcugcuccagcugugcaccuucacgcgcuccaccaacagccggaucaaggcguccaugcccaccaccaucgccaagaacacggucaagagcgugggcaaguucugccuggaggccagcuucaacuaccucaagucccccaacuucagcaagcugaucaacaucaucaucugguuccugcuccuguccgugugccugggcagccucaucuacuccaccgccgcccuggggguccugaugagcaaccucggcaugccguccuacugcaccggguaccgcgagggcuaccugaacagcaccaacgugacgaucgcgaccuacugcaccggcuccauccccugcagcgugugccuguccgggcucgacagccuggacaccuaccccucccuggagacgauccagaucaccaucagcuccuucaagugggaccucaccgccuucggccuggucgccgagugguuccuggccuacauccucuucacccgguucuucuacgugcuggggcuggccgcgaucaugcagcucuucuucagcuacuucgccgugcacuucaucuccaacagcuggcugauguggcugaucaucaaccugguccagauggcccccaucuccgccauggugcgcauguacaucuucuucgcgagcuucuacuacguguggaagagcuacguccacgugguggacggcugcaacuccagcacgugcaugaugugcuacaagcggaaccgcgccacccgggucgagugcaccaccaucgugaacgggguccgccgguccuucuacguguacgccaacggcggcaagggguucugcaagcuccacaacuggaacugcgugaacugcgacacguucugcgccggcagcaccuucaucuccgacgaggucgcccgcgaccugagccugcaguucaagcggccgaucaaccccaccgaccaguccagcuacaucguggacuccgugaccgucaagaacgggagcauccaccucuacuucgacaaggcgggccagaagacguacgagcgccacucccugagccacuucgugaaccuggacaaccuccgggccaacaacaccaaggggucccugcccaucaacgugaucgucuucgacggcaagagcaagugcgaggaguccagcgccaaguccgccagcguguacuacucccagcugaugugccagcccauccuccugcuggaccaggcccucgugagcgacgucggcgacagcgcggagguggccgugaagauguucgacgccuacgucaacaccuucuccagcaccuucaacgugccgauggagaagcugaagacgcugguggccaccgccgaggcggagcucgccaagaacgucucccuggacaacgugcugagcaccuucaucuccgccgcccgccagggguucguggacagcgacgucgagaccaaggacgugguggagugccucaagcugucccaccagagcgacaucgaggucacgggcgacuccugcaacaacuacaugcugaccuacaacaagguggagaacaugaccccccgggaccucggggcgugcaucgacugcagcgcccgccacaucaacgcccagguggccaagucccacaacaucgcccugaucuggaacgucaaggacuucaugagccuguccgagcagcuccggaagcagauccgcagcgcggccaagaagaacaaccugcccuucaagcugaccugcgccacgacccgccagguggugaacgucgugaccaccaagaucgcccucaagggcgggugaggacuagucccuguucccagagcccacuuuuuuuucuuuuuuugaaauaaaauagccugucuuucagaucucaaaggcucuuuucagagccaccaaaaaaaaaaaaaaaaaaaaaaaaaaaaaaaaaaaaaaaaaaaaaaaaaaaaaaaaaaaaaaaaaaaaaaaaaaaaaaaaaaaaaaaaaaaaaaaaaaaaa

SEQ ID NO: 19503 - RNA, 6113 nt, Artificial Sequence
  SARS-CoV-2__MT920013.1__non-structural protein 3 (NSP3) mRNA gc
aggagagucccgcagucggcguccagcggcucugcuuguucgugugugugucguugcaggccuuauucaagcuuaccauggcccccaccaaggugaccuucggcgacgacacggucaucgaggugcagggguacaagagcgugaacaucaccuucgagcuggacgagcgcaucgacaagguccucaacgagaagugcuccgccuacaccguggagcugggcaccgaggugaacgaguucgcgugcgucguggccgacgccgugaucaagacgcugcagccggucagcgagcuccugaccccccuggggaucgaccucgacgagugguccauggccaccuacuaccuguucgacgagagcggcgaguucaagcuggccucccacauguacugcagcuucuacccccccgacgaggacgaggaggagggggacugcgaggaggaggaguucgagccguccacccaguacgaguacggcacggaggacgacuaccagggcaagccccucgaguucggggcgaccagcgccgcccugcagcccgaggaggagcaggaggaggacuggcuggacgacgacucccagcagaccgugggccagcaggacgggagcgaggacaaccagaccacgaccauccagaccaucguggagguccagccccagcucgagauggagcugaccccgguggugcagacgaucgaggucaacuccuucagcggcuaccugaagcucaccgacaacguguacaucaagaacgccgacaucguggaggaggcgaagaaggucaagcccaccgugguggucaacgccgccaacguguaccugaagcacgggggcggcguggccggggcccugaacaaggcgaccaacaacgccaugcaggucgaguccgacgacuacaucgccacgaacggcccccucaagguggggggcagcugcguccuguccggccacaaccuggccaagcacugccuccacgugguggggcccaacgucaacaagggcgaggacauccagcugcugaagagcgccuacgagaacuucaaccagcacgaggugcuccuggcgccgcugcucuccgccgggaucuucggcgccgaccccauccacagccugcgggugugcgucgacaccgugcgcaccaacguguaccuggccgucuucgacaagaaccucuacgacaagcugguguccagcuuccuggagaugaagagcgagaagcagguggagcagaagaucgccgagauccccaaggaggaggucaagcccuucaucaccgaguccaagccgagcguggagcagcggaagcaggacgacaagaagaucaaggcgugcguggaggaggucacgaccacccucgaggagaccaaguuccugacggagaaccugcuccuguacaucgacaucaacgggaaccugcaccccgacuccgccacccucgugagcgacaucgacaucaccuuccugaagaaggacgcccccuacaucgugggcgacgucgugcaggagggcgugcugaccgccgucgugauccccacgaagaaggccgggggcaccaccgagaugcucgcgaaggcccugcgcaaggugccgaccgacaacuacaucacgaccuaccccgggcagggccugaacggguacaccgucgaggaggccaagaccgugcucaagaagugcaaguccgccuucuacauccugcccagcaucaucuccaacgagaagcaggagauccugggcaccgugagcuggaaccuccgggagaugcuggcgcacgccgaggagacgcgcaagcugaugcccgucugcguggagaccaaggccaucguguccaccauccagcggaaguacaagggcaucaagauccaggagggggucguggacuacggcgcccgcuucuacuucuacaccagcaagacgaccguggccucccugaucaacacccucaacgaccugaacgagacccuggucacgaugccgcucggguacgugacccacggccugaaccuggaggaggcggcccgguacaugcgcagccucaaggugcccgccaccgucuccgugagcucccccgacgccgugaccgccuacaacggguaccugacgagcuccagcaagacccccgaggagcacuucaucgagaccaucucccuggcgggcagcuacaaggacuggagcuacuccggccagagcacccagcucgggaucgaguuccugaagcggggcgacaaguccgucuacuacacgagcaacccgaccaccuuccaccuggacggggaggugaucaccuucgacaaccucaagacgcugcugucccuccgcgaggugcggaccaucaaggucuucaccaccguggacaacaucaaccugcacacgcagguggucgacaugagcaugaccuacggccagcaguucggccccaccuaccuggacggggccgacgugaccaagaucaagccccacaacucccacgagggcaagacguucuacgugcucccgaacgacgacacccugcgcgucgaggccuucgaguacuaccacaccaccgacagcuccuuccuggggcgguacaugagcgcccucaaccacacgaagaaguggaaguacccccaggugaacggccugaccuccaucaagugggccgacaacaacugcuaccuggcgaccgcccuccugacccugcagcagaucgagcucaaguucaacccccccgcccugcaggacgccuacuaccgcgcgcgggccggggaggccgccaacuucugcgcccugauccucgcguacugcaacaagacggugggcgagcugggcgacguccgcgagaccaugagcuaccuguuccagcacgccaaccucgacuccugcaagcgggugcugaacgucgugugcaagaccugcgggcagcagcagaccacccugaagggcguggaggccgucauguacauggggacgcucagcuacgagcaguucaagaagggcgugcagaucccgugcaccugcgggaagcaggccaccaaguaccuggugcagcaggagucccccuucgucaugaugagcgccccccccgcgcaguacgagcugaagcacggcaccuucacgugcgccuccgaguacaccggcaacuaccagugcgggcacuacaagcacaucaccagcaaggagacccucuacugcaucgacggcgcccugcugacgaagagcuccgaguacaaggggccgaucaccgacguguucuacaaggagaacagcuacaccaccacgaucaagcccgugaccuacaagcucgacggcgucgugugcaccgagaucgaccccaagcuggacaacuacuacaagaaggacaacuccuacuucaccgagcagcccaucgaccuggugccgaaccagcccuaccccaacgccagcuucgacaacuucaaguucgucugcgacaacaucaaguucgccgacgaccucaaccagcugacgggguacaagaagcccgcgucccgcgagcugaaggugaccuucuucccggaccucaacggcgacguggucgccaucgacuacaagcacuacacccccagcuucaagaagggcgccaagcugcugcacaagcccaucguguggcacgugaacaacgccaccaacaaggcgacguacaagcccaacaccuggugcauccggugccucugguccaccaagccggucgagaccagcaacuccuucgacgugcugaagagcgaggacgcccaggggauggacaaccuggccugcgaggaccucaagcccguguccgaggaggucguggagaaccccacgauccagaaggacgugcuggagugcaacgucaagaccaccgagguggugggcgacaucauccugaagcccgccaacaacagccucaagaucaccgaggaggucgggcacacggaccugauggccgcguacguggacaacuccagccugaccaucaagaagccgaacgagcucucccgcgugcugggccugaagacccucgccacccacgggcuggccgccgucaacagcgugcccugggacacgaucgccaacuacgcgaagcccuuccugaacaagguggucuccaccaccaccaacaucgugacgcgcugccucaaccgggugugcaccaacuacaugccguacuucuucacccugcugcuccagcugugcaccuucacccgcagcacgaacucccggaucaaggccagcaugcccaccaccaucgccaagaacaccgucaagagcgugggcaaguucugccuggaggccuccuucaacuaccucaagagccccaacuucuccaagcugaucaacaucaucaucugguuccugcuccugagcgugugccugggcucccucaucuacagcacggccgcgcuggggguccugauguccaaccucggcaugcccagcuacugcaccggguaccgcgagggcuaccugaacuccaccaacgugaccaucgccacguacugcaccggcagcaucccgugcuccgugugccugagcgggcucgacucccuggacaccuaccccagccuggagaccauccagaucacgaucuccagcuucaagugggaccucaccgccuucggccuggucgccgagugguuccuggccuacauccucuucacccgguucuucuacgugcuggggcuggcggccaucaugcagcucuucuucuccuacuucgccgugcacuucaucagcaacuccuggcugauguggcugaucaucaaccugguccagauggcccccaucagcgcgauggugcgcauguacaucuucuucgccagcuucuacuacguguggaaguccuacguccacgugguggacggcugcaacagcuccaccugcaugaugugcuacaagcggaaccgcgccacgcgggucgagugcaccaccaucgugaacgggguccgccggagcuucuacguguacgccaacggcggcaagggguucugcaagcuccacaacuggaacugcgugaacugcgacaccuucugcgccggcuccacguucaucagcgacgaggucgcgcgcgaccugucccugcaguucaagcggcccaucaacccgaccgaccagagcuccuacaucguggacagcgugaccgucaagaacggguccauccaccucuacuucgacaaggccggccagaagaccuacgagcgccacagccugucccacuucgugaaccuggacaaccuccgggccaacaacacgaaggggagccugcccaucaacgugaucgucuucgacggcaaguccaagugcgaggagagcuccgccaagagcgccuccguguacuacagccagcugaugugccagcccauccuccugcuggaccaggcgcucgugagcgacgucggcgacuccgccgagguggccgugaagauguucgacgccuacgucaacaccuucagcuccaccuucaacgugcccauggagaagcugaagacccugguggccacggcggaggccgagcucgccaagaacgucagccuggacaacgugcuguccaccuucaucagcgccgcgcgccagggguucguggacuccgacgucgagaccaaggacgugguggagugccucaagcugagccaccaguccgacaucgaggucaccggcgacagcugcaacaacuacaugcugacguacaacaagguggagaacaugaccccgcgggaccucggggccugcaucgacugcuccgcccgccacaucaacgcccagguggccaagagccacaacaucgcgcugaucuggaacgucaaggacuucaugucccugagcgagcagcuccggaagcagauccgcuccgccgccaagaagaacaaccugcccuucaagcugaccugcgccaccacgcgccagguggugaacgucgugaccaccaagaucgcccucaagggcgggugaggacuagucccuguucccagagcccacuuuuuuuucuuuuuuugaaauaaaauagccugucuuucagaucucaaaggcucuuuucagagccaccaaaaaaaaaaaaaaaaaaaaaaaaaaaaaaaaaaaaaaaaaaaaaaaaaaaaaaaaaaaaaaaaaaaaaaaaaaaaaaaaaaaaaaaaaaaaaaaaaaaaa

SEQ ID NO: 19504 - RNA, 6113 nt, Artificial Sequence
  SARS-CoV-2__MT920018.1__non-structural protein 3 (NSP3) mRNA gc
aggagagucccgcagucggcguccagcggcucugcuuguucgugugugugucguugcaggccuuauucaagcuuaccauggcccccaccaaggugaccuucggcgacgacacggucaucgaggugcagggguacaagagcgugaacaucaccuucgagcuggacgagcgcaucgacaagguccucaacgagaagugcuccgccuacaccguggagcugggcaccgaggugaacgaguucgcgugcgucguggccgacgccgugaucaagacgcugcagccggucagcgagcuccugaccccccuggggaucgaccucgacgagugguccauggccaccuacuaccuguucgacgagagcggcgaguucaagcuggccucccacauguacugcagcuucuacccccccgacgaggacgaggaggagggggacugcgaggaggaggaguucgagccguccacccaguacgaguacggcacggaggacgacuaccagggcaagccccucgaguucggggcgaccagcgccgcccugcagcccgaggaggagcaggaggaggacuggcuggacgacgacucccagcagaccgugggccagcaggacgggagcgaggacaaccagaccacgaccauccagaccaucguggagguccagccccagcucgagauggagcugaccccgguggugcagacgaucgaggucaacuccuucagcggcuaccugaagcucaccgacaacguguacaucaagaacgccgacaucguggaggaggcgaagaaggucaagcccaccgugguggucaacgccgccaacguguaccugaagaacgggggcggcguggccggggcccugaacaaggcgaccaacaacgccaugcaggucgaguccgacgacuacaucgccacgaacggcccccucaagguggggggcagcugcguccuguccggccacaaccuggccaagcacugccuccacgugguggggcccaacgucaacaagggcgaggacauccagcugcugaagagcgccuacgagaacuucaaccagcacgaggugcuccuggcgccgcugcucuccgccgggaucuucggcgccgaccccauccacagccugcgggugugcgucgacaccgugcgcaccaacguguaccuggccgucuucgacaagaaccucuacgacaagcugguguccagcuuccuggagaugaagagcgagaagcagguggagcagaagaucgccgagauccccaaggaggaggucaagcccuucaucaccgaguccaagccgagcguggagcagcggaagcaggacgacaagaagaucaaggcgugcguggaggaggucacgaccacccucgaggagaccaaguuccugacggagaaccugcuccuguacaucgacaucaacgggaaccugcaccccgacuccgccacccucgugagcgacaucgacaucaccuuccugaagaaggacgcccccuacaucgugggcgacgucgugcaggagggcgugcugaccgccgucgugauccccacgaagaaggccgggggcaccaccgagaugcucgcgaaggcccugcgcaaggugccgaccgacaacuacaucacgaccuaccccgggcagggccugaacggguacaccgucgaggaggccaagaccgugcucaagaagugcaaguccgccuucuacauccugcccagcaucaucuccaacgagaagcaggagauccugggcaccgugagcuggaaccuccgggagaugcuggcgcacgccgaggagacgcgcaagcugaugcccgucugcguggagaccaaggccaucguguccaccauccagcggaaguacaagggcaucaagauccaggagggggucguggacuacggcgcccgcuucuacuucuacaccagcaagacgaccguggccucccugaucaacacccucaacgaccugaacgagacccuggucacgaugccgcucggguacgugacccacggccugaaccuggaggaggcggcccgguacaugcgcagccucaaggugcccgccaccgucuccgugagcucccccgacgccgugaccgccuacaacggguaccugacgagcuccagcaagacccccgaggagcacuucaucgagaccaucucccuggcgggcagcuacaaggacuggagcuacuccggccagagcacccagcucgggaucgaguuccugaagcggggcgacaaguccgucuacuacacgagcaacccgaccaccuuccaccuggacggggaggugaucaccuucgacaaccucaagacgcugcugucccuccgcgaggugcggaccaucaaggucuucaccaccguggacaacaucaaccugcacacgcagguggucgacaugagcaugaccuacggccagcaguucggccccaccuaccuggacggggccgacgugaccaagaucaagccccacaacucccacgagggcaagacguucuacgugcucccgaacgacgacacccugcgcgucgaggccuucgaguacuaccacaccaccgaccccagcuuccuggggcgguacauguccgcccucaaccacacgaagaaguggaaguacccccaggugaacggccugaccagcaucaagugggccgacaacaacugcuaccuggcgaccgcccuccugacccugcagcagaucgagcucaaguucaaccccccggcccugcaggacgccuacuaccgcgcgcgggccggggaggccgccaacuucugcgcccugauccucgcguacugcaacaagacggugggcgagcugggcgacguccgcgagaccauguccuaccuguuccagcacgccaaccucgacagcugcaagcgggugcugaacgucgugugcaagaccugcgggcagcagcagaccacccugaagggcguggaggccgucauguacauggggacgcucuccuacgagcaguucaagaagggcgugcagauccccugcaccugcgggaagcaggccaccaaguaccuggugcagcaggagagccccuucgucaugauguccgcccccccggcgcaguacgagcugaagcacggcaccuucacgugcgccagcgaguacaccggcaacuaccagugcgggcacuacaagcacaucaccuccaaggagacccucuacugcaucgacggcgcccugcugacgaagagcagcgaguacaaggggcccaucaccgacguguucuacaaggagaacuccuacaccaccacgaucaagcccgugaccuacaagcucgacggcgucgugugcaccgagaucgaccccaagcuggacaacuacuacaagaaggacaacagcuacuucaccgagcagccgaucgaccuggugcccaaccagcccuaccccaacgccuccuucgacaacuucaaguucgucugcgacaacaucaaguucgccgacgaccucaaccagcugacgggguacaagaagccggcgagccgcgagcugaaggugaccuucuuccccgaccucaacggcgacguggucgccaucgacuacaagcacuacacccccuccuucaagaagggcgccaagcugcugcacaagcccaucguguggcacgugaacaacgccaccaacaaggcgacguacaagccgaacaccuggugcauccggugccucuggagcaccaagcccgucgagaccuccaacagcuucgacgugcugaaguccgaggacgcccaggggauggacaaccuggccugcgaggaccucaagcccgugagcgaggaggucguggagaaccccacgauccagaaggacgugcuggagugcaacgucaagaccaccgagguggugggcgacaucauccugaagccggccaacaacucccucaagaucaccgaggaggucgggcacacggaccugauggccgcguacguggacaacagcucccugaccaucaagaagcccaacgagcucagccgcgugcugggccugaagacccucgccacccacgggcuggccgccgucaacuccgugcccugggacacgaucgccaacuacgcgaagccguuccugaacaagguggucagcaccaccaccaacaucgugacgcgcugccucaaccgggugugcaccaacuacaugcccuacuucuucacccugcugcuccagcugugcaccuucacccgcuccacgaacagccggaucaaggccuccaugcccaccaccaucgccaagaacaccgucaagagcgugggcaaguucugccuggaggccagcuucaacuaccucaagucccccaacuucagcaagcugaucaacaucaucaucugguuccugcuccuguccgugugccugggcagccucaucuacuccacggccgcgcuggggguccugaugagcaaccucggcaugccguccuacugcaccggguaccgcgagggcuaccugaacagcaccaacgugaccaucgccacguacugcaccggcuccauccccugcagcgugugccuguccgggcucgacagccuggacaccuaccccucccuggagaccauccagaucacgaucagcuccuucaagugggaccucaccgccuucggccuggucgccgagugguuccuggccuacauccucuucacccgguucuucuacgugcuggggcuggcggccaucaugcagcucuucuucagcuacuucgccgugcacuucaucuccaacagcuggcugauguggcugaucaucaaccugguccagauggcccccaucuccgcgauggugcgcauguacaucuucuucgccagcuucuacuacguguggaagagcuacguccacgugguggacggcugcaacuccagcaccugcaugaugugcuacaagcggaaccgcgccacgcgggucgagugcaccaccaucgugaacgggguccgccgguccuucuacguguacgccaacggcggcaagggguucugcaagcuccacaacuggaacugcgugaacugcgacaccuucugcgccggcagcacguucaucuccgacgaggucgcgcgcgaccugagccugcaguucaagcggccgaucaaccccaccgaccaguccagcuacaucguggacuccgugaccgucaagaacgggagcauccaccucuacuucgacaaggccggccagaagaccuacgagcgccacucccugagccacuucgugaaccuggacaaccuccgggccaacaacacgaaggggucccugcccaucaacgugaucgucuucgacggcaagagcaagugcgaggaguccagcgccaaguccgccagcguguacuacucccagcugaugugccagcccauccuccugcuggaccaggcgcucgugagcgacgucggcgacagcgccgagguggccgugaagauguucgacgccuacgucaacaccuucuccagcaccuucaacgugccgauggagaagcugaagacccugguggccacggcggaggccgagcucgccaagaacgucucccuggacaacgugcugagcaccuucaucuccgccgcgcgccagggguucguggacagcgacgucgagaccaaggacgugguggagugccucaagcugucccaccagagcgacaucgaggucaccggcgacuccugcaacaacuacaugcugacguacaacaagguggagaacaugaccccccgggaccucggggccugcaucgacugcagcgcccgccacaucaacgcccagguggccaagucccacaacaucgcgcugaucuggaacgucaaggacuucaugagccuguccgagcagcuccggaagcagauccgcagcgccgccaagaagaacaaccugcccuucaagcugaccugcgccaccacgcgccagguggugaacgucgugaccaccaagaucgcccucaagggcgggugaggacuagucccuguucccagagcccacuuuuuuuucuuuuuuugaaauaaaauagccugucuuucagaucucaaaggcucuuuucagagccaccaaaaaaaaaaaaaaaaaaaaaaaaaaaaaaaaaaaaaaaaaaaaaaaaaaaaaaaaaaaaaaaaaaaaaaaaaaaaaaaaaaaaaaaaaaaaaaaaaaaaa

SEQ ID NO: 19505 - RNA, 6113 nt, Artificial Sequence
  SARS-CoV-2__MT920036.1__non-structural protein 3 (NSP3) mRNA gc
aggagagucccgcagucggcguccagcggcucugcuuguucgugugugugucguugcaggccuuauucaagcuuaccauggcccccaccaaggugaccuucggcgacgacacggucaucgaggugcagggguacaagagcgugaacaucaccuucgagcuggacgagcgcaucgacaagguccucaacgagaagugcuccgccuacaccguggagcugggcaccgaggugaacgaguucgcgugcgucguggccgacgccgugaucaagacgcugcagccggucagcgagcuccugaccccccuggggaucgaccucgacgagugguccauggccaccuacuaccuguucgacgagagcggcgaguucaagcuggccucccacauguacugcagcuucuacccccccgacgaggacgaggaggagggggacugcgaggaggaggaguucgagccguccacccaguacgaguacggcacggaggacgacuaccagggcaagccccucgaguucggggcgaccagcgccgcccugcagcccgaggaggagcaggaggaggacuggcuggacgacgacucccagcagaccgugggccagcaggacgggagcgaggacaaccagaccacgaccauccagaccaucguggagguccagccccagcucgagauggagcugaccccgguggugcagacgaucgaggucaacuccuucagcggcuaccugaagcucaccgacaacguguacaucaagaacgccgacaucguggaggaggcgaagaaggucaagcccaccgugguggucaacgccgccaacguguaccugaagcacgggggcggcguggccggggcccugaacaaggcgaccaacaacgccaugcaggucgaguccgacgacuacaucgccacgaacggcccccucaagguggggggcagcugcguccuguccggccacaaccuggccaagcacugccuccacgugguggggcccaacgucaacaagggcgaggacauccagcugcugaagagcgccuacgagaacuucaaccagcacgaggugcuccuggcgccgcugcucuccgccgggaucuucggcgccgaccccauccacagccugcgggugugcgucgacaccgugcgcaccaacguguaccuggccgucuucgacaagaaccucuacgacaagcugguguccagcuuccuggagaugaagagcgagaagcagguggagcagaagaucgccgagauccccaaggaggaggucaagcccuucaucaccgaguccaagccgagcguggagcagcggaagcaggacgacaagaagaucaaggcgugcguggaggaggucacgaccacccucgaggagaccaaguuccugacggagaaccugcuccuguacaucgacaucaacgggaaccugcaccccgacuccgccacccucgugagcgacaucgacaucaccuuccugaagaaggacgcccccuacaucgugggcgacgucgugcaggagggcgugcugaccgccgucgugauccccacgaagaaggccgggggcaccaccgagaugcucgcgaaggcccugcgcaaggugccgaccgacaacuacaucacgaccuaccccgggcagggccugaacggguacaccgucgaggaggccaagaccgugcucaagaagugcaaguccgccuucuacauccugcccagcaucaucuccaacgagaagcaggagauccugggcaccgugagcuggaaccuccgggagaugcuggcgcacgccgaggagacgcgcaagcugaugcccgucugcguggagaccaaggccaucguguccaccauccagcggaaguacaagggcaucaagauccaggagggggucguggacuacggcgcccgcuucuacuucuacaccagcaagacgaccguggccucccugaucaacacccucaacgaccugaacgagacccuggucacgaugccgcucggguacgugacccacggccugaaccuggaggaggcggcccgguacaugcgcagccucaaggugcccgccaccgucuccgugagcucccccgacgccgugaccgccuacaacggguaccugacgagcuccagcaagacccccgaggagcacuucaucgagaccaucucccuggcgggcagcuacaaggacuggagcuacuccggccagagcacccagcucgggaucgaguuccugaagcggggcgacaaguccgucuacuacacgagcaacccgaccaccuuccaccuggacggggaggugaucaccuucgacaaccucaagacgcugcugucccuccgcgaggugcggaccaucaaggucuucaccaccguggacaacaucaaccugcacacgcagguggucgacaugagcaugaccuacggccagcaguucggccccaccuaccuggacggggccgacgugaccaagaucaagccccacaacucccacgagggcaagacguucuacgugcucccgaacgacgacacccugcgcgucgaggccuucgaguacuaccacaccaccgaccccagcuuccuggggcgguacauguccgcccucaaccacacgaagaaguggaaguacccccaggugaacggccugaccagcaucaagugggccgacaacaacugcuaccuggcgaccgcccuccugacccugcagcagaucgagcucaaguucaaccccccggcccugcaggacgccuacuaccgcgcgcgggccggggaggccgccaacuucugcgcccugauccucgcguacugcaacaagacggugggcgagcugggcgacguccgcgagaccauguccuaccuguuccagcacgccaaccucgacagcugcaagcgggugcugaacgucgugugcaagaccugcgggcagcagcagaccacccugaagggcguggaggccgucauguacauggggacgcucuccuacgagcaguucaagaagggcgugcagauccccugcaccugcgggaagcaggccaccaaguaccuggugcagcaggagagccccuucgucaugauguccgcccccccggcgcaguacgagcugaagcacggcaccuucacgugcgccagcgaguacaccggcaacuaccagugcgggcacuacaagcacaucaccuccaaggagacccucuacugcaucgacggcgcccugcugacgaagagcagcgaguacaaggggcccaucaccgacguguucuacaaggagaacuccuacaccaccacgaucaagcccgugaccuacaagcucgacggcgucgugugcaccgagaucgaccccaagcuggacaacuacuacaagaaggacaacagcuacuucaccgagcagccgaucgaccuggugcccaaccagcccuaccccaacgccuccuucgacaacuucaaguucgucugcgacaacaucaaguucgccgacgaccucaaccagcugacgggguacaagaagccggcgcugcgcgagcucaaggugaccuucuuccccgaccugaacggcgacguggucgccaucgacuacaagcacuacacccccagcuucaagaagggcgccaagcugcuccacaagcccaucguguggcacgugaacaacgccaccaacaaggcgacguacaagccgaacaccuggugcauccggugccugugguccaccaagcccgucgagaccagcaacuccuucgacgugcugaagagcgaggacgcccaggggauggacaaccucgccugcgaggaccugaagcccguguccgaggaggucguggagaaccccacgauccagaaggacgugcuggagugcaacgucaagaccaccgagguggugggcgacaucauccucaagccggccaacaacagccugaagaucaccgaggaggucgggcacacggaccugauggccgcguacguggacaacuccagccucaccaucaagaagcccaacgagcugucccgcgugcugggccucaagacccuggccacccacgggcuggccgccgucaacagcgugcccugggacacgaucgccaacuacgcgaagccguuccucaacaagguggucuccaccaccaccaacaucgugacgcgcugccugaaccgggugugcaccaacuacaugcccuacuucuucacccugcuccugcagcugugcaccuucacccgcagcacgaacucccggaucaaggccagcaugcccaccaccaucgccaagaacaccgucaaguccgugggcaaguucugccucgaggccagcuucaacuaccugaagagccccaacuucuccaagcugaucaacaucaucaucugguuccuccugcugagcgugugccucggcucccugaucuacagcacggccgcgcuggggguccucauguccaaccugggcaugccgagcuacugcaccggguaccgcgagggcuaccugaacuccaccaacgugaccaucgccacguacugcaccggcagcauccccugcuccgugugccucagcgggcuggacucccuggacaccuaccccagccucgagaccauccagaucacgaucuccagcuucaagugggaccugaccgccuucggccuggucgccgagugguuccucgccuacauccuguucacccgguucuucuacgugcuggggcucgcggccaucaugcagcuguucuucuccuacuucgccgugcacuucaucagcaacuccuggcugauguggcugaucaucaaccucguccagauggcccccaucagcgcgauggugcgcauguacaucuucuucgccuccuucuacuacguguggaagagcuacguccacgugguggacggcugcaacagcuccaccugcaugaugugcuacaagcggaaccgcgccacgcgggucgagugcaccaccaucgugaacgggguccgccggagcuucuacguguacgccaacggcggcaagggguucugcaagcugcacaacuggaacugcgugaacugcgacaccuucugcgccggcuccacguucaucagcgacgaggucgcgcgcgaccugucccuccaguucaagcggccgaucaaccccaccgaccagagcuccuacaucguggacagcgugaccgucaagaacggguccauccaccuguacuucgacaaggccggccagaagaccuacgagcgccacagccugucccacuucgugaaccucgacaaccugcgggccaacaacacgaaggggagccugcccaucaacgugaucgucuucgacggcaaguccaagugcgaggagagcuccgccaagagcgccuccguguacuacagccagcucaugugccagcccauccugcugcucgaccaggcgcugguguccgacgucggcgacagcgccgagguggccgugaagauguucgacgccuacgucaacaccuucagcuccaccuucaacgugccgauggagaagcugaagacccucguggccacggcggaggccgagcuggccaagaacgucagccuggacaacgugcucuccaccuucaucagcgccgcgcgccagggguucguggacuccgacgucgagaccaaggacgugguggagugccugaagcugagccaccaguccgacaucgaggucaccggcgacagcugcaacaacuacaugcucacguacaacaagguggagaacaugaccccccgggaccugggggccugcaucgacugcuccgcccgccacaucaacgcccagguggccaagagccacaacaucgcgcugaucuggaacgucaaggacuucaugucccucagcgagcagcugcggaagcagauccgcuccgccgccaagaagaacaaccugcccuucaagcucaccugcgccaccacgcgccagguggugaacgucgugaccaccaagaucgcccugaagggcgggugaggacuagucccuguucccagagcccacuuuuuuuucuuuuuuugaaauaaaauagccugucuuucagaucucaaaggcucuuuucagagccaccaaaaaaaaaaaaaaaaaaaaaaaaaaaaaaaaaaaaaaaaaaaaaaaaaaaaaaaaaaaaaaaaaaaaaaaaaaaaaaaaaaaaaaaaaaaaaaaaaaaaa

SEQ ID NO: 19506 - RNA, 6113 nt, Artificial Sequence
  SARS-CoV-2__MT921159.1__non-structural protein 3 (NSP3) mRNA gc
aggagagucccgcagucggcguccagcggcucugcuuguucgugugugugucguugcaggccuuauucaagcuuaccauggcccccaccaaggugaccuucggcgacgacacggucaucgaggugcagggguacaagagcgugaacaucaccuucgagcuggacgagcgcaucgacaagguccucaacgagaagugcuccgccuacaccguggagcugggcaccgaggugaacgaguucgcgugcgucguggccgacgccgugaucaagacgcugcagccggucagcgagcuccugaccccccuggggaucgaccucgacgagugguccauggccaccuacuaccuguucgacgagagcggcgaguucaagcuggccucccacauguacugcagcuucuacccccccgacgaggacgaggaggagggggacugcgaggaggaggaguucgagccguccacccaguacgaguacggcacggaggacgacuaccagggcaagccccucgaguucggggcgaccagcgccgcccugcagcccgaggaggagcaggaggaggacuggcuggacgacgacucccagcagaccgugggccagcaggacgggagcgaggacaaccagaccacgaccauccagaccaucguggagguccagccccagcucgagauggagcugaccccgguggugcagacgaucgaggucaacuccuucagcggcuaccugaagcucaccgacaacguguacaucaagaacgccgacaucguggaggaggcgaagaaggucaagcccaccgugguggucaacgccgccaacguguaccugaagcacgggggcggcguggccggggcccugaacaaggcgaccaacaacgccaugcaggucgaguccgacgacuacaucgccacgaacggcccccucaagguggggggcagcugcguccuguccggccacaaccuggccaagcacugccuccacgugguggggcccaacgucaacaagggcgaggacauccagcugcugaagagcgccuacgagaacuucaaccagcacgaggugcuccuggcgccgcugcucuccgccgggaucuucggcgccgaccccauccacagccugcgggugugcgucgacaccgugcgcaccaacguguaccuggccgucuucgacaagaaccucuacgacaagcugguguccagcuuccuggagaccaagagcgagaagcagguggagcagaagaucgccgagauccccaaggaggaggucaagcccuucaucacggaguccaagccgagcguggagcagcggaagcaggacgacaagaagaucaaggcgugcguggaggaggucaccaccacccucgaggagacgaaguuccugaccgagaaccugcuccuguacaucgacaucaacgggaaccugcaccccgacuccgccacccucgugagcgacaucgacaucaccuuccugaagaaggacgcccccuacaucgugggcgacgucgugcaggagggcgugcugacggccgucgugauccccaccaagaaggccgggggcaccaccgagaugcucgcgaaggcccugcgcaaggugccgacggacaacuacaucaccaccuaccccgggcagggccugaacggguacaccgucgaggaggccaagaccgugcucaagaagugcaaguccgccuucuacauccugcccagcaucaucuccaacgagaagcaggagauccugggcacggugagcuggaaccuccgggagaugcuggcgcacgccgaggagacccgcaagcugaugcccgucugcguggagaccaaggccaucguguccaccauccagcggaaguacaagggcaucaagauccaggagggggucguggacuacggcgcccgcuucuacuucuacacgagcaagaccaccguggccucccugaucaacacccucaacgaccugaacgagacgcuggucaccaugccgcucggguacgugacccacggccugaaccuggaggaggcggcccgguacaugcgcagccucaaggugcccgccaccgucuccgugagcucccccgacgccgugacggccuacaacggguaccugaccagcuccagcaagacccccgaggagcacuucaucgagaccaucucccuggcgggcagcuacaaggacuggagcuacuccggccagagcacgcagcucgggaucgaguuccugaagcggggcgacaaguccgucuacuacaccagcaacccgaccaccuuccaccuggacggggaggugaucacguucgacaaccucaagacccugcugucccuccgcgaggugcggaccaucaaggucuucaccacgguggacaacaucaaccugcacacccagguggucgacaugagcaugaccuacggccagcaguucggccccaccuaccuggacggggccgacgugacgaagaucaagccccacaacucccacgagggcaagaccuucuacgugcucccgaacgacgacacccugcgcgucgaggccuucgaguacuaccacaccacggaccccagcuuccuggggcgguacauguccgcccucaaccacaccaagaaguggaaguacccccaggugaacggccugaccagcaucaagugggccgacaacaacugcuaccuggcgaccgcccuccugacgcugcagcagaucgagcucaaguucaaccccccggcccugcaggacgccuacuaccgcgcgcgggccggggaggccgccaacuucugcgcccugauccucgcguacugcaacaagaccgugggcgagcugggcgacguccgcgagaccauguccuaccuguuccagcacgccaaccucgacagcugcaagcgggugcugaacgucgugugcaagaccugcgggcagcagcagaccacgcugaagggcguggaggccgucauguacauggggacccucuccuacgagcaguucaagaagggcgugcagauccccugcaccugcgggaagcaggccaccaaguaccuggugcagcaggagagccccuucgucaugauguccgcccccccggcgcaguacgagcugaagcacggcacguucaccugcgccagcgaguacaccggcaacuaccagugcgggcacuacaagcacaucaccuccaaggagacgcucuacugcaucgacggcgcccugcugaccaagagcagcgaguacaaggggcccaucaccgacguguucuacaaggagaacuccuacaccacgaccaucaagcccgugaccuacaagcucgacggcgucgugugcaccgagaucgaccccaagcuggacaacuacuacaagaaggacaacagcuacuucacggagcagccgaucgaccuggugcccaaccagcccuaccccaacgccuccuucgacaacuucaaguucgucugcgacaacaucaaguucgccgacgaccucaaccagcugaccggguacaagaagccggcgagccgcgagcugaaggugaccuucuuccccgaccucaacggcgacguggucgccaucgacuacaagcacuacacccccuccuucaagaagggcgccaagcugcugcacaagcccaucguguggcacgugaacaacgccacgaacaaggcgaccuacaagccgaacaccuggugcauccggugccucuggagcaccaagcccgucgagacguccaacagcuucgacgugcugaaguccgaggacgcccaggggauggacaaccuggccugcgaggaccucaagcccgugagcgaggaggucguggagaaccccaccauccagaaggacgugcuggagugcaacgucaagaccaccgagguggugggcgacaucauccugaagccggccaacaacucccucaagaucacggaggaggucgggcacaccgaccugauggccgcguacguggacaacagcucccugaccaucaagaagcccaacgagcucagccgcgugcugggccugaagacccucgccacgcacgggcuggccgccgucaacuccgugcccugggacaccaucgccaacuacgcgaagccguuccugaacaagguggucagcaccaccacgaacaucgugacccgcugccucaaccgggugugcaccaacuacaugcccuacuucuucacccugcugcuccagcugugcaccuucacgcgcuccaccaacagccggaucaaggccuccaugcccaccaccaucgccaagaacacggucaagagcgugggcaaguucugccuggaggccagcuucaacuaccucaagucccccaacuucagcaagcugaucaacaucaucaucugguuccugcuccuguccgugugccugggcagccucaucuacuccaccgccgcgcuggggguccugaugagcaaccucggcaugccguccuacugcaccggguaccgcgagggcuaccugaacagcaccaacgugacgaucgccaccuacugcaccggcuccauccccugcagcgugugccuguccgggcucgacagccuggacaccuaccccucccuggagacgauccagaucaccaucagcuccuucaagugggaccucaccgccuucggccuggucgccgagugguuccuggccuacauccucuucacccgguucuucuacgugcuggggcuggcggccaucaugcagcucuucuucagcuacuucgccgugcacuucaucuccaacagcuggcugauguggcugaucaucaaccugguccagauggcccccaucuccgcgauggugcgcauguacaucuucuucgccagcuucuacuacguguggaagagcuacguccacgugguggacggcugcaacuccagcacgugcaugaugugcuacaagcggaaccgcgccacccgggucgagugcaccaccaucgugaacgggguccgccgguccuucuacguguacgccaacggcggcaagggguucugcaagcuccacaacuggaacugcgugaacugcgacacguucugcgccggcagcaccuucaucuccgacgaggucgcgcgcgaccugagccugcaguucaagcggccgaucaaccccaccgaccaguccagcuacaucguggacuccgugaccgucaagaacgggagcauccaccucuacuucgacaaggccggccagaagacguacgagcgccacucccugagccacuucgugaaccuggacaaccuccgggccaacaacaccaaggggucccugcccaucaacgugaucgucuucgacggcaagagcaagugcgaggaguccagcgccaaguccgccagcguguacuacucccagcugaugugccagcccauccuccugcuggaccaggcgcucgugagcgacgucggcgacagcgccgagguggccgugaagauguucgacgccuacgucaacaccuucuccagcaccuucaacgugccgauggagaagcugaagacgcugguggccaccgcggaggccgagcucgccaagaacgucucccuggacaacgugcugagcaccuucaucuccgccgcgcgccagggguucguggacagcgacgucgagaccaaggacgugguggagugccucaagcugucccaccagagcgacaucgaggucacgggcgacuccugcaacaacuacaugcugaccuacaacaagguggagaacaugaccccccgggaccucggggccugcaucgacugcagcgcccgccacaucaacgcccagguggccaagucccacaacaucgcgcugaucuggaacgucaaggacuucaugagccuguccgagcagcuccggaagcagauccgcagcgccgccaagaagaacaaccugcccuucaagcugaccugcgccacgacccgccagguggugaacgucgugaccaccaagaucgcccucaagggcgggugaggacuagucccuguucccagagcccacuuuuuuuucuuuuuuugaaauaaaauagccugucuuucagaucucaaaggcucuuuucagagccaccaaaaaaaaaaaaaaaaaaaaaaaaaaaaaaaaaaaaaaaaaaaaaaaaaaaaaaaaaaaaaaaaaaaaaaaaaaaaaaaaaaaaaaaaaaaaaaaaaaaaa

SEQ ID NO: 19507 - RNA, 6113 nt, Artificial Sequence
  SARS-CoV-2__MT913053.1__non-structural protein 3 (NSP3) mRNA gc
aggagagucccgcagucggcguccagcggcucugcuuguucgugugugugucguugcaggccuuauucaagcuuaccauggcccccaccaaggugaccuucggcgacgacacggucaucgaggugcagggguacaagagcgugaacaucaccuucgagcuggacgagcgcaucgacaagguccucaacgagaagugcuccgccuacaccguggagcugggcaccgaggugaacgaguucgcgugcgucguggccgacgccgugaucaagacgcugcagccggucagcgagcuccugaccccccuggggaucgaccucgacgagugguccauggccaccuacuaccuguucgacgagagcggcgaguucaagcuggccucccacauguacugcagcuucuacccccccgacgaggacgaggaggagggggacugcgaggaggaggaguucgagccguccacccaguacgaguacggcacggaggacgacuaccagggcaagccccucgaguucggggcgaccagcgccgcccugcagcccgaggaggagcaggaggaggacuggcuggacgacgacucccagcagaccgugggccagcaggacgggagcgaggacaaccagaccacgaccauccagaccaucguggagguccagccccagcucgagauggagcugaccccgguggugcagacgaucgaggucaacuccuucagcggcuaccugaagcucaccgacaacguguacaucaagaacgccgacaucguggaggaggcgaagaaggucaagcccaccgugguggucaacgccgccaacguguaccugaagcacgggggcggcguggccggggcccugaacaaggcgaccaacaacgccaugcaggucgaguccgacgacuacaucgccacgaacggcccccucaagguggggggcagcugcguccuguccggccacaaccuggccaagcacugccuccacgugguggggcccaacgucaacaagggcgaggacauccagcugcugaagagcgccuacgagaacuucaaccagcacgaggugcuccuggcgccgcugcucuccgccgggaucuucggcgccgaccccauccacagccugcgggugugcgucgacaccgugcgcaccaacguguaccuggccgucuucgacaagaaccucuacgacaagcugguguccagcuuccuggagaugaagagcgagaagcagguggagcagaagaucgccgagauccccaaggaggaggucaagcccuucaucaccgaguccaagccgagcguggagcagcggaagcaggacgacaagaagaucaaggcgugcguggaggaggucacgaccacccucgaggagaccaaguuccugacggagaaccugcuccuguacaucgacaucaacgggaaccugcaccccgacuccgccacccucgugagcgacaucgacaucaccuuccugaagaaggacgcccccuacaucgugggcgacgucgugcaggagggcgugcugaccgccgucgugauccccacgaagaaggccgggggcaccaccgagaugcucgcgaaggcccugcgcaaggugccgaccgacaacuacaucacgaccuaccccgggcagggccugaacggguacaccgucgaggaggccaagaccgugcucaagaagugcaaguccgccuucuacauccugcccagcaucaucuccaacgagaagcaggagauccugggcaccgugagcuggaaccuccgggagaugcuggcgcacgccgaggagacgcgcaagcugaugcccgucugcguggagaccaaggccaucguguccaccauccagcggaaguacaagggcaucaagauccaggagggggucguggacuacggcacccgcuucuacuucuacacgagcaagaccaccguggccucccugaucaacacccucaacgaccugaacgagacgcuggucaccaugccgcucggguacgugacccacggccugaaccuggaggaggccgcgcgguacaugcgcagccucaaggugcccgccaccgucuccgugagcucccccgacgccgugacggccuacaacggguaccugaccagcuccagcaagacccccgaggagcacuucaucgagaccaucucccuggccggcagcuacaaggacuggagcuacuccggccagagcacgcagcucgggaucgaguuccugaagcggggcgacaaguccgucuacuacaccagcaacccgaccaccuuccaccuggacggggaggugaucacguucgacaaccucaagacccugcugucccuccgcgaggugcggaccaucaaggucuucaccacgguggacaacaucaaccugcacacccagguggucgacaugagcaugaccuacggccagcaguucggccccaccuaccuggacggggcggacgugacgaagaucaagccccacaacucccacgagggcaagaccuucuacgugcucccgaacgacgacacccugcgcgucgaggccuucgaguacuaccacaccacggaccccagcuuccuggggcgguacauguccgcccucaaccacaccaagaaguggaaguacccccaggugaacggccugaccagcaucaagugggccgacaacaacugcuaccuggccaccgcgcuccugacgcugcagcagaucgagcucaaguucaaccccccggcccugcaggacgccuacuaccgcgcccgggcgggggaggccgccaacuucugcgcccugauccucgccuacugcaacaagaccgugggcgagcugggcgacguccgcgagaccauguccuaccuguuccagcacgcgaaccucgacagcugcaagcgggugcugaacgucgugugcaagaccugcgggcagcagcagaccacgcugaagggcguggaggccgucauguacauggggacccucuccuacgagcaguucaagaagggcgugcagauccccugcaccugcgggaagcaggccaccaaguaccuggugcagcaggagagccccuucgucaugauguccgcccccccggcccaguacgagcugaagcacggcacguucaccugcgcgagcgaguacaccggcaacuaccagugcgggcacuacaagcacaucaccuccaaggagacgcucuacugcaucgacggcgcccugcugaccaagagcagcgaguacaaggggcccaucaccgacguguucuacaaggagaacuccuacaccacgaccaucaagcccgugaccuacaagcucgacggcgucgugugcaccgagaucgaccccaagcuggacaacuacuacaagaaggacaacagcuacuucacggagcagccgaucgaccuggugcccaaccagcccuaccccaacgccuccuucgacaacuucaaguucgucugcgacaacaucaaguucgccgacgaccucaaccagcugaccggguacaagaagccggccagccgcgagcugaaggugaccuucuuccccgaccucaacggcgacguggucgcgaucgacuacaagcacuacacccccuccuucaagaagggcgccaagcugcugcacaagcccaucguguggcacgugaacaacgccacgaacaaggccaccuacaagccgaacaccuggugcauccggugccucuggagcaccaagcccgucgagacguccaacagcuucgacgugcugaaguccgaggacgcgcaggggauggacaaccuggccugcgaggaccucaagcccgugagcgaggaggucguggagaaccccaccauccagaaggacgugcuggagugcaacgucaagaccaccgagguggugggcgacaucauccugaagccggccaacaacucccucaagaucacggaggaggucgggcacaccgaccugauggccgccuacguggacaacagcucccugaccaucaagaagcccaacgagcucagccgcgugcugggccugaagacccucgcgacgcacgggcuggccgccgucaacuccgugcccugggacaccaucgccaacuacgccaagccguuccugaacaagguggucagcaccaccacgaacaucgugacccgcugccucaaccgggugugcaccaacuacaugcccuacuucuucacccugcugcuccagcugugcaccuucacgcgcuccaccaacagccggaucaaggcguccaugcccaccaccaucgccaagaacacggucaagagcgugggcaaguucugccuggaggccagcuucaacuaccucaagucccccaacuucagcaagcugaucaacaucaucaucugguuccugcuccuguccgugugccugggcagccucaucuacuccaccgccgcccuggggguccugaugagcaaccucggcaugccguccuacugcaccggguaccgcgagggcuaccugaacagcaccaacgugacgaucgcgaccuacugcaccggcuccauccccugcagcgugugccuguccgggcucgacagccuggacaccuaccccucccuggagacgauccagaucaccaucagcuccuucaagugggaccucaccgccuucggccuggucgccgagugguuccuggccuacauccucuucacccgguucuucuacgugcuggggcuggccgcgaucaugcagcucuucuucagcuacuucgccgugcacuucaucuccaacagcuggcugauguggcugaucaucaaccugguccagauggcccccaucuccgccauggugcgcauguacaucuucuucgcgagcuucuacuacguguggaagagcuacguccacgugguggacggcugcaacuccagcacgugcaugaugugcuacaagcggaaccgcgccacccgggucgagugcaccaccaucgugaacgggguccgccgguccuucuacguguacgccaacggcggcaagggguucugcaagcuccacaacuggaacugcgugaacugcgacacguucugcgccggcagcaccuucaucuccgacgaggucgcccgcgaccugagccugcaguucaagcggccgaucaaccccaccgaccaguccagcuacaucguggacuccgugaccgucaagaacgggagcauccaccucuacuucgacaaggcgggccagaagacguacgagcgccacucccugagccacuucgugaaccuggacaaccuccgggccaacaacaccaaggggucccugcccaucaacgugaucgucuucgacggcaagagcaagugcgaggaguccagcgccaaguccgccagcguguacuacucccagcugaugugccagcccauccuccugcuggaccaggcccucgugagcgacgucggcgacagcgcggagguggccgugaagauguucgacgccuacgucaacaccuucuccagcaccuucaacgugccgauggagaagcugaagacgcugguggccaccgccgaggcggagcucgccaagaacgucucccuggacaacgugcugagcaccuucaucuccgccgcccgccagggguucguggacagcgacgucgagaccaaggacgugguggagugccucaagcugucccaccagagcgacaucgaggucacgggcgacuccugcaacaacuacaugcugaccuacaacaagguggagaacaugaccccccgggaccucggggcgugcaucgacugcagcgcccgccacaucaacgcccagguggccaagucccacaacaucgcccugaucuggaacgucaaggacuucaugagccuguccgagcagcuccggaagcagauccgcagcgcggccaagaagaacaaccugcccuucaagcugaccugcgccacgacccgccagguggugaacgucgugaccaccaagaucgcccucaagggcgggugaggacuagucccuguucccagagcccacuuuuuuuucuuuuuuugaaauaaaauagccugucuuucagaucucaaaggcucuuuucagagccaccaaaaaaaaaaaaaaaaaaaaaaaaaaaaaaaaaaaaaaaaaaaaaaaaaaaaaaaaaaaaaaaaaaaaaaaaaaaaaaaaaaaaaaaaaaaaaaaaaaaaa

SEQ ID NO: 19508 - RNA, 6113 nt, Artificial Sequence
  SARS-CoV-2__MT913074.1__non-structural protein 3 (NSP3) mRNA gc
aggagagucccgcagucggcguccagcggcucugcuuguucgugugugugucguugcaggccuuauucaagcuuaccauggcccccaccaaggugaccuucggcgacgacacggucaucgaggugcagggguacaagagcgugaacaucaccuucgagcuggacgagcgcaucgacaagguccucaacgagaagugcuccgccuacaccguggagcugggcaccgaggugaacgaguucgcgugcgucguggccgacgccgugaucaagacgcugcagccggucagcgagcuccugaccccccuggggaucgaccucgacgagugguccauggccaccuacuaccuguucgacgagagcggcgaguucaagcuggccucccacauguacugcagcuucuacccccccgacgaggacgaggaggagggggacugcgaggaggaggaguucgagccguccacccaguacgaguacggcacggaggacgacuaccagggcaagccccucgaguucggggcgaccagcgccgcccugcagcccgaggaggagcaggaggaggacuggcuggacgacgacucccagcagaccgugggccagcaggacgggagcgaggacaaccagaccacgaccauccagaccaucguggagguccagccccagcucgagauggagcugaccccgguggugcagacgaucgaggucaacuccuucagcggcuaccugaagcucaccgacaacguguacaucaagaacgccgacaucguggaggaggcgaagaaggucaagcccaccgugguggucaacgccgccaacguguaccugaagcacgggggcggcguggccggggcccugaacaaggcgaccaacaacgccaugcaggucgaguccgacgacuacaucgccacgaacggcccccucaagguggggggcagcugcguccuguccggccacaaccuggccaagcacugccuccacgugguggggcccaacgucaacaagggcgaggacauccagcugcugaagagcgccuacgagaacuucaaccagcacgaggugcuccuggcgccgcugcucuccgccgggaucuucggcgccgaccccauccacagccugcgggugugcgucgacaccgugcgcaccaacguguaccuggccgucuucgacaagaaccucuacgacaagcugguguccagcuuccuggagaugaagagcgagaagcagguggagcagaagaucgccgagauccccaaggaggaggucaagcccuucaucaccgaguccaagccgagcguggagcagcggaagcaggacgacaagaagaucaaggcgugcguggaggaggucacgaccacccucgaggagaccaaguuccugacggagaaccugcuccuguacaucgacaucaacgggaaccugcaccccgacuccgccacccucgugagcgacaucgacaucaccuuccugaagaaggacgcccccuacaucgugggcgacgucgugcaggagggcgugcugaccgccgucgugauccccacgaagaaggccgggggcaccaccgagaugcucgcgaaggcccugcgcaaggugccgaccgacaacuacaucacgaccuaccccgggcagggccugaacggguacaccgucgaggaggccaagaccgugcucaagaagugcaaguccgccuucuacauccugcccagcaucaucuccaacgagaagcaggagauccugggcaccgugagcuggaaccuccgggagaugcuggcgcacgccgaggagacgcgcaagcugaugcccgucugcguggagaccaaggccaucguguccaccauccagcggaaguacaagggcaucaagauccaggagggggucguggacuacggcgcccgcuucuacuucuacaccagcaagacgaccguggccucccugaucaacacccucaacgaccugaacgagacccuggucacgaugccgcucggguacgugacccacggccugaaccuggaggaggcggcccgguacaugcgcagccucaaggugcccgccaccgucuccgugagcucccccgacgccgugaccgccuacaacggguaccugacgagcuccagcaagacccccgaggagcacuucaucgagaccaucucccuggcgggcagcuacaaggacuggagcuacuccggccagagcacccagcucgggaucgaguuccugaagcggggcgacaaguccgucuacuacacgagcaacccgaccaccuuccaccuggacggggaggugaucaccuucgacaaccucaagacgcugcugucccuccgcgaggugcggaccaucaaggucuucaccaccguggacaacaucaaccugcacacgcagguggucgacaugagcaugaccuacggccagcaguucggccccaccuaccuggacggggccgacgugaccaagaucaagccccacaacucccacgagggcaagacguucuacgugcucccgaacgacgacacccugcgcgucgaggccuucgaguacuaccacaccaccgaccccagcuuccuggggcgguacauguccgcccucaaccacacgaagaaguggaaguacccccaggugaacggccugaccagcaucaagugggccgacaacaacugcuaccuggcgaccgcccuccugacccugcagcagaucgagcucaaguucaaccccccggcccugcaggacgccuacuaccgcgcgcgggccggggaggccgccaacuucugcgcccugauccucgcguacugcaacaagacggugggcgagcugggcgacguccgcgagaccauguccuaccuguuccagcacgccaaccucgacagcugcaagcgggugcugaacgucgugugcaagaccugcgggcagcagcagaccacccugaagggcguggaggccgucauguacauggggacgcucuccuacgagcaguucaagaagggcgugcagauccccugcaccugcgggaagcaggccaccaaguaccuggugcagcaggagagccccuucgucaugauguccgcccccccggcgcaguacgagcugaagcacggcaccuucacgugcgccagcgaguacaccggcaacuaccagugcgggcacuacaagcacaucaccuccaaggagacccucuacugcaucgacggcgcccugcugacgaagagcagcgaguacaaggggcccaucaccgacguguucuacaaggagaacuccuacaccaccacgaucaagcccgugaccuacaagcucgacggcgucgugugcaccgagaucgaccccaagcuggacaacuacuacaagaaggacaacagcuacuucaccgagcagccgaucgaccuggugcccaaccagcccuaccucaacgccuccuucgacaacuucaaguucgucugcgacaacaucaaguucgccgacgaccugaaccagcugacgggguacaagaagcccgcgagccgcgagcucaaggugaccuucuucccggaccugaacggcgacguggucgccaucgacuacaagcacuacacccccuccuucaagaagggcgccaagcugcuccacaagcccaucguguggcacgugaacaacgccaccaacaaggcgacguacaagcccaacaccuggugcauccggugccuguggagcaccaagccggucgagaccuccaacagcuucgacgugcugaaguccgaggacgcccaggggauggacaaccucgccugcgaggaccugaagcccgugagcgaggaggucguggagaaccccacgauccagaaggacgugcuggagugcaacgucaagaccaccgagguggugggcgacaucauccucaagcccgccaacaacucccugaagaucaccgaggaggucgggcacacggaccugauggccgcguacguggacaacagcucccucaccaucaagaagccgaacgagcugagccgcgugcugggccucaagacccuggccacccacgggcuggccgccgucaacuccgugcccugggacacgaucgccaacuacgcgaagcccuuccucaacaagguggucagcaccaccaccaacaucgugacgcgcugccugaaccgggugugcaccaacuacaugccguacuucuucacccugcuccugcagcugugcaccuucacccgcuccacgaacagccggaucaaggccuccaugcccaccaccaucgccaagaacaccgucaagagcgugggcaaguucugccucgaggccagcuucaacuaccugaagucccccaacuucagcaagcugaucaacaucaucaucugguuccuccugcuguccgugugccucggcagccugaucuacuccacggccgcgcuggggguccucaugagcaaccugggcaugcccuccuacugcaccggguaccgcgagggcuaccugaacagcaccaacgugaccaucgccacguacugcaccggcuccaucccgugcagcgugugccucuccgggcuggacagccuggacaccuaccccucccucgagaccauccagaucacgaucagcuccuucaagugggaccugaccgccuucggccuggucgccgagugguuccucgccuacauccuguucacccgguucuucuacgugcuggggcucgcggccaucaugcagcuguucuucagcuacuucgccgugcacuucaucuccaacagcuggcugauguggcugaucaucaaccucguccagauggcccccaucuccgcgauggugcgcauguacaucuucuucgccagcuucuacuacguguggaagagcuacguccacgugguggacggcugcaacuccagcaccugcaugaugugcuacaagcggaaccgcgccacgcgggucgagugcaccaccaucgugaacgggguccgccgguccuucuacguguacgccaacggcggcaagggguucugcaagcugcacaacuggaacugcgugaacugcgacaccuucugcgccggcagcacguucaucuccgacgaggucgcgcgcgaccugagccuccaguucaagcggcccaucaacccgaccgaccaguccagcuacaucguggacuccgugaccgucaagaacgggagcauccaccuguacuucgacaaggccggccagaagaccuacgagcgccacucccugagccacuucgugaaccucgacaaccugcgggccaacaacacgaaggggucccugcccaucaacgugaucgucuucgacggcaagagcaagugcgaggaguccagcgccaaguccgccagcguguacuacucccagcucaugugccagcccauccugcugcucgaccaggcgcuggugagcgacgucggcgacagcgccgagguggccgugaagauguucgacgccuacgucaacaccuucuccagcaccuucaacgugcccauggagaagcugaagacccucguggccacggcggaggccgagcuggccaagaacgucucccuggacaacgugcucagcaccuucaucuccgccgcgcgccagggguucguggacagcgacgucgagaccaaggacgugguggagugccugaagcugucccaccagagcgacaucgaggucaccggcgacuccugcaacaacuacaugcucacguacaacaagguggagaacaugaccccgcgggaccugggggccugcaucgacugcagcgcccgccacaucaacgcccagguggccaagucccacaacaucgcgcugaucuggaacgucaaggacuucaugagccucuccgagcagcugcggaagcagauccgcagcgccgccaagaagaacaaccugcccuucaagcucaccugcgccaccacgcgccagguggugaacgucgugaccaccaagaucgcccugaagggcgggugaggacuagucccuguucccagagcccacuuuuuuuucuuuuuuugaaauaaaauagccugucuuucagaucucaaaggcucuuuucagagccaccaaaaaaaaaaaaaaaaaaaaaaaaaaaaaaaaaaaaaaaaaaaaaaaaaaaaaaaaaaaaaaaaaaaaaaaaaaaaaaaaaaaaaaaaaaaaaaaaaaaaa

SEQ ID NO: 19509 - RNA, 6113 nt, Artificial Sequence
  SARS-CoV-2__MT913076.1__non-structural protein 3 (NSP3) mRNA gc
aggagagucccgcagucggcguccagcggcucugcuuguucgugugugugucguugcaggccuuauucaagcuuaccauggcccccaccaaggugaccuucggcgacgacacggucaucgaggugcagggguacaagagcgugaacaucaccuucgagcuggacgagcgcaucgacaagguccucaacgagaagugcuccgccuacaccguggagcugggcaccgaggugaacgaguucgcgugcgucguggccgacgccgugaucaagacgcugcagccggucagcgagcuccugaccccccuggggaucgaccucgacgagugguccauggccaccuacuaccuguucgacgagagcggcgaguucaagcuggccucccacauguacugcagcuucuacccccccgacgaggacgaggaggagggggacugcgaggaggaggaguucgagccguccacccaguacgaguacggcacggaggacgacuaccagggcaagccccucgaguucggggcgaccagcgccgcccugcagcccgaggaggagcaggaggaggacuggcuggacgacgacucccagcagaccgugggccagcaggacgggagcgaggacaaccagaccacgaccauccagaccaucguggagguccagccccagcucgagauggagcugaccccgguggugcagacgaucgaggucaacuccuucagcggcuaccugaagcucaccgagaacguguacaucaagaacgccgacaucguggaggaggcgaagaaggucaagcccaccgugguggucaacgccgccaacguguaccugaagcacgggggcggcguggccggggcccugaacaaggcgaccaacaacgccaugcaggucgaguccgacgacuacaucgccacgaacggcccccucaagguggggggcagcugcguccuguccggccacaaccuggccaagcacugccuccacgugguggggcccaacgucaacaagggcgaggacauccagcugcugaagagcgccuacgagaacuucaaccagcacgaggugcuccuggcgccgcugcucuccgccgggaucuucggcgccgaccccauccacagccugcgggugugcgucgacaccgugcgcaccaacguguaccuggccgucuucgacaagaaccucuacgacaagcugguguccagcuuccuggagaugaagagcgagaagcagguggagcagaagaucgccgagauccccaaggaggaggucaagcccuucaucaccgaguccaagccgagcguggagcagcggaagcaggacgacaagaagaucaaggcgugcguggaggaggucacgaccacccucgaggagaccaaguuccugacggagaaccugcuccuguacaucgacaucaacgggaaccugcaccccgacuccgccacccucgugagcgacaucgacaucaccuuccugaagaaggacgcccccuacaucgugggcgacgucgugcaggagggcgugcugaccgccgucgugauccccacgaagaaggccgggggcaccaccgagaugcucgcgaaggcccugcgcaaggugccgaccgacaacuacaucacgaccuaccccgggcagggccugaacggguacaccgucgaggaggccaagaccgugcucaagaagugcaaguccgccuucuacauccugcccagcaucaucuccaacgagaagcaggagauccugggcaccgugagcuggaaccuccgggagaugcuggcgcacgccgaggagacgcgcaagcugaugcccgucugcguggagaccaaggccaucguguccaccauccagcggaaguacaagggcaucaagauccaggagggggucguggacuacggcgcccgcuucuacuucuacaccagcaagacgaccguggccucccugaucaacacccucaacgaccugaacgagacccuggucacgaugccgcucggguacgugacccacggccugaaccuggaggaggcggcccgguacaugcgcagccucaaggugcccgccaccgucuccgugagcucccccgacgccgugaccgccuacaacggguaccugacgagcuccagcaagacccccgaggagcacuucaucgagaccaucucccuggcgggcagcuacaaggacuggagcuacuccggccagagcacccagcucgggaucgaguuccugaagcggggcgacaaguccgucuacuacacgagcaacccgaccaccuuccaccuggacggggaggugaucaccuucgacaaccucaagacgcugcugucccuccgcgaggugcggaccaucaaggucuucaccaccguggacaacaucaaccugcacacgcagguggucgacaugagcaugaccuacggccagcaguucggccccaccuaccuggacggggccgacgugaccaagaucaagccccacaacucccacgagggcaagacguucuacgugcucccgaacgacgacacccugcgcgucgaggccuucgaguacuaccacaccaccgaccccagcuuccuggggcgguacauguccgcccucaaccacacgaagaaguggaaguacccccaggugaacggccugaccagcaucaagugggccgacaacaacugcuaccuggcgaccgcccuccugacccugcagcagaucgagcucaaguucaaccccccggcccugcaggacgccuacuaccgcgcgcgggccggggaggccgccaacuucugcgcccugauccucgcguacugcaacaagacggugggcgagcugggcgacguccgcgagaccauguccuaccuguuccagcacgccaaccucgacagcugcaagcgggugcugaacgucgugugcaagaccugcgggcagcagcagaccacccugaagggcguggaggccgucauguacauggggacgcucuccuacgagcaguucaagaagggcgugcagauccccugcaccugcgggaagcaggccaccaaguaccuggugcagcaggagagccccuucgucaugauguccgcccccccggcgcaguacgagcugaagcacggcaccuucacgugcgccagcgaguacaccggcaacuaccagugcgggcacuacaagcacaucaccuccaaggagacccucuacugcaucgacggcgcccugcugacgaagagcagcgaguacaaggggcccaucaccgacguguucuacaaggagaacuccuacaccaccacgaucaagcccgugaccuacaagcucgacggcgucgugugcaccgagaucgaccccaagcuggacaacuacuacaagaaggacaacagcuacuucaccgagcagccgaucgaccuggugcccaaccagcccuaccccaacgccuccuucgacaacuucaaguucgucugcgacaacaucaaguucgccgacgaccucaaccagcugacgggguacaagaagccggcgagccgcgagcugaaggugaccuucuuccccgaccucaacggcgacguggucgccaucgacuacaagcacuacacccccuccuucaagaagggcgccaagcugcugcacaagcccaucguguggcacgugaacaacgccaccaacaaggcgacguacaagccgaacaccuggugcauccggugccucuggagcaccaagcccgucgagaccuccaacagcuucgacgugcugaaguccgaggacgcccaggggauggacaaccuggccugcgaggaccucaagcccgugagcgaggaggucguggagaaccccacgauccagaaggacgugcuggagugcaacgucaagaccaccgagguggugggcgacaucauccugaagccggccaacaacucccucaagaucaccgaggaggucgggcacacggaccugauggccgcguacguggacaacagcucccugaccaucaagaagcccaacgagcucagccgcgugcugggccugaagacccucgccacccacgggcuggccgccgucaacuccgugcccugggacacgaucgccaacuacgcgaagccguuccugaacaagguggucagcaccaccaccaacaucgugacgcgcugccucaaccgggugugcaccaacuacaugcccuacuucuucacccugcugcuccagcugugcaccuucacccgcuccacgaacagccggaucaaggccuccaugcccaccaccaucgccaagaacaccgucaagagcgugggcaaguucugccuggaggccagcuucaacuaccucaagucccccaacuucagcaagcugaucaacaucaucaucugguuccugcuccuguccgugugccugggcagccucaucuacuccacggccgcgcuggggguccugaugagcaaccucggcaugccguccuacugcaccggguaccgcgagggcuaccugaacagcaccaacgugaccaucgccacguacugcaccggcuccauccccugcagcgugugccuguccgggcucgacagccuggacaccuaccccucccuggagaccauccagaucacgaucagcuccuucaagugggaccucaccgccuucggccuggucgccgagugguuccuggccuacauccucuucacccgguucuucuacgugcuggggcuggcggccaucaugcagcucuucuucagcuacuucgccgugcacuucaucuccaacagcuggcugauguggcugaucaucaaccugguccagauggcccccaucuccgcgauggugcgcauguacaucuucuucgccagcuucuacuacguguggaagagcuacguccacgugguggacggcugcaacuccagcaccugcaugaugugcuacaagcggaaccgcgccacgcgggucgagugcaccaccaucgugaacgggauccgccgguccuucuacgucuacgccaacggcggcaagggguucugcaagcuccacaacuggaacugcgugaacugcgacaccuucugcgccggcagcacguucaucuccgacgagguggcgcgcgaccugagccugcaguucaagcggccgaucaaccccaccgaccaguccagcuacaucgucgacuccgugaccgugaagaacgggagcauccaccucuacuucgacaaggccggccagaagaccuacgagcgccacucccugagccacuucgucaaccuggacaaccuccgggccaacaacacgaaggggucccugcccaucaacgugaucguguucgacggcaagagcaagugcgaggaguccagcgccaaguccgccagcgucuacuacucccagcugaugugccagcccauccuccugcuggaccaggcgcucgugagcgacgugggcgacagcgccgaggucgccgugaagauguucgacgccuacgugaacaccuucuccagcaccuucaacgucccgauggagaagcugaagacccugguggccacggcggaggccgagcucgccaagaacgugucccuggacaacguccugagcaccuucaucuccgccgcgcgccagggguucguggacagcgacguggagaccaaggacgucguggagugccucaagcugucccaccagagcgacaucgaggugaccggcgacuccugcaacaacuacaugcugacguacaacaaggucgagaacaugaccccccgggaccucggggccugcaucgacugcagcgcccgccacaucaacgcccagguggccaagucccacaacaucgcgcugaucuggaacgugaaggacuucaugagccuguccgagcagcuccggaagcagauccgcagcgccgccaagaagaacaaccugcccuucaagcugaccugcgccaccacgcgccaggucgugaacguggucaccaccaagaucgcccucaagggcgggugaggacuagucccuguucccagagcccacuuuuuuuucuuuuuuugaaauaaaauagccugucuuucagaucucaaaggcucuuuucagagccaccaaaaaaaaaaaaaaaaaaaaaaaaaaaaaaaaaaaaaaaaaaaaaaaaaaaaaaaaaaaaaaaaaaaaaaaaaaaaaaaaaaaaaaaaaaaaaaaaaaaaa

SEQ ID NO: 19510 - RNA, 6113 nt, Artificial Sequence
  SARS-CoV-2__MT913119.1__non-structural protein 3 (NSP3) mRNA gc
aggagagucccgcagucggcguccagcggcucugcuuguucgugugugugucguugcaggccuuauucaagcuuaccauggcccccaccaaggugaccuucggcgacgacacggucaucgaggugcagggguacaagagcgugaacaucaccuucgagcuggacgagcgcaucgacaagguccucaacgagaagugcuccgccuacaccguggagcugggcaccgaggugaacgaguucgcgugcgucguggccgacgccgugaucaagacgcugcagccggucagcgagcuccugaccccccuggggaucgaccucgacgagugguccauggccaccuacuaccuguucgacgagagcggcgaguucaagcuggccucccacauguacugcagcuucuacccccccgacgaggacgaggaggagggggacugcgaggaggaggaguucgagccguccacccaguacgaguacggcacggaggacgacuaccagggcaagccccucgaguucggggcgaccagcgccgcccugcagcccgaggaggagcaggaggaggacuggcuggacgacgacucccagcagaccgugggccagcaggacgggagcgaggacaaccagaccacgaccauccagaccaucguggagguccagccccagcucgagauggagcugaccccgguggugcagacgaucgaggucaacuccuucagcggcuaccugaagcucaccgagaacguguacaucaagaacgccgacaucguggaggaggcgaagaaggucaagcccaccgugguggucaacgccgccaacguguaccugaagcacgggggcggcguggccggggcccugaacaaggcgaccaacaacgccaugcaggucgaguccgacgacuacaucgccacgaacggcccccucaagguggggggcagcugcguccuguccggccacaaccuggccaagcacugccuccacgugguggggcccaacgucaacaagggcgaggacauccagcugcugaagagcgccuacgagaacuucaaccagcacgaggugcuccuggcgccgcugcucuccgccgggaucuucggcgccgaccccauccacagccugcgggugugcgucgacaccgugcgcaccaacguguaccuggccgucuucgacaagaaccucuacgacaagcugguguccagcuuccuggagaugaagagcgagaagcagguggagcagaagaucgccgagauccccaaggaggaggucaagcccuucaucaccgaguccaagccgagcguggagcagcggaagcaggacgacaagaagaucaaggcgugcguggaggaggucacgaccacccucgaggagaccaaguuccugacggagaaccugcuccuguacaucgacaucaacgggaaccugcaccccgacuccgccacccucgugagcgacaucgacaucaccuuccugaagaaggacgcccccuacaucgugggcgacgucgugcaggagggcgugcugaccgccgucgugauccccacgaagaaggccgggggcaccaccgagaugcucgcgaaggcccugcgcaaggugccgaccgacaacuacaucacgaccuaccccgggcagggccugaacggguacaccgucgaggaggccaagaccgugcucaagaagugcaaguccgccuucuacauccugcccagcaucaucuccaacgagaagcaggagauccugggcaccgugagcuggaaccuccgggagaugcuggcgcacgccgaggagacgcgcaagcugaugcccgucugcguggagaccaaggccaucguguccaccauccagcggaaguacaagggcaucaagauccaggagggggucguggacuacggcgcccgcuucuacuucuacaccagcaagacgaccguggccucccugaucaacacccucaacgaccugaacgagacccuggucacgaugccgcucggguacgugacccacggccugaaccuggaggaggcggcccgguacaugcgcagccucaaggugcccgccaccgucuccgugagcucccccgacgccgugaccgccuacaacggguaccugacgagcuccagcaagacccccgaggagcacuucaucgagaccaucucccuggcgggcagcuacaaggacuggagcuacuccggccagagcacccagcucgggaucgaguuccugaagcggggcgacaaguccgucuacuacacgagcaacccgaccaccuuccaccuggacggggaggugaucaccuucgacaaccucaagacgcugcugucccuccgcgaggugcggaccaucaaggucuucaccaccguggacaacaucaaccugcacacgcagguggucgacaugagcaugaccuacggccagcaguucggccccaccuaccuggacggggccgacgugaccaagaucaagccccacaacucccacgagggcaagacguucuacgugcucccgaacgacgacacccugcgcgucgaggccuucgaguacuaccacaccaccgaccccagcuuccuggggcgguacauguccgcccucaaccacacgaagaaguggaaguacccccaggugaacggccugaccagcaucaagugggccgacaacaacugcuaccuggcgaccgcccuccugacccugcagcagaucgagcucaaguucaaccccccggcccugcaggacgccuacuaccgcgcgcgggccggggaggccgccaacuucugcgcccugauccucgcguacugcaacaagacggugggcgagcugggcgacguccgcgagaccauguccuaccuguuccagcacgccaaccucgacagcugcaagcgggugcugaacgucgugugcaagaccugcgggcagcagcagaccacccugaagggcguggaggccgucauguacauggggacgcucuccuacgagcaguucaagaagggcgugcagauccccugcaccugcgggaagcaggccaccaaguaccuggugcagcaggagagccccuucgucaugauguccgcccccccggcgcaguacgagcugaagcacggcaccuucacgugcgccagcgaguacaccggcaacuaccagugcgggcacuacaagcacaucaccuccaaggagacccucuacugcaucgacggcgcccugcugacgaagagcagcgaguacaaggggcccaucaccgacguguucuacaaggagaacuccuacaccaccacgaucaagcccgugaccuacaagcucgacggcgucgugugcaccgagaucgaccccaagcuggacaacuacuacaagaaggacaacagcuacuucaccgagcagccgaucgaccuggugcccaaccagcccuaccccaacgccuccuucgacaacuucaaguucgucugcgacaacaucaaguucgccgacgaccucaaccagcugacgggguacaagaagccggcgagccgcgagcugaaggugaccuucuuccccgaccucaacggcgacguggucgccaucgacuacaagcacuacacccccuccuucaagaagggcgccaagcugcugcacaagcccaucguguggcacgugaacaacgccaccaacaaggcgacguacaagccgaacaccuggugcauccggugccucuggagcaccaagcccgucgagaccuccaacagcuucgacgugcugaaguccgaggacgcccaggggauggacaaccuggccugcgaggaccucaagcccgugagcgaggaggucguggagaaccccacgauccagaaggacgugcuggagugcaacgucaagaccaccgagguggugggcgacaucauccugaagccggccaacaacucccucaagaucaccgaggaggucgggcacacggaccugauggccgcguacguggacaacagcucccugaccaucaagaagcccaacgagcucagccgcgugcugggccugaagacccucgccacccacgggcuggccgccgucaacuccgugcccugggacacgaucgccaacuacgcgaagccguuccugaacaagguggucagcaccaccaccaacaucgugacgcgcugccucaaccgggugugcaccaacuacaugcccuacuucuucacccugcugcuccagcugugcaccuucacccgcuccacgaacagccggaucaaggccuccaugcccaccaccaucgccaagaacaccgucaagagcgugggcaaguucugccuggaggccagcuucaacuaccucaagucccccaacuucagcaagcugaucaacaucaucaucugguuccugcuccuguccgugugccugggcagccucaucuacuccacggccgcgcuggggguccugaugagcaaccucggcaugccguccuacugcaccggguaccgcgagggcuaccugaacagcaccaacgugaccaucgccacguacugcaccggcuccauccccugcagcgugugccuguccgggcucgacagccuggacaccuaccccucccuggagaccauccagaucacgaucagcuccuucaagugggaccucaccgccuucggccuggucgccgagugguuccuggccuacauccucuucacccgguucuucuacgugcuggggcuggcggccaucaugcagcucuucuucagcuacuucgccgugcacuucaucuccaacagcuggcugauguggcugaucaucaaccugguccagauggcccccaucuccgcgauggugcgcauguacaucuucuucgccagcuucuacuacguguggaagagcuacguccacgugguggacggcugcaacuccagcaccugcaugaugugcuacaagcggaaccgcgccacgcgggucgagugcaccaccaucgugaacgggguccgccgguccuucuacguguacgccaacggcggcaagggguucugcaagcuccacaacuggaacugcgugaacugcgacaccuucugcgccggcagcacguucaucuccgacgaggucgcgcgcgaccugagccugcaguucaagcggccgaucaaccccaccgaccaguccagcuacaucguggacuccgugaccgucaagaacgggagcauccaccucuacuucgacaaggccggccagaagaccuacgagcgccacucccugagccacuucgugaaccuggacaaccuccgggccaacaacacgaaggggucccugcccaucaacgugaucgucuucgacggcaagagcaagugcgaggaguccagcgccaaguccgccagcguguacuacucccagcugaugugccagcccauccuccugcuggaccaggcgcucgugagcgacgucggcgacagcgccgagguggccgugaagauguucgacgccuacgucaacaccuucuccagcaccuucaacgugccgauggagaagcugaagacccugguggccacggcggaggccgagcucgccaagaacgucucccuggacaacgugcugagcaccuucaucuccgccgcgcgccagggguucguggacagcgacgucgagaccaaggacgugguggagugccucaagcugucccaccagagcgacaucgaggucaccggcgacuccugcaacaacuacaugcugacguacaacaagguggagaacaugaccccccgggaccucggggccugcaucgacugcagcgcccgccacaucaacgcccagguggccaagucccacaacaucgcgcugaucuggaacgucaaggacuucaugagccuguccgagcagcuccggaagcagauccgcagcgccgccaagaagaacaaccugcccuucaagcugaccugcgccaccacgcgccagguggugaacgucgugaccaccaagaucgcccucaagggcgggugaggacuagucccuguucccagagcccacuuuuuuuucuuuuuuugaaauaaaauagccugucuuucagaucucaaaggcucuuuucagagccaccaaaaaaaaaaaaaaaaaaaaaaaaaaaaaaaaaaaaaaaaaaaaaaaaaaaaaaaaaaaaaaaaaaaaaaaaaaaaaaaaaaaaaaaaaaaaaaaaaaaaa

SEQ ID NO: 19511 - RNA, 6113 nt, Artificial Sequence
  SARS-CoV-2__MT913129.1__non-structural protein 3 (NSP3) mRNA gc
aggagagucccgcagucggcguccagcggcucugcuuguucgugugugugucguugcaggccuuauucaagcuuaccauggcccccaccaaggugaccuucggcgacgacacggucaucgaggugcagggguacaagagcgugaacaucaccuucgagcuggacgagcgcaucgacaagguccucaacgagaagugcuccgccuacaccguggagcugggcaccgaggugaacgaguucgcgugcgucguggccgacgccgugaucaagacgcugcagccggucagcgagcuccugaccccccuggggaucgaccucgacgagugguccauggccaccuacuaccuguucgacgagagcggcgaguucaagcuggccucccacauguacugcagcuucuacccccccgacgaggacgaggaggagggggacugcgaggaggaggaguucgagccguccacccaguacgaguacggcacggaggacgacuaccagggcaagccccucgaguucggggcgaccagcgccgcccugcagcccgaggaggagcaggaggaggacuggcuggacgacgacucccagcagaccgugggccagcaggacgggagcgaggacaaccagaccacgaccauccagaccaucguggagguccagccccagcucgagauggagcugaccccgguggugcagacgaucgaggucaacuccuucagcggcuaccugaagcucaccgacaacguguacaucaagaacgccgacaucguggaggaggcgaagaaggucaagcccaccgugguggucaacgccgccaacguguaccugaagcacgggggcggcguggccggggcccugaacaaggcgaccaacaacgccaugcaggucgaguccgacgacuacaucgccacgaacggcccccucaagguggggggcagcugcguccuguccggccacaaccuggccaagcacugccuccacgugguggggcccaacgucaacaagggcgagaacauccagcugcugaagagcgccuacgagaacuucaaccagcacgaggugcuccuggcgccgcugcucuccgccgggaucuucggcgccgaccccauccacagccugcgggugugcgucgacaccgugcgcaccaacguguaccuggccgucuucgacaagaaccucuacgacaagcugguguccagcuuccuggagaugaagagcgagaagcagguggagcagaagaucgccgagauccccaaggaggaggucaagcccuucaucaccgaguccaagccgagcguggagcagcggaagcaggacgacaagaagaucaaggcgugcguggaggaggucacgaccacccucgaggagaccaaguuccugacggagaaccugcuccuguacaucgacaucaacgggaaccugcaccccgacuccgccacccucgugagcgacaucgacaucaccuuccugaagaaggacgcccccuacaucgugggcgacgucgugcaggagggcgugcugaccgccgucgugauccccacgaagaaggccgggggcaccaccgagaugcucgcgaaggcccugcgcaaggugccgaccgacaacuacaucacgaccuaccccgggcagggccugaacggguacaccgucgaggaggccaagaccgugcucaagaagugcaaguccgccuucuacauccugcccagcaucaucuccaacgagaagcaggagauccugggcaccgugagcuggaaccuccgggagaugcuggcgcacgccgaggagacgcgcaagcugaugcccgucugcguggagaccaaggccaucguguccaccauccagcggaaguacaagggcaucaagauccaggagggggucguggacuacggcgcccgcuucuacuucuacaccagcaagacgaccguggccucccugaucaacacccucaacgaccugaacgagacccuggucacgaugccgcucggguacgugacccacggccugaaccuggaggaggcggcccgguacaugcgcagccucaaggugcccgccaccgucuccgugagcucccccgacgccgugaccgccuacaacggguaccugacgagcuccagcaagacccccgaggagcacuucaucgagaccaucucccuggcgggcagcuacaaggacuggagcuacuccggccagagcacccagcucgggaucgaguuccugaagcggggcgacaaguccgucuacuacacgagcaacccgaccaccuuccaccuggacggggaggugaucaccuucgacaaccucaagacgcugcugucccuccgcgaggugcggaccaucaaggucuucaccaccguggacaacaucaaccugcacacgcagguggucgacaugagcaugaccuacggccagcaguucggccccaccuaccuggacggggccgacgugaccaagaucaagccccacaacucccacgagggcaagacguucuacgugcucccgaacgacgacacccugcgcgucgaggccuucgaguacuaccacaccaccgaccccagcuuccuggggcgguacauguccgcccucaaccacacgaagaaguggaaguacccccaggugaacggccugaccagcaucaagugggccgacaacaacugcuaccuggcgaccgcccuccugacccugcagcagaucgagcucaaguucaaccccccggcccugcaggacgccuacuaccgcgcgcgggccggggaggccgccaacuucugcgcccugauccucgcguacugcaacaagacggugggcgagcugggcgacguccgcgagaccauguccuaccuguuccagcacgccaaccucgacagcugcaagcgggugcugaacgucgugugcaagaccugcgggcagcagcagaccacccugaagggcguggaggccgucauguacauggggacgcucuccuacgagcaguucaagaagggcgugcagauccccugcaccugcgggaagcaggccaccaaguaccuggugcagcaggagagccccuucgucaugauguccgcccccccggcgcaguacgagcugaagcacggcaccuucacgugcgccagcgaguacaccggcaacuaccagugcgggcacuacaagcacaucaccuccaaggagacccucuacugcaucgacggcgcccugcugacgaagagcagcgaguacaaggggcccaucaccgacguguucuacaaggagaacuccuacaccaccacgaucaagcccgugaccuacaagcucgacggcgucgugugcaccgagaucgaccccaagcuggacaacuacuacaagaaggacaacagcuacuucaccgagcagccgaucgaccuggugcccaaccagcccuaccccaacgccuccuucgacaacuucaaguucgucugcgacaacaucaaguucgccgacgaccucaaccagcugacgggguacaagaagccggcgagccgcgagcugaaggugaccuucuuccccgaccucaacggcgacguggucgccaucgacuacaagcacuacacccccuccuucaagaagggcgccaagcugcugcacaagcccaucguguggcacgugaacaacgccaccaacaaggcgacguacaagccgaacaccuggugcauccggugccucuggagcaccaagcccgucgagaccuccaacagcuucgacgugcugaaguccgaggacgcccaggggauggacaaccuggccugcgaggaccucaagcccgugagcgaggaggucguggagaaccccacgauccagaaggacgugcuggagugcaacgucaagaccaccgagguggugggcgacaucauccugaagccggccaacaacucccucaagaucaccgaggaggucgggcacacggaccugauggccgcguacguggacaacagcucccugaccaucaagaagcccaacgagcucagccgcgugcugggccugaagacccucgccacccacgggcuggccgccgucaacuccgugcccugggacacgaucgccaacuacgcgaagccguuccugaacaagguggucagcaccaccaccaacaucgugacgcgcugccucaaccgggugugcaccaacuacaugcccuacuucuucacccugcugcuccagcugugcaccuucacccgcuccacgaacagccggaucaaggccuccaugcccaccaccaucgccaagaacaccgucaagagcgugggcaaguucugccuggaggccagcuucaacuaccucaagucccccaacuucagcaagcugaucaacaucaucaucugguuccugcuccuguccgugugccugggcagccucaucuacuccacggccgcgcuggggguccugaugagcaaccucggcaugccguccuacugcaccggguaccgcgagggcuaccugaacagcaccaacgugaccaucgccacguacugcaccggcuccauccccugcagcgugugccuguccgggcucgacagccuggacaccuaccccucccuggagaccauccagaucacgaucagcuccuucaagugggaccucaccgccuucggccuggucgccgagugguuccuggccuacauccucuucacccgguucuucuacgugcuggggcuggcggccaucaugcagcucuucuucagcuacuucgccgugcacuucaucuccaacagcuggcugauguggcugaucaucaaccugguccagauggcccccaucuccgcgauggugcgcauguacaucuucuucgccagcuucuacuacguguggaagagcuacguccacgugguggacggcugcaacuccagcaccugcaugaugugcuacaagcggaaccgcgccacgcgggucgagugcaccaccaucgugaacgggguccgccgguccuucuacguguacgccaacggcggcaagggguucugcaagcuccacaacuggaacugcgugaacugcgacaccuucugcgccggcagcacguucaucuccgacgaggucgcgcgcgaccugagccugcaguucaagcggccgaucaaccccaccgaccaguccagcuacaucguggacuccgugaccgucaagaacgggagcauccaccucuacuucgacaaggccggccagaagaccuacgagcgccacucccugagccacuucgugaaccuggacaaccuccgggccaacaacacgaaggggucccugcccaucaacgugaucgucuucgacggcaagagcaagugcgaggaguccagcgccaaguccgccagcguguacuacucccagcugaugugccagcccauccuccugcuggaccaggcgcucgugagcgacgucggcgacagcgccgagguggccgugaagauguucgacgccuacgucaacaccuucuccagcaccuucaacgugccgauggagaagcugaagacccugguggccacggcggaggccgagcucgccaagaacgucucccuggacaacgugcugagcaccuucaucuccgccgcgcgccagggguucguggacagcgacgucgagaccaaggacgugguggagugccucaagcugucccaccagagcgacaucgaggucaccggcgacuccugcaacaacuacaugcugacguacaacaagguggagaacaugaccccccgggaccucggggccugcaucgacugcagcgcccgccacaucaacgcccagguggccaagucccacaacaucgcgcugaucuggaacgucaaggacuucaugagccuguccgagcagcuccggaagcagauccgcagcgccgccaagaagaacaaccugcccuucaagcugaccugcgccaccacgcgccagguggugaacgucgugaccaccaagaucgcccucaagggcgggugaggacuagucccuguucccagagcccacuuuuuuuucuuuuuuugaaauaaaauagccugucuuucagaucucaaaggcucuuuucagagccaccaaaaaaaaaaaaaaaaaaaaaaaaaaaaaaaaaaaaaaaaaaaaaaaaaaaaaaaaaaaaaaaaaaaaaaaaaaaaaaaaaaaaaaaaaaaaaaaaaaaaa

SEQ ID NO: 19512 - RNA, 6113 nt, Artificial Sequence
  SARS-CoV-2__MT913130.1__non-structural protein 3 (NSP3) mRNA gc
aggagagucccgcagucggcguccagcggcucugcuuguucgugugugugucguugcaggccuuauucaagcuuaccauggcccccaccaaggugaccuucggcgacgacacggucaucgaggugcagggguacaagagcgugaacaucaccuucgagcuggacgagcgcaucgacaagguccucaacgagaagugcuccgccuacaccguggagcugggcaccgaggugaacgaguucgcgugcgucguggccgacgccgugaucaagacgcugcagccggucagcgagcuccugaccccccuggggaucgaccucgacgagugguccauggccaccuacuaccuguucgacgagagcggcgaguucaagcuggccucccacauguacugcagcuucuacccccccgacgaggacgaggaggagggggacugcgaggaggaggaguucgagccguccacccaguacgaguacggcacggaggacgacuaccagggcaagccccucgaguucggggcgaccagcgccgcccugcagcccgaggaggagcaggaggaggacuggcuggacgacgacucccagcagaccgugggccagcaggacgggagcgaggacaaccagaccacgaccauccagaccaucguggagguccagccccagcucgagauggagcugaccccgguggugcagacgaucgaggucaacuccuucagcggcuaccugaagcucaccgacaacguguacaucaagaacgccgacaucguggaggaggcgaagaaggucaagcccaccgugguggucaacgccgccaacguguaccugaagcacgggggcggcguggccggggcccugaacaaggcgaccaacaacgccaugcaggucgaguccgacgacuacaucgccacgaacggcccccucaagguggggggcagcugcguccuguccggccacaaccuggccaagcacugccuccacgugguggggcccaacgucaacaagggcgaggacauccagcugcugaagagcgccuacgagaacuucaaccagcacgaggugcuccuggcgccgcugcucuccgccgggaucuucggcgccgaccccauccacagccugcgggugugcgucgacaccgugcgcaccaacguguaccuggccgucuucgacaagaaccucuacgacaagcugguguccagcuuccuggagaugaagagcgagaagcagguggagcagaagaucgccgagauccccaaggaggaggucaagcccuucaucaccgaguccaagccgagcguggagcagcggaagcaggacgacaagaagaucaaggcgugcguggaggaggucacgaccacccucgaggagaccaaguuccugacggagaaccugcuccuguacaucgacaucaacgggaaccugcaccccgacuccgccacccucgugagcgacaucgacaucaccuuccugaacaaggacgcccccuacaucgugggcgacgucgugcaggagggcgugcugaccgccgucgugauccccacgaagaaggccgggggcaccaccgagaugcucgcgaaggcccugcgcaaggugccgaccgacaacuacaucacgaccuaccccgggcagggccugaacggguacaccgucgaggaggccaagaccgugcucaagaagugcaaguccgccuucuacauccugcccagcaucaucuccaacgagaagcaggagauccugggcaccgugagcuggaaccuccgggagaugcuggcgcacgccgaggagacgcgcaagcugaugcccgucugcguggagaccaaggccaucguguccaccauccagcggaaguacaagggcaucaagauccaggagggggucguggacuacggcgcccgcuucuacuucuacaccagcaagacgaccguggccucccugaucaacacccucaacgaccugaacgagacccuggucacgaugccgcucggguacgugacccacggccugaaccuggaggaggcggcccgguacaugcgcagccucaaggugcccgccaccgucuccgugagcucccccgacgccgugaccgccuacaacggguaccugacgagcuccagcaagacccccgaggagcacuucaucgagaccaucucccuggcgggcagcuacaaggacuggagcuacuccggccagagcacccagcucgggaucgaguuccugaagcggggcgacaaguccgucuacuacacgagcaacccgaccaccuuccaccuggacggggaggugaucaccuucgacaaccucaagacgcugcugucccuccgcgaggugcggaccaucaaggucuucaccaccguggacaacaucaaccugcacacgcagguggucgacaugagcaugaccuacggccagcaguucggccccaccuaccuggacggggccgacgugaccaagaucaagccccacaacucccacgagggcaagacguucuacgugcucccgaacgacgacacccugcgcgucgaggccuucgaguacuaccacaccaccgaccccagcuuccuggggcgguacauguccgcccucaaccacacgaagaaguggaaguacccccaggugaacggccugaccagcaucaagugggccgacaacaacugcuaccuggcgaccgcccuccugacccugcagcagaucgagcucaaguucaaccccccggcccugcaggacgccuacuaccgcgcgcgggccggggaggccgccaacuucugcgcccugauccucgcguacugcaacaagacggugggcgagcugggcgacguccgcgagaccauguccuaccuguuccagcacgccaaccucgacagcugcaagcgggugcugaacgucgugugcaagaccugcgggcagcagcagaccacccugaagggcguggaggccgucauguacauggggacgcucuccuacgagcaguucaagaagggcgugcagauccccugcaccugcgggaagcaggccaccaaguaccuggugcagcaggagagccccuucgucaugauguccgcccccccggcgcaguacgagcugaagcacggcaccuucacgugcgccagcgaguacaccggcaacuaccagugcgggcacuacaagcacaucaccuccaaggagacccucuacugcaucgacggcgcccugcugacgaagagcagcgaguacaaggggcccaucaccgacguguucuacaaggagaacuccuacaccaccacgaucaagcccgugaccuacaagcucgacggcgucgugugcaccgagaucgaccccaagcuggacaacuacuacaagaaggacaacagcuacuucaccgagcagccgaucgaccuggugcccaaccagcccuaccccaacgccuccuucgacaacuucaaguucgucugcgacaacaucaaguucgccgacgaccucaaccagcugacgggguacaagaagccggcgagccgcgagcugaaggugaccuucuuccccgaccucaacggcgacguggucgccaucgacuacaagcacuacacccccuccuucaagaagggcgccaagcugcugcacaagcccaucguguggcacgugaacaacgccaccaacaaggcgacguacaagccgaacaccuggugcauccggugccucuggagcaccaagcccgucgagaccuccaacagcuucgacgugcugaaguccgaggacgcccaggggauggacaaccuggccugcgaggaccucaagcccgugagcgaggaggucguggagaaccccacgauccagaaggacgugcuggagugcaacgucaagaccaccgagguggugggcgacaucauccugaagccggccaacaacucccucaagaucaccgaggaggucgggcacacggaccugauggccgcguacguggacaacagcucccugaccaucaagaagcccaacgagcucagccgcgugcugggccugaagacccucgccacccacgggcuggccgccgucaacuccgugcccugggacacgaucgccaacuacgcgaagccguuccugaacaagguggucagcaccaccaccaacaucgugacgcgcugccucaaccgggugugcaccaacuacaugcccuacuucuucacccugcugcuccagcugugcaccuucacccgcuccacgaacagccggaucaaggccuccaugcccaccaccaucgccaagaacaccgucaagagcgugggcaaguucugccuggaggccagcuucaacuaccucaagucccccaacuucagcaagcugaucaacaucaucaucugguuccugcuccuguccgugugccugggcagccucaucuacuccacggccgcgcuggggguccugaugagcaaccucggcaugccguccuacugcaccggguaccgcgagggcuaccugaacagcaccaacgugaccaucgccacguacugcaccggcuccauccccugcagcgugugccuguccgggcucgacagccuggacaccuaccccucccuggagaccauccagaucacgaucagcuccuucaagugggaccucaccgccuucggccuggucgccgagugguuccuggccuacauccucuucacccgguucuucuacgugcuggggcuggcggccaucaugcagcucuucuucagcuacuucgccgugcacuucaucuccaacagcuggcugauguggcugaucaucaaccugguccagauggcccccaucuccgcgauggugcgcauguacaucuucuucgccagcuucuacuacguguggaagagcuacguccacgugguggacggcugcaacuccagcaccugcaugaugugcuacaagcggaaccgcgccacgcgggucgagugcaccaccaucgugaacgggguccgccgguccuucuacguguacgccaacggcggcaagggguucugcaagcuccacaacuggaacugcgugaacugcgacaccuucugcgccggcagcacguucaucuccgacgaggucgcgcgcgaccugagccugcaguucaagcggccgaucaaccccaccgaccaguccagcuacaucguggacuccgugaccgucaagaacgggagcauccaccucuacuucgacaaggccggccagaagaccuacgagcgccacucccugagccacuucgugaaccuggacaaccuccgggccaacaacacgaaggggucccugcccaucaacgugaucgucuucgacggcaagagcaagugcgaggaguccagcgccaaguccgccagcguguacuacucccagcugaugugccagcccauccuccugcuggaccaggcgcucgugagcgacgucggcgacagcgccgagguggccgugaagauguucgacgccuacgucaacaccuucuccagcaccuucaacgugccgauggagaagcugaagacccugguggccacggcggaggccgagcucgccaagaacgucucccuggacaacgugcugagcaccuucaucuccgccgcgcgccagggguucguggacagcgacgucgagaccaaggacgugguggagugccucaagcugucccaccagagcgacaucgaggucaccggcgacuccugcaacaacuacaugcugacguacaacaagguggagaacaugaccccccgggaccucggggccugcaucgacugcagcgcccgccacaucaacgcccagguggccaagucccacaacaucgcgcugaucuggaacgucaaggacuucaugagccuguccgagcagcuccggaagcagauccgcagcgccgccaagaagaacaaccugcccuucaagcugaccugcgccaccacgcgccagguggugaacgucgugaccaccaagaucgcccucaagggcgggugaggacuagucccuguucccagagcccacuuuuuuuucuuuuuuugaaauaaaauagccugucuuucagaucucaaaggcucuuuucagagccaccaaaaaaaaaaaaaaaaaaaaaaaaaaaaaaaaaaaaaaaaaaaaaaaaaaaaaaaaaaaaaaaaaaaaaaaaaaaaaaaaaaaaaaaaaaaaaaaaaaaaa

SEQ ID NO: 19513 - RNA, 6113 nt, Artificial Sequence
  SARS-CoV-2__MT913139.1__non-structural protein 3 (NSP3) mRNA gc
aggagagucccgcagucggcguccagcggcucugcuuguucgugugugugucguugcaggccuuauucaagcuuaccauggcccccaccaaggugaccuucggcgacgacacggucaucgaggugcagggguacaagagcgugaacaucaccuucgagcuggacgagcgcaucgacaagguccucaacgagaagugcuccgccuacaccguggagcugggcaccgaggugaacgaguucgcgugcgucguggccgacgccgugaucaagacgcugcagccggucagcgagcuccugaccccccuggggaucgaccucgacgagugguccauggccaccuacuaccuguucgacgagagcggcgaguucaagcuggccucccacauguacugcagcuucuacccccccgacgaggacgaggaggagggggacugcgaggaggaggaguucgagccguccacccaguacgaguacggcacggaggacgacuaccagggcaagccccucgaguucggggcgaccagcgccgcccugcagcccgaggaggagcaggaggaggacuggcuggacgacgacucccagcagaucgugggccagcaggacgggagcgaggacaaccagaccaccacgauccagaccaucguggagguccagccccagcucgagauggagcugaccccgguggugcagaccaucgaggucaacuccuucagcggcuaccugaagcucacggacaacguguacaucaagaacgccgacaucguggaggaggcgaagaaggucaagcccaccgugguggucaacgccgccaacguguaccugaagcacgggggcggcguggccggggcccugaacaaggcgaccaacaacgccaugcaggucgaguccgacgacuacaucgccaccaacggcccccucaagguggggggcagcugcguccuguccggccacaaccuggccaagcacugccuccacgugguggggcccaacgucaacaagggcgaggacauccagcugcugaagagcgccuacgagaacuucaaccagcacgaggugcuccuggcgccgcugcucuccgccgggaucuucggcgccgaccccauccacagccugcgggugugcgucgacacggugcgcaccaacguguaccuggccgucuucgacaagaaccucuacgacaagcugguguccagcuuccuggagaugaagagcgagaagcagguggagcagaagaucgccgagauccccaaggaggaggucaagcccuucaucaccgaguccaagccgagcguggagcagcggaagcaggacgacaagaagaucaaggcgugcguggaggaggucaccacgacccucgaggagaccaaguuccugaccgagaaccugcuccuguacaucgacaucaacgggaaccugcaccccgacuccgccacgcucgugagcgacaucgacaucaccuuccugaagaaggacgcccccuacaucgugggcgacgucgugcaggagggcgugcugaccgccgucgugauccccaccaagaaggccgggggcacgaccgagaugcucgcgaaggcccugcgcaaggugccgaccgacaacuacaucaccacguaccccgggcagggccugaacggguacaccgucgaggaggccaagaccgugcucaagaagugcaaguccgccuucuacauccugcccagcaucaucuccaacgagaagcaggagauccugggcaccgugagcuggaaccuccgggagaugcuggcgcacgccgaggagacccgcaagcugaugcccgucugcguggagacgaaggccaucguguccaccauccagcggaaguacaagggcaucaagauccaggagggggucguggacuacggcgcccgcuucuacuucuacaccagcaagaccacgguggccucccugaucaacacccucaacgaccugaacgagacccuggucaccaugccgcucggguacgugacgcacggccugaaccuggaggaggcggcccgguacaugcgcagccucaaggugcccgccaccgucuccgugagcucccccgacgccgugaccgccuacaacggguaccugaccagcuccagcaagacgcccgaggagcacuucaucgagaccaucucccuggcgggcagcuacaaggacuggagcuacuccggccagagcacccagcucgggaucgaguuccugaagcggggcgacaaguccgucuacuacaccagcaacccgacgaccuuccaccuggacggggaggugaucaccuucgacaaccucaagacccugcugucccuccgcgaggugcggacgaucaaggucuucaccaccguggacaacaucaaccugcacacccagguggucgacaugagcaugacguacggccagcaguucggccccaccuaccuggacggggccgacgugaccaagaucaagccccacaacucccacgagggcaagaccuucuacgugcucccgaacgacgacacgcugcgcgucgaggccuucgaguacuaccacaccaccgaccccagcuuccuggggcgguacauguccgcccucaaccacaccaagaaguggaaguacccccaggugaacggccugacgagcaucaagugggccgacaacaacugcuaccuggcgaccgcccuccugacccugcagcagaucgagcucaaguucaaccccccggcccugcaggacgccuacuaccgcgcgcgggccggggaggccgccaacuucugcgcccugauccucgcguacugcaacaagaccgugggcgagcugggcgacguccgcgagacgauguccuaccuguuccagcacgccaaccucgacagcugcaagcgggugcugaacgucgugugcaagaccugcgggcagcagcagaccacccugaagggcguggaggccgucauguacauggggacccucuccuacgagcaguucaagaagggcgugcagauccccugcacgugcgggaagcaggccaccaaguaccuggugcagcaggagagccccuucgucaugauguccgcccccccggcgcaguacgagcugaagcacggcaccuucaccugcgccagcgaguacacgggcaacuaccagugcgggcacuacaagcacaucaccuccaaggagacccucuacugcaucgacggcgcccugcugaccaagagcagcgaguacaaggggcccaucacggacguguucuacaaggagaacuccuacaccaccaccaucaagcccgugacguacaagcucgacggcgucgugugcaccgagaucgaccccaagcuggacaacuacuacaagaaggacaacagcuacuucaccgagcagccgaucgaccuggugcccaaccagcccuaccccaacgccuccuucgacaacuucaaguucgucugcgacaacaucaaguucgccgacgaccucaaccagcugaccggguacaagaagccggcgagccgcgagcugaaggugacguucuuccccgaccucaacggcgacguggucgccaucgacuacaagcacuacacccccuccuucaagaagggcgccaagcugcugcacaagcccaucguguggcacgugaacaacgccaccaacaaggcgaccuacaagccgaacacguggugcauccggugccucuggagcaccaagcccgucgagaccuccaacagcuucgacgugcugaaguccgaggacgcccaggggauggacaaccuggccugcgaggaccucaagcccgugagcgaggaggucguggagaaccccaccauccagaaggacgugcuggagugcaacgucaagacgaccgagguggugggcgacaucauccugaagccggccaacaacucccucaagaucaccgaggaggucgggcacaccgaccugauggccgcguacguggacaacagcucccugacgaucaagaagcccaacgagcucagccgcgugcugggccugaagacccucgccacccacgggcuggccgccgucaacuccgugcccugggacaccaucgccaacuacgcgaagccguuccugaacaagguggucagcacgaccaccaacaucgugacccgcugccucaaccgggugugcacgaacuacaugcccuacuucuucacccugcugcuccagcugugcaccuucacccgcuccaccaacagccggaucaaggccuccaugcccacgaccaucgccaagaacaccgucaagagcgugggcaaguucugccuggaggccagcuucaacuaccucaagucccccaacuucagcaagcugaucaacaucaucaucugguuccugcuccuguccgugugccugggcagccucaucuacuccaccgccgcgcuggggguccugaugagcaaccucggcaugccguccuacugcacgggguaccgcgagggcuaccugaacagcaccaacgugaccaucgccaccuacugcacgggcuccauccccugcagcgugugccuguccgggcucgacagccuggacaccuaccccucccuggagaccauccagaucaccaucagcuccuucaagugggaccucacggccuucggccuggucgccgagugguuccuggccuacauccucuucacccgguucuucuacgugcuggggcuggcggccaucaugcagcucuucuucagcuacuucgccgugcacuucaucuccaacagcuggcugauguggcugaucaucaaccugguccagauggcccccaucuccgcgauggugcgcauguacaucuucuucgccagcuucuacuacguguggaagagcuacguccacgugguggacggcugcaacuccagcaccugcaugaugugcuacaagcggaaccgcgccacccgggucgagugcacgaccaucgugaacgggguccgccgguccuucuacguguacgccaacggcggcaagggguucugcaagcuccacaacuggaacugcgugaacugcgacaccuucugcgccggcagcaccuucaucuccgacgaggucgcgcgcgaccugagccugcaguucaagcggccgaucaaccccacggaccaguccagcuacaucguggacuccgugaccgucaagaacgggagcauccaccucuacuucgacaaggccggccagaagaccuacgagcgccacucccugagccacuucgugaaccuggacaaccuccgggccaacaacaccaaggggucccugcccaucaacgugaucgucuucgacggcaagagcaagugcgaggaguccagcgccaaguccgccagcguguacuacucccagcugaugugccagcccauccuccugcuggaccaggcgcucgugagcgacgucggcgacagcgccgagguggccgugaagauguucgacgccuacgucaacacguucuccagcaccuucaacgugccgauggagaagcugaagacccugguggccaccgcggaggccgagcucgccaagaacgucucccuggacaacgugcugagcacguucaucuccgccgcgcgccagggguucguggacagcgacgucgagaccaaggacgugguggagugccucaagcugucccaccagagcgacaucgaggucaccggcgacuccugcaacaacuacaugcugaccuacaacaagguggagaacaugacgccccgggaccucggggccugcaucgacugcagcgcccgccacaucaacgcccagguggccaagucccacaacaucgcgcugaucuggaacgucaaggacuucaugagccuguccgagcagcuccggaagcagauccgcagcgccgccaagaagaacaaccugcccuucaagcugaccugcgccaccacccgccagguggugaacgucgugacgaccaagaucgcccucaagggcgggugaggacuagucccuguucccagagcccacuuuuuuuucuuuuuuugaaauaaaauagccugucuuucagaucucaaaggcucuuuucagagccaccaaaaaaaaaaaaaaaaaaaaaaaaaaaaaaaaaaaaaaaaaaaaaaaaaaaaaaaaaaaaaaaaaaaaaaaaaaaaaaaaaaaaaaaaaaaaaaaaaaaaa

SEQ ID NO: 19514 - RNA, 6113 nt, Artificial Sequence
  SARS-CoV-2__MT913142.1__non-structural protein 3 (NSP3) mRNA gc
aggagagucccgcagucggcguccagcggcucugcuuguucgugugugugucguugcaggccuuauucaagcuuaccauggcccccaccaaggugaccuucggcgacgacacggucaucgaggugcagggguacaagagcgugaacaucaccuucgagcuggacgagcgcaucgacaagguccucaacgagaagugcuccgccuacaccguggagcugggcaccgaggugaacgaguucgcgugcgucguggccgacgccgugaucaagacgcugcagccggucagcgagcuccugaccccccuggggaucgaccucgacgagugguccauggccaccuacuaccuguucgacgagagcggcgaguucaagcuggccucccacauguacugcagcuucuacccccccgacgaggacgaggaggagggggacugcgaggaggaggaguucgagccguccacccaguacgaguacggcacggaggacgacuaccagggcaagccccucgaguucggggcgaacagcgccgcccugcagcccgaggaggagcaggaggaggacuggcuggacgacgacucccagcagaccgugggccagcaggacgggagcgaggacaaccagaccaccacgauccagaccaucguggagguccagccccagcucgagauggagcugaccccgguggugcagaccaucgaggucaacuccuucagcggcuaccugaagcucacggacaacguguacaucaagaacgccgacaucguggaggaggcgaagaaggucaagcccaccgugguggucaacgccgccaacguguaccugaagcacgggggcggcguggccggggcccugaacaaggcgaccaacaacgccaugcaggucgaguccgacgacuacaucgccaccaacggcccccucaagguggggggcagcugcguccuguccggccacaaccuggccaagcacugccuccacgugguggggcccaacgucaacaagggcgaggacauccagcugcugaagagcgccuacgagaacuucaaccagcacgaggugcuccuggcgccgcugcucuccgccgggaucuucggcgccgaccccauccacagccugcgggugugcgucgacacggugcgcaccaacguguaccuggccgucuucgacaagaaccucuacgacaagcugguguccagcuuccuggagaugaagagcgagaagcagguggagcagaagaucgccgagauccccaaggaggaggucaagcccuucaucaccgaguccaagccgagcguggagcagcggaagcaggacgacaagaagaucaaggcgugcguggaggaggucaccacgacccucgaggagaccaaguuccugaccgagaaccugcuccuguacaucgacaucaacgggaaccugcaccccgacuccgccacgcucgugagcgacaucgacaucaccuuccugaagaaggacgcccccuacaucgugggcgacgucgugcaggagggcgugcugaccgccgucgugauccccaccaagaaggccgggggcacgaccgagaugcucgcgaaggcccugcgcaaggugccgaccgacaacuacaucaccacguaccccgggcagggccugaacggguacaccgucgaggaggccaagaccgugcucaagaagugcaaguccgccuucuacauccugcccagcaucaucuccaacgagaagcaggagauccugggcaccgugagcuggaaccuccgggagaugcuggcgcacgccgaggagacccgcaagcugaugcccgucugcguggagacgaaggccaucguguccaccauccagcggaaguacaagggcaucaagauccaggagggggucguggacuacggcgcccgcuucuacuucuacaccagcaagaccacgguggccucccugaucaacacccucaacgaccugaacgagacccuggucaccaugccgcucggguacgugacgcacggccugaaccuggaggaggcggcccgguacaugcgcagccucaaggugcccgccaccgucuccgugagcucccccgacgccgugaccgccuacaacggguaccugaccagcuccagcaagacgcccgaggagcacuucaucgagaccaucucccuggcgggcagcuacaaggacuggagcuacuccggccagagcacccagcucgggaucgaguuccugaagcggggcgacaaguccgucuacuacaccagcaacccgacgaccuuccaccuggacggggaggugaucaccuucgacaaccucaagacccugcugucccuccgcgaggugcggacgaucaaggucuucaccaccguggacaacaucaaccugcacacccagguggucgacaugagcaugacguacggccagcaguucggccccaccuaccuggacggggccgacgugaccaagaucaagccccacaacucccacgagggcaagaccuucuacgugcucccgaacgacgacacgcugcgcgucgaggccuucgaguacuaccacaccaccgacagcuccuuccuggggcgguacaugagcgcccucaaccacaccaagaaguggaaguacccccaggugaacggccugacguccaucaagugggccgacaacaacugcuaccuggcgaccgcccuccugacccugcagcagaucgagcucaaguucaacccccccgcccugcaggacgccuacuaccgcgcgcgggccggggaggccgccaacuucugcgcccugauccucgcguacugcaacaagaccgugggcgagcugggcgacguccgcgagacgaugagcuaccuguuccagcacgccaaccucgacuccugcaagcgggugcugaacgucgugugcaagaccugcgggcagcagcagaccacccugaagggcguggaggccgucauguacauggggacccucagcuacgagcaguucaagaagggcgugcagaucccgugcacgugcgggaagcaggccaccaaguaccuggugcagcaggagucccccuucgucaugaugagcgccccccccgcgcaguacgagcugaagcacggcaccuucaccugcgccuccgaguacacgggcaacuaccagugcgggcacuacaagcacaucaccagcaaggagacccucuacugcaucgacggcgcccugcugaccaagagcuccgaguacaaggggccgaucacggacguguucuacaaggagaacagcuacaccaccaccaucaagcccgugacguacaagcucgacggcgucgugugcaccgagaucgaccccaagcuggacaacuacuacaagaaggacaacuccuacuucaccgagcagcccaucgaccuggugccgaaccagcccuaccccaacgccagcuucgacaacuucaaguucgucugcgacaacaucaaguucgccgacgaccucaaccagcugaccggguacaagaagcccgcgucccgcgagcugaaggugacguucuucccggaccucaacggcgacguggucgccaucgacuacaagcacuacacccccagcuucaagaagggcgccaagcugcugcacaagcccaucguguggcacgugaacaacgccaccaacaaggcgaccuacaagcccaacacguggugcauccggugccucugguccaccaagccggucgagaccagcaacuccuucgacgugcugaagagcgaggacgcccaggggauggacaaccuggccugcgaggaccucaagcccguguccgaggaggucguggagaaccccaccauccagaaggacgugcuggagugcaacgucaagacgaccgagguggugggcgacaucauccugaagcccgccaacaacagccucaagaucaccgaggaggucgggcacaccgaccugauggccgcguacguggacaacuccagccugacgaucaagaagccgaacgagcucucccgcgugcugggccugaagacccucgccacccacgggcuggccgccgucaacagcgugcccugggacaccaucgccaacuacgcgaagcccuuccugaacaagguggucuccacgaccaccaacaucgugacccgcugccucaaccgggugugcacgaacuacaugccguacuucuucacccugcugcuccagcugugcaccuucacccgcagcaccaacucccggaucaaggccagcaugcccacgaccaucgccaagaacaccgucaagagcgugggcaaguucugccuggaggccuccuucaacuaccucaagagccccaacuucuccaagcugaucaacaucaucaucugguuccugcuccugagcgugugccugggcucccucaucuacagcaccgccgcgcuggggguccugauguccaaccucggcaugcccagcuacugcacgggguaccgcgagggcuaccugaacuccaccaacgugaccaucgccaccuacugcacgggcagcaucccgugcuccgugugccugagcgggcucgacucccuggacaccuaccccagccuggagaccauccagaucaccaucuccagcuucaagugggaccucacggccuucggccuggucgccgagugguuccuggccuacauccucuucacccgguucuucuacgugcuggggcuggcggccaucaugcagcucuucuucuccuacuucgccgugcacuucaucagcaacuccuggcugauguggcugaucaucaaccugguccagauggcccccaucagcgcgauggugcgcauguacaucuucuucgccagcuucuacuacguguggaaguccuacguccacgugguggacggcugcaacagcuccaccugcaugaugugcuacaagcggaaccgcgccacccgggucgagugcacgaccaucgugaacgggguccgccggagcuucuacguguacgccaacggcggcaagggguucugcaagcuccacaacuggaacugcgugaacugcgacaccuucugcgccggcuccaccuucaucagcgacgaggucgcgcgcgaccugucccugcaguucaagcggcccaucaacccgacggaccagagcuccuacaucguggacagcgugaccgucaagaacggguccauccaccucuacuucgacaaggccggccagaagaccuacgagcgccacagccugucccacuucgugaaccuggacaaccuccgggccaacaacaccaaggggagccugcccaucaacgugaucgucuucgacggcaaguccaagugcgaggagagcuccgccaagagcgccuccguguacuacagccagcugaugugccagcccauccuccugcuggaccaggcgcucgugagcgacgucggcgacuccgccgagguggccgugaagauguucgacgccuacgucaacacguucagcuccaccuucaacgugcccauggagaagcugaagacccugguggccaccgcggaggccgagcucgccaagaacgucagccuggacaacgugcuguccacguucaucagcgccgcgcgccagggguucguggacuccgacgucgagaccaaggacgugguggagugccucaagcugagccaccaguccgacaucgaggucaccggcgacagcugcaacaacuacaugcugaccuacaacaagguggagaacaugacgccgcgggaccucggggccugcaucgacugcuccgcccgccacaucaacgcccagguggccaagagccacaacaucgcgcugaucuggaacgucaaggacuucaugucccugagcgagcagcuccggaagcagauccgcuccgccgccaagaagaacaaccugcccuucaagcugaccugcgccaccacccgccagguggugaacgucgugacgaccaagaucgcccucaagggcgggugaggacuagucccuguucccagagcccacuuuuuuuucuuuuuuugaaauaaaauagccugucuuucagaucucaaaggcucuuuucagagccaccaaaaaaaaaaaaaaaaaaaaaaaaaaaaaaaaaaaaaaaaaaaaaaaaaaaaaaaaaaaaaaaaaaaaaaaaaaaaaaaaaaaaaaaaaaaaaaaaaaaaa

SEQ ID NO: 19515 - RNA, 6113 nt, Artificial Sequence
  SARS-CoV-2__MT913146.1__non-structural protein 3 (NSP3) mRNA gc
aggagagucccgcagucggcguccagcggcucugcuuguucgugugugugucguugcaggccuuauucaagcuuaccauggcccccaccaaggugaccuucggcgacgacacggucaucgaggugcagggguacaagagcgugaacaucaccuucgagcuggacgagcgcaucgacaagguccucaacgagaagugcuccgccuacaccguggagcugggcaccgaggugaacgaguucgcgugcgucguggccgacgccgugaucaagacgcugcagccggucagcgagcuccugaucccccuggggaucgaccucgacgagugguccauggccaccuacuaccuguucgacgagagcggcgaguucaagcuggccucccacauguacugcagcuucuacccccccgacgaggacgaggaggagggggacugcgaggaggaggaguucgagccguccacccaguacgaguacggcaccgaggacgacuaccagggcaagccccucgaguucggggcgacgagcgccgcccugcagcccgaggaggagcaggaggaggacuggcuggacgacgacucccagcagaccgugggccagcaggacgggagcgaggacaaccagaccaccacgauccagaccaucguggagguccagccccagcucgagauggagcugaccccgguggugcagaccaucgaggucaacuccuucagcggcuaccugaagcucacggacaacguguacaucaagaacgccgacaucguggaggaggcgaagaaggucaagcccaccgugguggucaacgccgccaacguguaccugaagcacgggggcggcguggccggggcccugaacaaggcgaccaacaacgccaugcaggucgaguccgacgacuacaucgccaccaacggcccccucaagguggggggcagcugcguccuguccggccacaaccuggccaagcacugccuccacgugguggggcccaacgucaacaagggcgaggacauccagcugcugaagagcgccuacgagaacuucaaccagcacgaggugcuccuggcgccgcugcucuccgccgggaucuucggcgccgaccccauccacagccugcgggugugcgucgacacggugcgcaccaacguguaccuggccgucuucgacaagaaccucuacgacaagcugguguccagcuuccuggagaugaagagcgagaagcagguggagcagaagaucgccgagauccccaaggaggaggucaagcccuucaucaccgaguccaagccgagcguggagcagcggaagcaggacgacaagaagaucaaggcgugcguggaggaggucaccacgacccucgaggagaccaaguuccugaccgagaaccugcuccuguacaucgacaucaacgggaaccugcaccccgacuccgccacgcucgugagcgacaucgacaucaccuuccugaagaaggacgcccccuacaucgugggcgacgucgugcaggagggcgugcugaccgccgucgugauccccaccaagaaggccgggggcacgaccgagaugcucgcgaaggcccugcgcaaggugccgaccgacaacuacaucaccacguaccccgggcagggccugaacggguacaccgucgaggaggccaagaccgugcucaagaagugcaaguccgccuucuacauccugcccagcaucaucuccaacgagaagcaggagauccugggcaccgugagcuggaaccuccgggagaugcuggcgcacgccgaggagacccgcaagcugaugcccgucugcguggagacgaaggccaucguguccaccauccagcggaaguacaagggcaucaagauccaggagggggucguggacuacggcgcccgcuucuacuucuacaccagcaagaccacgguggccucccugaucaacacccucaacgaccugaacgagacccuggucaccaugccgcucggguacgugacgcacggccugaaccuggaggaggcggcccgguacaugcgcagccucaaggugcccgccaccgucuccgugagcucccccgacgccgugaccgccuacaacggguaccugaccagcuccagcaagacgcccgaggagcacuucaucgagaccaucucccuggcgggcagcuacaaggacuggagcuacuccggccagagcacccagcucgggaucgaguuccugaagcggggcgacaaguccgucuacuacaccagcaacccgacgaccuuccaccuggacggggaggugaucaccuucgacaaccucaagacccugcugucccuccgcgaggugcggacgaucaaggucuucaccaccguggacaacaucaaccugcacacccagguggucgacaugagcaugacguacggccagcaguucggccccaccuaccuggacggggccgacgugaccaagaucaagccccacaacucccacgagggcaagaccuucuacgugcucccgaacgacgacacgcugcgcgucgaggccuucgaguacuaccacaccaccgaccccagcuuccuggggcgguacauguccgcccucaaccacaccaagaaguggaaguacccccaggugaacggccugacgagcaucaagugggccgacaacaacugcuaccuggcgaccgcccuccugacccugcagcagaucgagcucaaguucaaccccccggcccugcaggacgccuacuaccgcgcgcgggccggggaggccgccaacuucugcgcccugauccucgcguacugcaacaagaccgugggcgagcugggcgacguccgcgagacgauguccuaccuguuccagcacgccaaccucgacagcugcaagcgggugcugaacgucgugugcaagaccugcgggcagcagcagaccacccugaagggcguggaggccgucauguacauggggacccucuccuacgagcaguucaagaagggcgugcagauccccugcacgugcgggaagcaggccaccaaguaccuggugcagcaggagagccccuucgucaugauguccgcccccccggcgcaguacgagcugaagcacggcaccuucaccugcgccagcgaguacacgggcaacuaccagugcgggcacuacaagcacaucaccuccaaggagacccucuacugcaucgacggcgcccugcugaccaagagcagcgaguacaaggggcccaucacggacguguucuacaaggagaacuccuacaccaccaccaucaagcccgugacguacaagcucgacggcgucgugugcaccgagaucgaccccaagcuggacaacuacuacaagaaggacaacagcuacuucaccgagcagccgaucgaccuggugcccaaccagcccuaccccaacgccuccuucgacaacuucaaguucgucugcgacaacaucaaguucgccgacgaccucaaccagcugaccggguacaagaagccggcgagccgcgagcugaaggugacguucuuccccgaccucaacggcgacguggucgccaucgacuacaagcacuacacccccuccuucaagaagggcgccaagcugcugcacaagcccaucguguggcacgugaacaacgccaccaacaaggcgaccuacaagccgaacacguggugcauccggugccucuggagcaccaagcccgucgagaccuccaacagcuucgacgugcugaaguccgaggacgcccaggggauggacaaccuggccugcgaggaccucaagcccgugagcgaggaggucguggagaaccccaccauccagaaggacgugcuggagugcaacgucaagacgaccgagguggugggcgacaucauccugaagccggccaacaacucccucaagaucaccgaggaggucgggcacaccgaccugauggccgcguacguggacaacagcucccugacgaucaagaagcccaacgagcucagccgcgugcugggccugaagacccucgccacccacgggcuggccgccgucaacuccgugcccugggacaccaucgccaacuacgcgaagccguuccugaacaagguggucagcacgaccaccaacaucgugacccgcugccucaaccgggugugcacgaacuacaugcccuacuucuucacccugcugcuccagcugugcaccuucacccgcuccaccaacagccggaucaaggccuccaugcccacgaccaucgccaagaacaccgucaagagcgugggcaaguucugccuggaggccagcuucaacuaccucaagucccccaacuucagcaagcugaucaacaucaucaucugguuccugcuccuguccgugugccugggcagccucaucuacuccaccgccgcgcuggggguccugaugagcaaccucggcaugccguccuacugcacgggguaccgcgagggcuaccugaacagcaccaacgugaccaucgccaccuacugcacgggcuccauccccugcagcgugugccuguccgggcucgacagccuggacaccuaccccucccuggagaccauccagaucaccaucagcuccuucaagugggaccucacggccuucggccuggucgccgagugguuccuggccuacauccucuucacccgguucuucuacgugcuggggcuggcggccaucaugcagcucuucuucagcuacuucgccgugcacuucaucuccaacagcuggcugauguggcugaucaucaaccugguccagauggcccccaucuccgcgauggugcgcauguacaucuucuucgccagcuucuacuacguguggaagagcuacguccacgugguggacggcugcaacuccagcaccugcaugaugugcuacaagcggaaccgcgccacccgggucgagugcacgaccaucgugaacgggguccgccgguccuucuacguguacgccaacggcggcaagggguucugcaagcuccacaacuggaacugcgugaacugcgacaccuucugcgccggcagcaccuucaucuccgacgaggucgcgcgcgaccugagccugcaguucaagcggccgaucaaccccacggaccaguccagcuacaucguggacuccgugaccgucaagaacgggagcauccaccucuacuucgacaaggccggccagaagaccuacgagcgccacucccugagccacuucgugaaccuggacaaccuccgggccaacaacaccaaggggucccugcccaucaacgugaucgucuucgacggcaagagcaagugcgaggaguccagcgccaaguccgccagcguguacuacucccagcugaugugccagcccauccuccugcuggaccaggcgcucgugagcgacgucggcgacagcgccgagguggccgugaagauguucgacgccuacgucaacacguucuccagcaccuucaacgugccgauggagaagcugaagacccugguggccaccgcggaggccgagcucgccaagaacgucucccuggacaacgugcugagcacguucaucuccgccgcgcgccagggguucguggacagcgacgucgagaccaaggacgugguggagugccucaagcugucccaccagagcgacaucgaggucaccggcgacuccugcaacaacuacaugcugaccuacaacaagguggagaacaugacgccccgggaccucggggccugcaucgacugcagcgcccgccacaucaacgcccagguggccaagucccacaacaucgcgcugaucuggaacgucaaggacuucaugagccuguccgagcagcuccggaagcagauccgcagcgccgccaagaagaacaaccugcccuucaagcugaccugcgccaccacccgccagguggugaacgucgugacgaccaagaucgcccucaagggcgggugaggacuagucccuguucccagagcccacuuuuuuuucuuuuuuugaaauaaaauagccugucuuucagaucucaaaggcucuuuucagagccaccaaaaaaaaaaaaaaaaaaaaaaaaaaaaaaaaaaaaaaaaaaaaaaaaaaaaaaaaaaaaaaaaaaaaaaaaaaaaaaaaaaaaaaaaaaaaaaaaaaaaa

SEQ ID NO: 19516 - RNA, 6113 nt, Artificial Sequence
  SARS-CoV-2__MT913147.1__non-structural protein 3 (NSP3) mRNA gc
aggagagucccgcagucggcguccagcggcucugcuuguucgugugugugucguugcaggccuuauucaagcuuaccauggcccccaccaaggugaccuucggcgacgacacggucaucgaggugcagggguacaagagcgugaacaucaccuucgagcuggacgagcgcaucgacaagguccucaacgagaagugcuccgccuacaccguggagcugggcaccgaggugaacgaguucgcgugcgucguggccgacgccgugaucaagacgcugcagccggucagcgagcuccugaccccccuggggaucgaccucgacgagugguccauggccaccuacuaccuguucgacgagagcggcgaguucaagcuggccucccacauguacugcagcuucuacccccccgacgaggacgaggaggagggggacugcgaggaggaggaguucgagccguccacccaguacgaguacggcacggaggacgacuaccagggcaagccccucgaguucggggcgaccagcgccgcccugcagcccgaggaggagcaggaggaggacuggcuggacgacgacucccagcagaccgugggccagcaggacgggagcgaggacaaccagaccacgaccauccagaccaucguggagguccagccccagcucgagauggagcugaccccgguggugcagacgaucgaggucaacuccuucagcggcuaccugaagcucaccgacaacguguacaucaagaacgccgacaucguggaggaggcgaagaaggucaagcccaccgugguggucaacgccgccaacguguaccugaagcacgggggcggcguggccggggcccugaacaaggcgaccaacaacgccaugcaggucgaguccgacgacuacaucgccacgaacggcccccucaagguggggggcagcugcguccuguccggccacaaccuggccaagcacugccuccacgugguggggcccaacgucaacaagggcgaggacauccagcugcugaagagcgccuacgagaacuucaaccagcacgaggugcuccuggcgccgcugcucuccgccgggaucuucggcgccgaccccauccacagccugcgggugugcgucgacaccgugcgcaccaacguguaccuggccgucuucgacaagaaccucuacgacaagcugguguccagcuuccuggagaugaagagcgagaagcagguggagcagaagaucgccgagauccccaaggaggaggucaagcccuucaucaccgaguccaagccgagcguggagcagcggaagcaggacgacaagaagaucaaggcgugcguggaggaggucacgaccauccucgaggagaccaaguuccugaccgagaaccugcuccuguacaucgacaucaacgggaaccugcaccccgacuccgccacgcucgugagcgacaucgacaucaccuuccugaagaaggacgcccccuacaucgugggcgacgucgugcaggagggcgugcugaccgccgucgugauccccaccaagaaggccgggggcacgaccgagaugcucgcgaaggcccugcgcaaggugccgaccgacaacuacaucaccacguaccccgggcagggccugaacggguacaccgucgaggaggccaagaccgugcucaagaagugcaaguccgccuucuacauccugcccagcaucaucuccaacgagaagcaggagauccugggcaccgugagcuggaaccuccgggagaugcuggcgcacgccgaggagacccgcaagcugaugcccgucugcguggagacgaaggccaucguguccaccauccagcggaaguacaagggcaucaagauccaggagggggucguggacuacggcgcccgcuucuacuucuacaccagcaagaccacgguggccucccugaucaacacccucaacgaccugaacgagacccuggucaccaugccgcucggguacgugacgcacggccugaaccuggaggaggcggcccgguacaugcgcagccucaaggugcccgccaccgucuccgugagcucccccgacgccgugaccgccuacaacggguaccugaccagcuccagcaagacgcccgaggagcacuucaucgagaccaucucccuggcgggcagcuacaaggacuggagcuacuccggccagagcacccagcucgggaucgaguuccugaagcggggcgacaaguccgucuacuacaccagcaacccgacgaccuuccaccuggacggggaggugaucaccuucgacaaccucaagacccugcugucccuccgcgaggugcggacgaucaaggucuucaccaccguggacaacaucaaccugcacacccagguggucgacaugagcaugacguacggccagcaguucggccccaccuaccuggacggggccgacgugaccaagaucaagccccacaacucccacgagggcaagaccuucuacgugcucccgaacgacgacacgcugcgcgucgaggccuucgaguacuaccacaccaccgaccccagcuuccuggggcgguacauguccgcccucaaccacaccaagaaguggaaguacccccaggugaacggccugacgagcaucaagugggccgacaacaacugcuaccuggcgaccgcccuccugacccugcagcagaucgagcucaaguucaaccccccggcccugcaggacgccuacuaccgcgcgcgggccggggaggccgccaacuucugcgcccugauccucgcguacugcaacaagaccgugggcgagcugggcgacguccgcgagacgauguccuaccuguuccagcacgccaaccucgacagcugcaagcgggugcugaacgucgugugcaagaccugcgggcagcagcagaccacccugaagggcguggaggccgucauguacauggggacccucuccuacgagcaguucaagaagggcgugcagauccccugcacgugcgggaagcaggccaccaaguaccuggugcagcaggagagccccuucgucaugauguccgcccccccggcgcaguacgagcugaagcacggcaccuucaccugcgccagcgaguacacgggcaacuaccagugcgggcacuacaagcacaucaccuccaaggagacccucuacugcaucgacggcgcccugcugaccaagagcagcgaguacaaggggcccaucacggacguguucuacaaggagaacuccuacaccaccaccaucaagcccgugacguacaagcucgacggcgucgugugcaccgagaucgaccccaagcuggacaacuacuacaagaaggacaacagcuacuucaccgagcagccgaucgaccuggugcccaaccagcccuaccccaacgccuccuucgacaacuucaaguucgucugcgacaacaucaaguucgccgacgaccucaaccagcugaccggguacaagaagccggcgagccgcgagcugaaggugacguucuuccccgaccucaacggcgacguggucgccaucgacuacaagcacuacacccccuccuucaagaagggcgccaagcugcugcacaagcccaucguguggcacgugaacaacgccaccaacaaggcgaccuacaagccgaacacguggugcauccggugccucuggagcaccaagcccgucgagaccuccaacagcuucgacgugcugaaguccgaggacgcccaggggauggacaaccuggccugcgaggaccucaagcccgugagcgaggaggucguggagaaccccaccauccagaaggacgugcuggagugcaacgucaagacgaccgagguggugggcgacaucauccugaagccggccaacaacucccucaagaucaccgaggaggucgggcacaccgaccugauggccgcguacguggacaacagcucccugacgaucaagaagcccaacgagcucagccgcgugcugggccugaagacccucgccacccacgggcuggccgccgucaacuccgugcccugggacaccaucgccaacuacgcgaagccguuccugaacaagguggucagcacgaccaccaacaucgugacccgcugccucaaccgggugugcacgaacuacaugcccuacuucuucacccugcugcuccagcugugcaccuucacccgcuccaccaacagccggaucaaggccuccaugcccacgaccaucgccaagaacaccgucaagagcgugggcaaguucugccuggaggccagcuucaacuaccucaagucccccaacuucagcaagcugaucaacaucaucaucugguuccugcuccuguccgugugccugggcagccucaucuacuccaccgccgcgcuggggguccugaugagcaaccucggcaugccguccuacugcacgggguaccgcgagggcuaccugaacagcaccaacgugaccaucgccaccuacugcacgggcuccauccccugcagcgugugccuguccgggcucgacagccuggacaccuaccccucccuggagaccauccagaucaccaucagcuccuucaagugggaccucacggccuucggccuggucgccgagugguuccuggccuacauccucuucacccgguucuucuacgugcuggggcuggcggccaucaugcagcucuucuucagcuacuucgccgugcacuucaucuccaacagcuggcugauguggcugaucaucaaccugguccagauggcccccaucuccgcgauggugcgcauguacaucuucuucgccagcuucuacuacguguggaagagcuacguccacgugguggacggcugcaacuccagcaccugcaugaugugcuacaagcggaaccgcgccacccgggucgagugcacgaccaucgugaacgggguccgccgguccuucuacguguacgccaacggcggcaagggguucugcaagcuccacaacuggaacugcgugaacugcgacaccuucugcgccggcagcaccuucaucuccgacgaggucgcgcgcgaccugagccugcaguucaagcggccgaucaaccccacggaccaguccagcuacaucguggacuccgugaccgucaagaacgggagcauccaccucuacuucgacaaggccggccagaagaccuacgagcgccacucccugagccacuucgugaaccuggacaaccuccgggccaacaacaccaaggggucccugcccaucaacgugaucgucuucgacggcaagagcaagugcgaggaguccagcgccaaguccgccagcguguacuacucccagcugaugugccagcccauccuccugcuggaccaggcgcucgugagcgacgucggcgacagcgccgagguggccgugaagauguucgacgccuacgucaacacguucuccagcaccuucaacgugccgauggagaagcugaagacccugguggccaccgcggaggccgagcucgccaagaacgucucccuggacaacgugcugagcacguucaucuccgccgcgcgccagggguucguggacagcgacgucgagaccaaggacgugguggagugccucaagcugucccaccagagcgacaucgaggucaccggcgacuccugcaacaacuacaugcugaccuacaacaagguggagaacaugacgccccgggaccucggggccugcaucgacugcagcgcccgccacaucaacgcccagguggccaagucccacaacaucgcgcugaucuggaacgucaaggacuucaugagccuguccgagcagcuccggaagcagauccgcagcgccgccaagaagaacaaccugcccuucaagcugaccugcgccaccacccgccagguggugaacgucgugacgaccaagaucgcccucaagggcgggugaggacuagucccuguucccagagcccacuuuuuuuucuuuuuuugaaauaaaauagccugucuuucagaucucaaaggcucuuuucagagccaccaaaaaaaaaaaaaaaaaaaaaaaaaaaaaaaaaaaaaaaaaaaaaaaaaaaaaaaaaaaaaaaaaaaaaaaaaaaaaaaaaaaaaaaaaaaaaaaaaaaaa

SEQ ID NO: 19517 - RNA, 6113 nt, Artificial Sequence
  SARS-CoV-2__MT913148.1__non-structural protein 3 (NSP3) mRNA gc
aggagagucccgcagucggcguccagcggcucugcuuguucgugugugugucguugcaggccuuauucaagcuuaccauggcccccaccaaggugaccuucggcgacgacacggucaucgaggugcagggguacaagagcgugaacaucaccuucgagcuggacgagcgcaucgacaagguccucaacgagaagugcuccgccuacaccguggagcugggcaccgaggugaacgaguucgcgugcgucguggccgacgccgugaucaagacgcugcagccggucagcgagcuccugaccccccuggggaucgaccucgacgagugguccauggccaccuacuaccuguucgacgagagcggcgaguucaagcuggccucccacauguacugcagcuucuacccccccgacgaggacgaggaggagggggacugcgaggaggaggaguucgagccguccacccaguacgaguacggcacggaggacgacuaccagggcaagccccucgaguucggggcgaccagcgccgcccugcagcccgaggaggagcaggaggaggacuggcuggacgacgacucccagcagaccgugggccagcaggacgggagcgaggacaaccagaccacgaccauccagaccaucguggagguccagccccagcucgagauggagcugaccccgguggugcagacgaucgaggucaacuccuucagcggcuaccugaagcucaccgacaacguguacaucaagaacgccgacaucguggaggaggcgaagaaggucaagcccaccgugguggucaacgccgccaacguguaccugaagcacgggggcggcguggccggggcccugaacaaggcgaccaacaacgccaugcaggucgaguccgacgacuacaucgccacgaacggcccccucaagguggggggcagcugcguccuguccggccacaaccuggccaagcacugccuccacgugguggggcccaacgucaacaagggcgaggacauccagcugcugaagagcgccuacgagaacuucaaccagcacgaggugcuccuggcgccgcugcucuccgccgggaucuucggcgccgaccccauccacagccugcgggugugcgucgacaccgugcgcaccaacguguaccuggccgucuucgacaagaaccucuacgacaagcugguguccagcuuccuggagaugaagagcgagaagcagguggagcagaagaucgccgagauccccaaggaggaggucaagcccuucaucaccgaguccaagccgagcguggagcagcggaagcaggacgacaagaagaucaaggcgugcguggaggaggucacgaccacccucgaggagaccaaguuccugacggagaaccugcuccuguacaucgacaucaacgggaaccugcaccccgacuccgccacccucgugagcgacaucgacaucaccuuccugaagaaggacgcccccuacaucgugggcgacgucgugcaggagggcgugcugaccgccgucgugauccccacgaagaaggccgggggcaccaccgagaugcucgcgaaggcccugcgcaaggugccgaccgacaacuacaucacgaccuaccccgggcagggccugaacggguacaccgucgaggaggccaagaccgugcucaagaagugcaaguccgccuucuacauccugcccagcaucaucuccaacgagaagcaggagauccugggcaccgugagcuggaaccuccgggagaugcuggcgcacgccgaggagacgcgcaagcugaugcccgucugcguggagaccaaggccaucguguccaccauccagcggaaguacaagggcaucaagauccaggagggggucguggacuacggcgcccgcuucuacuucuacaccagcaagacgaccguggccucccugaucaacacccucaacgaccugaacgagacccuggucacgaugccgcucggguacgugacccacggccugaaccuggaggaggcggcccgguacaugcgcagccucaaggugcccgccaccgucuccgugagcucccccgacgccgugaccgccuacaacggguaccugacgagcuccagcaagacccccgaggagcacuucaucgagaccaucucccuggcgggcagcuacaaggacuggagcuacuccggccagagcacccagcucgggaucgaguuccugaagcggggcgacaaguccgucuacuacacgagcaacccgaccaccuuccaccuggacggggaggugaucaccuucgacaaccucaagacgcugcugucccuccgcgaggugcggaccaucaaggucuucaccaccguggacaacaucaaccugcacacgcagguggucgacaugagcaugaccuacggccagcaguucggccccaccuaccuggacggggccgacgugaccaagaucaagccccacaacucccacgagggcaagacguucuacgugcucccgaacgacgacacccugcgcgucgaggccuucgaguacuaccacaucaccgaccccagcuuccuggggcgguacauguccgcccucaaccacaccaagaaguggaaguacccccaggugaacggccugacgagcaucaagugggccgacaacaacugcuaccuggcgaccgcccuccugacccugcagcagaucgagcucaaguucaaccccccggcccugcaggacgccuacuaccgcgcgcgggccggggaggccgccaacuucugcgcccugauccucgcguacugcaacaagaccgugggcgagcugggcgacguccgcgagacgauguccuaccuguuccagcacgccaaccucgacagcugcaagcgggugcugaacgucgugugcaagaccugcgggcagcagcagaccacccugaagggcguggaggccgucauguacauggggacccucuccuacgagcaguucaagaagggcgugcagauccccugcacgugcgggaagcaggccaccaaguaccuggugcagcaggagagccccuucgucaugauguccgcccccccggcgcaguacgagcugaagcacggcaccuucaccugcgccagcgaguacacgggcaacuaccagugcgggcacuacaagcacaucaccuccaaggagacccucuacugcaucgacggcgcccugcugaccaagagcagcgaguacaaggggcccaucacggacguguucuacaaggagaacuccuacaccaccaccaucaagcccgugacguacaagcucgacggcgucgugugcaccgagaucgaccccaagcugaacaacuacuacaagaaggacaacagcuacuucaccgagcagccgaucgaccuggugcccaaccagcccuaccccaacgccuccuucgacaacuucaaguucgucugcgacaacaucaaguucgccgacgaccucaaccagcugaccggguacaagaagccggcgagccgcgagcugaaggugacguucuuccccgaccucaacggcgacguggucgccaucgacuacaagcacuacacccccuccuucaagaagggcgccaagcugcugcacaagcccaucguguggcacgugaacaacgccaccaacaaggcgaccuacaagccgaacacguggugcauccggugccucuggagcaccaagcccgucgagaccuccaacagcuucgacgugcugaaguccgaggacgcccaggggauggacaaccuggccugcgaggaccucaagcccgugagcgaggaggucguggagaaccccaccauccagaaggacgugcuggagugcaacgucaagacgaccgagguggugggcgacaucauccugaagccggccaacaacucccucaagaucaccgaggaggucgggcacaccgaccugauggccgcguacguggacaacagcucccugacgaucaagaagcccaacgagcucagccgcgugcugggccugaagacccucgccacccacgggcuggccgccgucaacuccgugcccugggacaccaucgccaacuacgcgaagccguuccugaacaagguggucagcacgaccaccaacaucgugacccgcugccucaaccgggugugcacgaacuacaugcccuacuucuucacccugcugcuccagcugugcaccuucacccgcuccaccaacagccggaucaaggccuccaugcccacgaccaucgccaagaacaccgucaagagcgugggcaaguucugccuggaggccagcuucaacuaccucaagucccccaacuucagcaagcugaucaacaucaucaucugguuccugcuccuguccgugugccugggcagccucaucuacuccaccgccgcgcuggggguccugaugagcaaccucggcaugccguccuacugcacgggguaccgcgagggcuaccugaacagcaccaacgugaccaucgccaccuacugcacgggcuccauccccugcagcgugugccuguccgggcucgacagccuggacaccuaccccucccuggagaccauccagaucaccaucagcuccuucaagugggaccucacggccuucggccuggucgccgagugguuccuggccuacauccucuucacccgguucuucuacgugcuggggcuggcggccaucaugcagcucuucuucagcuacuucgccgugcacuucaucuccaacagcuggcugauguggcugaucaucaaccugguccagauggcccccaucuccgcgauggugcgcauguacaucuucuucgccagcuucuacuacguguggaagagcuacguccacgugguggacggcugcaacuccagcaccugcaugaugugcuacaagcggaaccgcgccacccgggucgagugcacgaccaucgugaacgggguccgccgguccuucuacguguacgccaacggcggcaagggguucugcaagcuccacaacuggaacugcgugaacugcgacaccuucugcgccggcagcaccuucaucuccgacgaggucgcgcgcgaccugagccugcaguucaagcggccgaucaaccccacggaccaguccagcuacaucguggacuccgugaccgucaagaacgggagcauccaccucuacuucgacaaggccggccagaagaccuacgagcgccacucccugagccacuucgugaaccuggacaaccuccgggccaacaacaccaaggggucccugcccaucaacgugaucgucuucgacggcaagagcaagugcgaggaguccagcgccaaguccgccagcguguacuacucccagcugaugugccagcccauccuccugcuggaccaggcgcucgugagcgacgucggcgacagcgccgagguggccgugaagauguucgacgccuacgucaacacguucuccagcaccuucaacgugccgauggagaagcugaagacccugguggccaccgcggaggccgagcucgccaagaacgucucccuggacaacgugcugagcacguucaucuccgccgcgcgccagggguucguggacagcgacgucgagaccaaggacgugguggagugccucaagcugucccaccagagcgacaucgaggucaccggcgacuccugcaacaacuacaugcugaccuacaacaagguggagaacaugacgccccgggaccucggggccugcaucgacugcagcgcccgccacaucaacgcccagguggccaagucccacaacaucgcgcugaucuggaacgucaaggacuucaugagccuguccgagcagcuccggaagcagauccgcagcgccgccaagaagaacaaccugcccuucaagcugaccugcgccaccacccgccagguggugaacgucgugacgaccaagaucgcccucaagggcgggugaggacuagucccuguucccagagcccacuuuuuuuucuuuuuuugaaauaaaauagccugucuuucagaucucaaaggcucuuuucagagccaccaaaaaaaaaaaaaaaaaaaaaaaaaaaaaaaaaaaaaaaaaaaaaaaaaaaaaaaaaaaaaaaaaaaaaaaaaaaaaaaaaaaaaaaaaaaaaaaaaaaaa

SEQ ID NO: 19518 - RNA, 6113 nt, Artificial Sequence
  SARS-CoV-2__MT913149.1__non-structural protein 3 (NSP3) mRNA gc
aggagagucccgcagucggcguccagcggcucugcuuguucgugugugugucguugcaggccuuauucaagcuuaccauggcccccaccaaggugaccuucggcgacgacacggucaucgaggugcagggguacaagagcgugaacaucaccuucgagcuggacgagcgcaucgacaagguccucaacgagaagugcuccgccuacaccguggagcugggcaccgaggugaacgaguucgcgugcgucguggccgacgccgugaucaagacgcugcagccggucagcgagcuccugaccccccuggggaucgaccucgacgagugguccauggccaccuacuaccuguucgacgagagcggcgaguucaagcuggccucccacauguacugcagcuucuacccccccgacgaggacgaggaggagggggacugcgaggaggaggaguucgagccguccacccaguacgaguacggcacggaggcggacuaccagggcaagccccucgaguucggggccaccagcgccgcccugcagcccgaggaggagcaggaggaggacuggcuggacgacgacucccagcagaccgugggccagcaggacgggagcgaggacaaccagaccacgaccauccagaccaucguggagguccagccccagcucgagauggagcugaccccgguggugcagacgaucgaggucaacuccuucagcggcuaccugaagcucaccgacaacguguacaucaagaacgcggacaucguggaggaggccaagaaggucaagcccaccgugguggucaacgccgccaacguguaccugaagcacgggggcggcguggccggggcgcugaacaaggccaccaacaacgccaugcaggucgaguccgacgacuacaucgccacgaacggcccccucaagguggggggcagcugcguccuguccggccacaaccuggccaagcacugccuccacgugguggggcccaacgucaacaagggcgaggacauccagcugcugaagagcgcguacgagaacuucaaccagcacgaggugcuccuggccccgcugcucuccgccgggaucuucggcgccgaccccauccacagccugcgggugugcgucgacaccgugcgcaccaacguguaccuggccgucuucgacaagaaccucuacgacaagcugguguccagcuuccuggagaugaagagcgagaagcagguggagcagaagaucgcggagauccccaaggaggaggucaagcccuucaucaccgaguccaagccgagcguggagcagcggaagcaggacgacaagaagaucaaggccugcguggaggaggucacgaccacccucgaggagaccaaguuccugacggagaaccugcuccuguacaucgacaucaacgggaaccugcaccccgacuccgccacccucgugagcgacaucgacaucaccuuccugaagaaggacgcccccuacaucgugggcgacgucgugcaggagggcgugcugaccgccgucgugauccccacgaagaaggcggggggcaccaccgagaugcucgccaaggcccugcgcaaggugccgaccgacaacuacaucacgaccuaccccgggcagggccugaacggguacaccgucgaggaggccaagaccgugcucaagaagugcaaguccgcguucuacauccugcccagcaucaucuccaacgagaagcaggagauccugggcaccgugagcuggaaccuccgggagaugcuggcccacgccgaggagacgcgcaagcugaugcccgucugcguggagaccaaggccaucguguccaccauccagcggaaguacaagggcaucaagauccaggagggggucguggacuacggcgcccgcuucuacuucuacaccagcaagacgaccguggcgucccugaucaacacccucaacgaccugaacgagacccuggucacgaugccgcucggguacgugacccacggccugaaccuggaggaggccgcccgguacaugcgcagccucaaggugcccgccaccgucuccgugagcucccccgacgccgugaccgcguacaacggguaccugacgagcuccagcaagacccccgaggagcacuucaucgagaccaucucccuggccggcagcuacaaggacuggagcuacuccggccagagcacccagcucgggaucgaguuccugaagcggggcgacaaguccgucuacuacacgagcaacccgaccaccuuccaccuggacggggaggugaucaccuucgacaaccucaagacgcugcugucccuccgcgaggugcggaccaucaaggucuucaccaccguggacaacaucaaccugcacacgcagguggucgacaugagcaugaccuacggccagcaguucggccccaccuaccuggacggggccgacgugaccaagaucaagccccacaacucccacgagggcaagacguucuacgugcucccgaacgacgacacccugcgcgucgaggccuucgaguacuaccacaccaccgaccccagcuuccuggggcgguacauguccgcccucaaccacacgaagaaguggaaguacccccaggugaacggccugaccagcaucaagugggcggacaacaacugcuaccuggccaccgcccuccugacccugcagcagaucgagcucaaguucaaccccccggcccugcaggacgcguacuaccgcgcccgggccggggaggccgccaacuucugcgcgcugauccucgccuacugcaacaagacggugggcgagcugggcgacguccgcgagaccauguccuaccuguuccagcacgccaaccucgacagcugcaagcgggugcugaacgucgugugcaagaccugcgggcagcagcagaccacccugaagggcguggaggccgucauguacauggggacgcucuccuacgagcaguucaagaagggcgugcagauccccugcaccugcgggaagcaggccaccaaguaccuggugcagcaggagagccccuucgucaugauguccgcgcccccggcccaguacgagcugaagcacggcaccuucacgugcgccagcgaguacaccggcaacuaccagugcgggcacuacaagcacaucaccuccaaggagacccucuacugcaucgacggcgcccugcugacgaagagcagcgaguacaaggggcccaucaccgacguguucuacaaggagaacuccuacaccaccacgaucaagcccgugaccuacaagcucgacggcgucgugugcaccgagaucgaccccaagcuggacaacuacuacaagaaggacaacagcuacuucaccgagcagccgaucgaccuggugcccaaccagcccuaccccaacgccuccuucgacaacuucaaguucgucugcgacaacaucaaguucgcggacgaccucaaccagcugacgggguacaagaagccggccagccgcgagcugaaggugaccuucuuccccgaccucaacggcgacguggucgccaucgacuacaagcacuacacccccuccuucaagaagggcgccaagcugcugcacaagcccaucguguggcacgugaacaacgcgaccaacaaggccacguacaagccgaacaccuggugcauccggugccucuggagcaccaagcccgucgagaccuccaacagcuucgacgugcugaaguccgaggacgcccaggggauggacaaccuggccugcgaggaccucaagcccgugagcgaggaggucguggagaaccccacgauccagaaggacgugcuggagugcaacgucaagaccaccgagguggugggcgacaucauccugaagccggccaacaacucccucaagaucaccgaggaggucgggcacacggaccugauggcggccuacguggacaacagcucccugaccaucaagaagcccaacgagcucagccgcgugcugggccugaagacccucgccacccacgggcuggccgccgucaacuccgugcccugggacacgaucgcgaacuacgccaagccguuccugaacaagguggucagcaccaccaccaacaucgugacgcgcugccucaaccgggugugcaccaacuacaugcccuacuucuucacccugcugcuccagcugugcaccuucacccgcuccacgaacagccggaucaaggccuccaugcccaccaccaucgccaagaacaccgucaagagcgugggcaaguucugccuggaggccagcuucaacuaccucaagucccccaacuucagcaagcugaucaacaucaucaucugguuccugcuccuguccgugugccugggcagccucaucuacuccacggcggcccuggggguccugaugagcaaccucggcaugccguccuacugcaccggguaccgcgagggcuaccugaacagcaccaacgugaccaucgccacguacugcaccggcuccauccccugcagcgugugccuguccgggcucgacagccuggacaccuaccccucccuggagaccauccagaucacgaucagcuccuucaagugggaccucaccgccuucggccuggucgccgagugguuccuggcguacauccucuucacccgguucuucuacgugcuggggcuggccgccaucaugcagcucuucuucagcuacuucgccgugcacuucaucuccaacagcuggcugauguggcugaucaucaaccugguccagauggcgcccaucuccgccauggugcgcauguacaucuucuucgccagcuucuacuacguguggaagagcuacguccacgugguggacggcugcaacuccagcaccugcaugaugugcuacaagcggaaccgcgccacgcgggucgagugcaccaccaucgugaacgggguccgccgguccuucuacguguacgccaacggcggcaagggguucugcaagcuccacaacuggaacugcgugaacugcgacaccuucugcgcgggcagcacguucaucuccgacgaggucgcccgcgaccugagccugcaguucaagcggccgaucaaccccaccgaccaguccagcuacaucguggacuccgugaccgucaagaacgggagcauccaccucuacuucgacaaggccggccagaagaccuacgagcgccacucccugagccacuucgugaaccuggacaaccuccgggccaacaacacgaaggggucccugcccaucaacgugaucgucuucgacggcaagagcaagugcgaggaguccagcgccaaguccgcgagcguguacuacucccagcugaugugccagcccauccuccugcuggaccaggcccucgugagcgacgucggcgacagcgccgagguggccgugaagauguucgacgccuacgucaacaccuucuccagcaccuucaacgugccgauggagaagcugaagacccugguggcgacggccgaggccgagcucgccaagaacgucucccuggacaacgugcugagcaccuucaucuccgcggcccgccagggguucguggacagcgacgucgagaccaaggacgugguggagugccucaagcugucccaccagagcgacaucgaggucaccggcgacuccugcaacaacuacaugcugacguacaacaagguggagaacaugaccccccgggaccucggggccugcaucgacugcagcgcccgccacaucaacgcccagguggcgaagucccacaacaucgcccugaucuggaacgucaaggacuucaugagccuguccgagcagcuccggaagcagauccgcagcgccgccaagaagaacaaccugcccuucaagcugaccugcgccaccacgcgccagguggugaacgucgugaccaccaagaucgcgcucaagggcgggugaggacuagucccuguucccagagcccacuuuuuuuucuuuuuuugaaauaaaauagccugucuuucagaucucaaaggcucuuuucagagccaccaaaaaaaaaaaaaaaaaaaaaaaaaaaaaaaaaaaaaaaaaaaaaaaaaaaaaaaaaaaaaaaaaaaaaaaaaaaaaaaaaaaaaaaaaaaaaaaaaaaaa

SEQ ID NO: 19519 - RNA, 6113 nt, Artificial Sequence
  SARS-CoV-2__MT913150.1__non-structural protein 3 (NSP3) mRNA gc
aggagagucccgcagucggcguccagcggcucugcuuguucgugugugugucguugcaggccuuauucaagcuuaccauggcccccaccaaggugaccuucggcgacgacacggucaucgaggugcagggguacaagagcgugaacaucaccuucgagcuggacgagcgcaucgacaagguccucaacgagaagugcuccgccuacaccguggagcugggcaccgaggugaacgaguucgcgugcgucguggccgacgccgugaucaagacgcugcagccggucagcgagcuccugaccccccuggggaucgaccucgacgagugguccauggccaccuacuaccuguucgacgagagcggcgaguucaagcuggccucccacauguacugcagcuucuacccccccgacgaggacgaggaggagggggacugcgaggaggaggaguucgagccguccacccaguacgaguacggcacggaggacgacuaccagggcaagccccucgaguucggggcgaccagcgccgcccugcagcccgaggaggagcaggaggaggacuggcuggacgacgacucccagcagaccgugggccagcaggacgggagcgaggacaaccagaccacgaccauccagaccaucguggagguccagccccagcucgagauggagcugaccccgguggugcagacgaucgaggucaacuccuucagcggcuaccugaagcucaccgacaacguguacaucaagaacgccgacaucguggaggaggcgaagaaggucaagcccaccgugguggucaacgccgccaacguguaccugaagcacgggggcggcguggccggggcccugaacaaggcgaccaacaacgccaugcaggucgaguccgacgacuacaucgccacgaacggcccccucaagguggggggcagcugcguccuguccggccacaaccuggccaagcacugccuccacgugguggggcccaacgucaacaagggcgaggacauccagcugcugaagagcgccuacgagaacuucaaccagcacgaggugcuccuggcgccgcugcucuccgccgggaucuucggcgccgaccccauccacagccugcgggugugcgucgacaccgugcgcaccaacguguaccuggccgucuucgacaagaaccucuacgacaagcugguguccagcuuccuggagaugaagagcgagaagcagguggagcagaagaucgccgagauccccaaggaggaggucaagcccuucaucaccgaguccaagccgagcguggagcagcggaagcaggacgacaagaagaucaaggcgugcguggaggaggucacgaccacccucgaggagaccaaguuccugacggagaaccugcuccuguacaucgacaucaacgggaaccugcaccccgacuccgccacccucgugagcgacaucgacaucaccuuccugaagaaggacgcccccuacaucgugggcgacgucgugcaggagggcgugcugaccgccgucgugauccccacgaagaaggccgggggcaccaccgagaugcucgcgaaggcccugcgcaaggugccgaccgacaacuacaucacgaccuaccccgggcagggccugaacggguacaccgucgaggaggccaagaccgugcucaagaagugcaaguccgccuucuacauccugcccagcaucaucuccaacgagaagcaggagauccugggcaccgugagcuggaaccuccgggagaugcuggcgcacgccgaggagacgcgcaagcugaugcccgucugcguggagaccaaggccaucguguccaccauccagcggaaguacaagggcaucaagauccaggagggggucguggacuacggcgcccgcuucuacuucuacaccagcaagacgaccguggccucccugaucaacacccucaacgaccugaacgagacccuggucacgaugccgcucggguacgugacccacggccugaaccuggaggaggcggcccgguacaugcgcagccucaaggugcccgccaccgucuccgugagcucccccgacgccgugaccgccuacaacggguaccugacgagcuccagcaagacccccgaggagcacuucaucgagaccaucucccuggcgggcagcuacaaggacuggagcuacuccggccagagcacccagcucgggaucgaguuccugaagcggggcgacaaguccgucuacuacacgagcaacccgaccaccuuccaccuggacggggaggugaucaccuucgacaaccucaagacgcugcugucccuccgcgaggugcggaccaucaaggucuucaccaccguggacaacaucaaccugcacacgcagguggucgacaugagcaugaccuacggccagcaguucggccccaccuaccuggacggggccgacgugaccaagaucaagccccacaacucccacgagggcaagacguucuacgugcucccgaacgacgacacccugcgcgucgaggccuucgaguacuaccacaccaccgaccccagcuuccuggggcgguacauguccgcccucaaccacacgaagaaguggaaguacccccaggugaacggccugaccagcaucaagugggccgacaacaacugcuaccuggcgaccgcccuccugacccugcagcagaucgagcucaaguucaaccccccggcccugcaggacgccuacuaccgcgcgcgggccggggaggccgccaacuucugcgcccugauccucgcguacugcaacaagacggugggcgagcugggcgacguccgcgagaccauguccuaccuguuccagcacgccaaccucgacagcugcaagcgggugcugaacgucgugugcaagaccugcgggcagcagcagaccacccugaagggcguggaggccgucauguacauggggacgcucuccuacgagcaguucaagaagggcgugcagauccccugcaccugcgggaagcaggccaccaaguaccuggugcagcaggagagccccuucgucaugauguccgcccccccggcgcaguacgagcugaagcacggcaccuucacgugcgccagcgaguacaccggcaacuaccagugcgggcacuacaagcacaucaccuccaaggagacccucuacugcaucgacggcgcccugcugacgaagagcagcgaguacaaggggcccaucaccgacguguucuacaaggagaacuccuacaccaccacgaucaagcccgugaccuacaagcucgacggcgucgugugcaccgagaucgaccccaagcuggacaacuacuacaagaaggacaacagcuacuucaccgagcagccgaucgaccuggugcccaaccagcccuaccccaacgccuccuucgacaacuucaaguucgucugcgacaacaucaaguucgccgacgaccucaaccagcugacgggguacaagaagccggcgagccgcgagcugaaggugaccuucuuccccgaccucaacggcgacguggucgccaucgacuacaagcacuacacccccuccuucaagaagggcgccaagcugcugcacaagcccaucguguggcacgugaacaacgccaccaacaaggcgacguacaagccgaacaccuggugcauccggugccucuggagcaccaagcccgucgagaccuccaacagcuucgacgugcugaaguccgaggacgcccaggggauggacaaccuggccugcgaggaccucaagcccgugagcgaggaggucguggagaaccccacgauccagaaggacgugcuggagugcaacgucaagaccaccgagguggugggcgacaucauccugaagccggccaacaacucccucaagaucaccgaggaggucgggcacacggaccugauggccgcguacguggacaacagcucccugaccaucaagaagcccaacgagcucagccgcgugcugggccugaagacccucgccacccacgggcuggccgccgucaacuccgugcccugggacacgaucgccaacgcgaagccguuccugaacaagguggucagcaccaccaccaacaucgugacgcgcugccucaaccgggugugcaccaacuacaugcccuacuucuucacccugcugcuccagcugugcaccuucacccgcuccacgaacagccggaucaaggccuccaugcccaccaccaucgccaagaacaccgucaagagcgugggcaaguucugccuggaggccagcuucaacuaccucaagucccccaacuucagcaagcugaucaacaucaucaucugguuccugcuccuguccgugugccugggcagccucaucuacuccacggccgcgcuggggguccugaugagcaaccucggcaugccguccuacugcaccggguaccgcgagggcuaccugaacagcaccaacgugaccaucgccacguacugcaccggcuccauccccugcagcgugugccuguccgggcucgacagccuggacaccuaccccucccuggagaccauccagaucacgaucagcuccuucaagugggaccucaccgccuucggccuggucgccgagugguuccuggccuacauccucuucacccgguucuucuacgugcuggggcuggcggccaucaugcagcucuucuucagcuacuucgccgugcacuucaucuccaacagcuggcugauguggcugaucaucaaccugguccagauggcccccaucuccgcgauggugcgcauguacaucuucuucgccagcuucuacuacguguggaagagcuacguccacgugguggacggcugcaacuccagcaccugcaugaugugcuacaagcggaaccgcgccacgcgggucgagugcaccaccaucgugaacgggguccgccgguccuucuacguguacgccaacggcggcaagggguucugcaagcuccacaacuggaacugcgugaacugcgacaccuucugcgccggcagcacguucaucuccgacgaggucgcgcgcgaccugagccugcaguucaagcggccgaucaaccccaccgaccaguccagcuacaucguggacuccgugaccgucaagaacgggagcauccaccucuacuucgacaaggccggccagaagaccuacgagcgccacucccugagccacuucgugaaccuggacaaccuccgggccaacaacacgaaggggucccugcccaucaacgugaucgucuucgacggcaagagcaagugcgaggaguccagcgccaaguccgccagcguguacuacucccagcugaugugccagcccauccuccugcuggaccaggcgcucgugagcgacgucggcgacagcgccgagguggccgugaagauguucgacgccuacgucaacaccuucuccagcaccuucaacgugccgauggagaagcugaagacccugguggccacggcggaggccgagcucgccaagaacgucucccuggacaacgugcugagcaccuucaucuccgccgcgcgccagggguucguggacagcgacgucgagaccaaggacgugguggagugccucaagcugucccaccagagcgacaucgaggucaccggcgacuccugcaacaacuacaugcugacguacaacaagguggagaacaugaccccccgggaccucggggccugcaucgacugcagcgcccgccacaucaacgcccagguggccaagucccacaacaucgcgcugaucuggaacgucaaggacuucaugagccuguccgagcagcuccggaagcagauccgcagcgccgccaagaagaacaaccugcccuucaagcugaccugcgccaccacgcgccagguggugaacgucgugaccaccaagaucgcccucaagggcgggaagugaggacuagucccuguucccagagcccacuuuuuuuucuuuuuuugaaauaaaauagccugucuuucagaucucaaaggcucuuuucagagccaccaaaaaaaaaaaaaaaaaaaaaaaaaaaaaaaaaaaaaaaaaaaaaaaaaaaaaaaaaaaaaaaaaaaaaaaaaaaaaaaaaaaaaaaaaaaaaaaaaaaaa

SEQ ID NO: 19520 - RNA, 6113 nt, Artificial Sequence
  SARS-CoV-2__MT913152.1__non-structural protein 3 (NSP3) mRNA gc
aggagagucccgcagucggcguccagcggcucugcuuguucgugugugugucguugcaggccuuauucaagcuuaccauggcccccaccaaggugaccuucggcgacgacacggucaucgaggugcagggguacaagagcgugaacaucaccuucgagcuggacgagcgcaucgacaagguccucaacgagaagugcuccgccuacaccguggagcugggcaccgaggugaacgaguucgcgugcgucguggccgacgccgugaucaagacgcugcagccggucagcgagcuccugaccccccuggggaucgaccucgacgagugguccauggccaccuacuaccuguucgacgagagcggcgaguucaagcuggccucccacauguacugcagcuucuacccccccgacgaggacgaggaggagggggacugcgaggaggaggaguucgagccguccacccaguacgaguacggcacggaggacgacuaccagggcaagccccucgaguucggggcgaccagcgccgcccugcagcccgaggaggagcaggaggaggacuggcuggacgacgacucccagcagaccgugggccagcaggacgggagcgaggacaaccagaccacgaccauccagaccaucguggagguccagccccagcucgagauggagcugaccccgguggugcagacgaucgaggucaacuccuucagcggcuaccugaagcucaccgacaacguguacaucaagaacgccgacaucguggaggaggcgaagaaggucaagcccaccgugguggucaacgccgccaacguguaccugaagcacgggggcggcguggccggggcccugaacaaggcgaccaacaacgccaugcaggucgaguccgacgacuacaucgccacgaacggcccccucaagguggggggcagcugcguccuguccggccacaaccuggccaagcacugccuccacgugguggggcccaacgucaacaagggcgaggacauccagcugcugaagagcgccuacgagaacuucaaccagcacgaggugcuccuggcgccgcugcucuccgccgggaucuucggcgccgaccccauccacagccugcgggugugcgucgacaccgugcgcaccaacguguaccuggccgucuucgacaagaaccucuacgacaagcugguguccagcuuccuggagaugaagagcgagaagcagguggagcagaagaucgccgagauccccaaggaggaggucaagcccuucaucaccgaguccaagccgagcguggagcagcggaagcaggacgacaagaagaucaaggcgugcguggaggaggucacgaccacccucgaggagaccaaguuccugacggagaaccugcuccuguacaucgacaucaacgggaaccugcaccccgacuccgccacccucgugagcgacaucgacaucaccuuccugaagaaggacgcccccuacaucgugggcgacgucgugcaggagggcgugcugaccgccgucgugauccccacgaagaaggccgggggcaccaccgagaugcucgcgaaggcccugcgcaaggugccgaccgacaacuacaucacgaccuaccccgggcagggccugaacggguacaccgucgaggaggccaagaccgugcucaagaagugcaaguccgccuucuacauccugcccagcaucaucuccaacgagaagcaggagauccugggcaccgugagcuggaaccuccgggagaugcuggcgcacgccgaggagacgcgcaagcugaugcccgucugcguggagaccaaggccaucguguccaccauccagcggaaguacaagggcaucaagauccaggagggggucguggacuacggcgcccgcuucuacuucuacaccagcaagacgaccguggccucccugaucaacacccucaacgaccugaacgagacccuggucacgaugccgcucggguacgugacccacggccugaaccuggaggaggcggcccgguacaugcgcagccucaaggugcccgccaccgucuccgugagcucccccgacgccgugaccgccuacaacggguaccugacgagcuccagcaagacccccgaggagcacuucaucgagaccaucucccuggcgggcagcuacaaggacuggagcuacuccggccagagcacccagcucgggaucgaguuccugaagcggggcgacaaguccgucuacuacacgagcaacccgaccaccuuccaccuggacggggaggugaucaccuucgacaaccucaagacgcugcugucccuccgcgaggugcggaccaucaaggucuucaccaccguggacaacaucaaccugcacacgcagguggucgacaugagcaugaccuacggccagcaguucggccccaccuaccuggacggggccgacgugaccaagaucaagccccacaacucccacgagggcaagacguucuacgugcucccgaacgacgacacccugcgcgucgaggccuucgaguacuaccacaccaccgaccccagcuuccuggggcgguacauguccgcccucaaccacacgaagaaguggaaguacccccaggugaacggccugaccagcaucaagugggccgacaacaacugcuaccuggcgaccgcccuccugacccugcagcagaucgagcucaaguucaaccccccggcccugcaggacgccuacuaccgcgcgcgggccggggaggccgccaacuucugcgcccugauccucgcguacugcaacaagacggugggcgagcugggcgacguccgcgagaccauguccuaccuguuccagcacgccaaccucgacagcugcaagcgggugcugaacgucgugugcaagaccugcgggcagcagcagaccacccugaagggcguggaggccgucauguacauggggacgcucuccuacgagcaguucaagaagggcgugcagauccccugcaccugcgggaagcaggccaccaaguaccuggugcagcaggagagccccuucgucaugauguccgcccccccggcgcaguacgagcugaagcacggcaccuucacgugcgccagcgaguacaccggcaacuaccagugcgggcacuacaagcacaucaccuccaaggagacccucuacugcaucgacggcgcccugcugacgaagagcagcgaguacaaggggcccaucaccgacguguucuacaaggagaacuccuacaccaccacgaucaagcccgugaccuacaagcucgacggcgucgugugcaccgagaucgaccccaagcuggacaacuacuacaagaaggacaacagcuacuucaccgagcagccgaucgaccuggugcccaaccagcccuaccccaacgccuccuucgacaacuucaaguucgucugcgacaacaucaaguucgccgacgaccucaaccagcugacgggguacaagaagccggcgagccgcgagcugaaggugaccuucuuccccgaccucaacggcgacguggucgccaucgacuacaagcacuacacccccuccuucaagaagggcgccaagcugcugcacaagcccaucguguggcacgugaacaacgccaccaacaaggcgacguacaagccgaacaccuggugcauccggugccucuggagcaccaagcccgucgagaccuccaacagcuucgacgugcugaaguccgaggacgcccaggggauggacaaccuggccugcgaggaccucaagcccgugagcgaggaggucguggagaaccccacgauccagaaggacgugcuggagugcaacgucaagaccaccgagguggugggcgacaucauccugaagccggccaacaacucccucaagaucaccgaggaggucgggcacaucgaccugauggccgcguacguggacaacagcucccugacgaucaagaagcccaacgagcucagccgcgugcugggccugaagacccucgccacccacgggcuggccgccgucaacuccgugcccugggacaccaucgccaacuacgcgaagccguuccugaacaagguggucagcacgaccaccaacaucgugacccgcugccucaaccgggugugcacgaacuacaugcccuacuucuucacccugcugcuccagcugugcaccuucacccgcuccaccaacagccggaucaaggccuccaugcccacgaccaucgccaagaacaccgucaagagcgugggcaaguucugccuggaggccagcuucaacuaccucaagucccccaacuucagcaagcugaucaacaucaucaucugguuccugcuccuguccgugugccugggcagccucaucuacuccaccgccgcgcuggggguccugaugagcaaccucggcaugccguccuacugcacgggguaccgcgagggcuaccugaacagcaccaacgugaccaucgccaccuacugcacgggcuccauccccugcagcgugugccuguccgggcucgacagccuggacaccuaccccucccuggagaccauccagaucaccaucagcuccuucaagugggaccucacggccuucggccuggucgccgagugguuccuggccuacauccucuucacccgguucuucuacgugcuggggcuggcggccaucaugcagcucuucuucagcuacuucgccgugcacuucaucuccaacagcuggcugauguggcugaucaucaaccugguccagauggcccccaucuccgcgauggugcgcauguacaucuucuucgccagcuucuacuacguguggaagagcuacguccacgugguggacggcugcaacuccagcaccugcaugaugugcugcaagcggaaccgcgccacccgggucgagugcacgaccaucgugaacgggguccgccgguccuucuacguguacgccaacggcggcaagggguucugcaagcuccacaacuggaacugcgugaacugcgacaccuucugcgccggcagcaccuucaucuccgacgaggucgcgcgcgaccugagccugcaguucaagcggccgaucaaccccacggaccaguccagcuacaucguggacuccgugaccgucaagaacgggagcauccaccucuacuucgacaaggccggccagaagaccuacgagcgccacucccugagccacuucgugaaccuggacaaccuccgggccaacaacaccaaggggucccugcccaucaacgugaucgucuucgacggcaagagcaagugcgaggaguccagcgccaaguccgccagcguguacuacucccagcugaugugccagcccauccuccugcuggaccaggcgcucgugagcgacgucggcgacagcgccgagguggccgugaagauguucgacgccuacgucaacacguucuccagcaccuucaacgugccgauggagaagcugaagacccugguggccaccgcggaggccgagcucgccaagaacgucucccuggacaacgugcugagcacguucaucuccgccgcgcgccagggguucguggacagcgacgucgagaccaaggacgugguggagugccucaagcugucccaccagagcgacaucgaggucaccggcgacuccugcaacaacuacaugcugaccuacaacaagguggagaacaugacgccccgggaccucggggccugcaucgacugcagcgcccgccacaucaacgcccagguggccaagucccacaacaucgcgcugaucuggaacgucaaggacuucaugagccuguccgagcagcuccggaagcagauccgcagcgccgccaagaagaacaaccugcccuucaagcugaccugcgccaccacccgccagguggugaacgucgugacgaccaagaucgcccucaagggcgggugaggacuagucccuguucccagagcccacuuuuuuuucuuuuuuugaaauaaaauagccugucuuucagaucucaaaggcucuuuucagagccaccaaaaaaaaaaaaaaaaaaaaaaaaaaaaaaaaaaaaaaaaaaaaaaaaaaaaaaaaaaaaaaaaaaaaaaaaaaaaaaaaaaaaaaaaaaaaaaaaaaaaa

SEQ ID NO: 19521 - RNA, 6113 nt, Artificial Sequence
  SARS-CoV-2__MT907517.1__non-structural protein 3 (NSP3) mRNA gc
aggagagucccgcagucggcguccagcggcucugcuuguucgugugugugucguugcaggccuuauucaagcuuaccauggcccccaccaaggugaccuucggcgacgacacggucaucgaggugcagggguacaagagcgugaacaucaccuucgagcuggacgagcgcaucgacaagguccucaacgagaagugcuccgccuacaccguggagcugggcaccgaggugaacgaguucgcgugcgucguggccgacgccgugaucaagacgcugcagccggucagcgagcuccugaccccccuggggaucgaccucgacgagugguccauggccaccuacuaccuguucgacgagagcggcgaguucaagcuggccucccacauguacugcagcuucuacccccccgacgaggacgaggaggagggggacugcgaggaggaggaguucgagccguccacccaguacgaguacggcacggaggacgacuaccagggcaagccccucgaguucggggcgaccagcgccgcccugcagcccgaggaggagcaggaggaggacuggcuggacgacgacucccagcagaccgugggccagcaggacgggagcgaggacaaccagaccacgaccauccagaccaucguggagguccagccccagcucgagauggagcugaccccgguggugcagacgaucgaggucaacuccuucagcggcuaccugaagcucaccgacaacguguacaucaagaacgccgacaucguggaggaggcgaagaaggucaagcccaccgugguggucaacgccgccaacguguaccugaagcacgggggcggcguggccggggcccugaacaaggcgaccaacaacgccaugcaggucgaguccgacgacuacaucgccacgaacggcccccucaagguggggggcagcugcguccuguccggccacaaccuggccaagcacugccuccacgugguggggcccaacgucaacaagggcgaggacauccagcugcugaagagcgccuacgagaacuucaaccagcacgaggugcuccuggcgccgcugcucuccgccgggaucuucggcgccgaccccauccacagccugcgggugugcgucgacaccgugcgcaccaacguguaccuggccgucuucgacaagaaccucuacgacaagcugguguccagcuuccuggagaugaagagcgagaagcagguggagcagaagaucgccgagauccccaaggaggaggucaagcccuucaucaccgaguccaagccgagcguggagcagcggaagcaggacgacaagaagaucaaggcgugcguggaggaggucacgaccacccucgaggagaccaaguuccugacggagaaccugcuccuguacaucgacaucaacgggaaccugcaccccgacuccgccacccucgugagcgacaucgacaucaccuuccugaagaaggacgcccccuacaucgugggcgacgucgugcaggagggcgugcugaccgccgucgugauccccacgaagaaggccgggggcaccaccgagaugcucgcgaaggcccugcgcaaggugccgaccgacaacuacaucacgaccuaccccgggcagggccugaacggguacaccgucgaggaggccaagaccgugcucaagaagugcaaguccgccuucuacauccugcccagcaucaucuccaacgagaagcaggagauccugggcaccgugagcuggaaccuccgggagaugcuggcgcacgccgaggagacgcgcaagcugaugcccgucugcguggagaccaaggccaucguguccaccauccagcggaaguacaagggcaucaagauccaggagggggucguggacuacggcgcccgcuucuacuucuacaccagcaagacgaccguggccucccugaucaacacccucaacgaccugaacgagacccuggucacgaugccgcucggguacgugacccacggccugaaccuggaggaggcggcccgguacaugcgcagccucaaggugcccgccaccgucuccgugagcucccccgacgccgugaccgccuacaacggguaccugacgagcuccagcaagacccccgaggagcacuucaucgagaccaucucccuggcgggcagcuacaaggacuggagcuacuccggccagagcacccagcucgggaucgaguuccugaagcggggcgacaaguccgucuacuacacgagcaacccgaccaccuuccaccuggacggggaggugaucaccuucgacaaccucaagacgcugcugucccuccgcgaggugcggaccaucaaggucuucaccaccguggacaacaucaaccugcacacgcagguggucgacaugagcaugaccuacggccagcaguucggccccaccuaccuggacggggccgacgugaccaagaucaagccccacaacucccacgagggcaagacguucuacgugcucccgaacgacgacacccugcgcgucgaggccuucgaguacuaccacaccaccgaccccagcuuccuggggcgguacauguccgcccucaaccacacgaagaaguggaaguacccccaggugaacggccugaccagcaucaagugggccgacaacaacugcuaccuggcgaccgcccuccugacccugcagcagaucgagcucaaguucaaccccccggcccugcaggacgccuacuaccgcgcgcgggccggggaggccgccaacuucugcgcccugauccucgcguacugcaacaagacggugggcgagcugggcgacguccgcgagaccauguccuaccuguuccagcacgccaaccucgacagcugcaagcgggugcugaacgucgugugcaagaccugcgggcagcagcagaccacccugaagggcguggaggccgucauguacauggggacgcucuccuacgagcaguucaagaagggcgugcagauccccugcaccugcgggaagcaggccaccaaguaccuggugcagcaggagagccccuucgucaugauguccgcccccccggcgcaguacgagcugaagcacggcaccuucacgugcgccagcgaguacaccggcaacuaccagugcgggcacuacaagcacaucaccuccaaggagacccucuacugcaucgacggcgcccugcugacgaagagcagcgaguacaaggggcccaucaccgacguguucuacaaggagaacuccuacaccaccacgaucaagcccgugaccuacaagcucgacggcgucgugugcaccgagaucgaccccaagcuggacaacuacuacaagaaggacaacagcuacuucaccgagcagccgaucgaccuggugcccaaccagcccuaccccaacgccuccuucgacaacuucaaguucgucugcgacaacaucaaguucgccgacgaccucaaccagcugacgggguacaagaagccggcgagccgcgagcugaaggugaccuucuuccccgaccucaacggcgacguggucgccaucgacuacaagcacuacacccccuccuucaagaagggcgccaagcugcugcacaagcccaucguguggcacgugaacaacgccaccaacaaggcgacguacaagccgaacaccuggugcauccggugccucuggagcaccaagcccgucgagaccuccaacagcuucgacgugcugaaguccgaggacgcccaggggauggacaaccuggccugcgaggaccucaagcccgugagcgaggaggucguggagaaccccacgauccagaaggacgugcuggagugcaacgucaagaccaccgagguggugggcgacaucauccugaagccggccaacaacucccucaagaucaccgaggaggucgggcacacggaccugauggccgcguacguggacaacagcucccugaccaucaagaagcccaacgagcucagccgcgugcugggccugaagacccucgccacccacgggcuggccgccgucaacuccgugcccugggacacgaucgccaacuacgcgaagccguuccugaacaagguggucagcaccaccaccaacaucgugacgcgcugccucaaccgggugugcaccaacuacaugcccuacuucuucacccugcugcuccagcugugcaccuucacccgcuccacgaacagccggaucaaggccuccaugcccaccaccaucgccaagaacaccgucaagagcgugggcaaguucugccuggaggccagcuucaacuaccucaagucccccaacuucagcaagcugaucaacaucaucaucugguuccugcuccuguccgugugccugggcagccucaucuacuccacggccgcgcuggggguccugaugagcaaccucggcaugccguccuacugcaccggguaccgcgagggcuaccugaacagcaccaacgugaccaucgccacguacugcaccggcuccauccccugcagcgugugccuguccgggcucgacagccuggacaccuaccccucccuggagaccauccagaucacgaucagcuccuucaagugggaccucaccgccuucggccuggucgccgagugguuccuggccuacauccucuucacccgguucuucuacgugcuggggcuggcggccaucaugcagcucuucuucagcuacuucgccgugcacuucaucuccaacagcuggcugauguggcugaucaucaaccugguccagauggcccccaucuccgcgauggugcgcauguacaucuucuucgccagcuucuacuacguguggaagagcuacguccacgugguggacggcugcaacuccagcaccugcaugaugugcuacaagcggaaccgcgccacgcgggucgagugcaccaccaucgugaacgggguccgccgguccuucuacguguacgccaacggcggcaagggguucugcaagcuccacaacuggaacugcgugaacugcgacaccuucugcgccggcagcacguucaucuccgacgaggucgcgcgcgaccugagccugcaguucaagcggccgaucaaccccaccgaccaguccagcuacaucguggacuccgugaccgucaagaacgggagcauccaccucuacuucgacaaggccggccagaagaccuacgagcgccacucccugagccacuucgugaaccuggacaaccuccgggccaacaacacgaaggggucccugcccaucaacgugaucgucuucgacggcaagagcaagugcgaggaguccagcgccaaguccgccagcguguacuacucccagcugaugugccagcccauccuccugcuggaccaggcgcucgugagcgacgucggcgacagcgccgagguggccgugaagauguucgacgccuacgucaacaccuucuccagcaccuucaacgugccgauggagaagcugaagacccugguggccacggcggaggccgagcucgccaagaacgucucccuggacaacgugcugagcaccuucaucuccgccgcgcgccagggguucguggacagcgacgucgagaccaaggacgugguggagugccucaagcugucccaccagagcgacaucgaggucaccggcgacuccugcaacaacuacaugcugacguacaacaagguggagaacaugaccccccgggaccucggggcccgcaucgacugcagcgcccggcacaucaacgcccagguggccaagucccacaacaucgcgcugaucuggaacgucaaggacuucaugagccuguccgagcagcuccgcaagcagauccgcagcgccgccaagaagaacaaccugcccuucaagcugaccugcgccaccacgcggcagguggugaacgucgugaccaccaagaucgcccucaagggcgggugaggacuagucccuguucccagagcccacuuuuuuuucuuuuuuugaaauaaaauagccugucuuucagaucucaaaggcucuuuucagagccaccaaaaaaaaaaaaaaaaaaaaaaaaaaaaaaaaaaaaaaaaaaaaaaaaaaaaaaaaaaaaaaaaaaaaaaaaaaaaaaaaaaaaaaaaaaaaaaaaaaaaa

SEQ ID NO: 19522 - RNA, 6113 nt, Artificial Sequence
  SARS-CoV-2__MT911561.1__non-structural protein 3 (NSP3) mRNA gc
aggagagucccgcagucggcguccagcggcucugcuuguucgugugugugucguugcaggccuuauucaagcuuaccauggcccccaccaaggugaccuucggcgacgacacggucaucgaggugcagggguacaagagcgugaacaucaccuucgagcuggacgagcgcaucgacaagguccucaacgagaagugcuccgccuacaccguggagcugggcaccgaggugaacgaguucgcgugcgucguggccgacgccgugaucaagacgcugcagccggucagcgagcuccugaccccccuggggaucgaccucgacgagugguccauggccaccuacuaccuguucgacgagagcggcgaguucaagcuggccucccacauguacugcagcuucuacccccccgacgaggacgaggaggagggggacugcgaggaggaggaguucgagccguccacccaguacgaguacggcacggaggacgacuaccagggcaagccccucgaguucggggcgaccagcgccgcccugcagcccgaggaggagcaggaggaggacuggcuggacgacgacucccagcagaccgugggccagcaggacgggagcgaggacaaccagaccacgaccauccagaccaucguggagguccagccccagcucgagauggagcugaccccgguggugcagacgaucgaggucaacuccuucagcggcuaccugaagcucaccgacaacguguacaucaagaacgccgacaucguggaggaggcgaagaaggucaagcccaccgugguggucaacgccgccaacguguaccugaagcacgggggcggcguggccggggcccugaacaaggcgaccaacaacgccaugcaggucgaguccgacgacuacaucgccacgaacggcccccucaagguggggggcagcugcguccuguccggccacaaccuggccaagcacugccuccacgugguggggcccaacgucaacaagggcgaggacauccagcugcugaagagcgccuacgagaacuucaaccagcacgaggugcuccuggcgccgcugcucuccgccgggaucuucggcgccgaccccauccacagccugcgggugugcgucgacaccgugcgcaccaacguguaccuggccgucuucgacaagaaccucuacgacaagcugguguccagcuuccuggagaugaagagcgagaagcagguggagcagaagaucgccgagauccccaaggaggaggucaagcccuucaucaccgaguccaagccgagcguggagcagcggaagcaggacgacaagaagaucaaggcgugcguggaggaggucacgaccacccucgaggagaccaaguuccugacggagaaccugcuccuguacaucgacaucaacgggaaccugcaccccgacuccgccacccucgugagcgacaucgacaucaccuuccugaagaaggacgcccccuacaucgugggcgacgucgugcaggagggcgugcugaccgccgucgugauccccacgaagaaggccgggggcaccaccgagaugcucgcgaaggcccugcgcaaggugccgaccgacaacuacaucacgaccuaccccgggcagggccugaacggguacaccgucgaggaggccaagaccgugcucaagaagugcaaguccgccuucuacauccugcccagcaucaucuccaacgagaagcaggagauccugggcaccgugagcuggaaccuccgggagaugcuggcgcacgccgaggagacgcgcaagcugaugcccgucugcguggagaccaaggccaucguguccaccauccagcggaaguacaagggcaucaagauccaggagggggucguggacuacggcgcccgcuucuacuucuacaccagcaagacgaccguggccucccugaucaacacccucaacgaccugaacgagacccuggucacgaugccgcucggguacgugacccacggccugaaccuggaggaggcggcccgguacaugcgcagccucaaggugcccgccaccgucuccgugagcucccccgacgccgugaccgccuacaacggguaccugacgagcuccagcaagacccccgaggagcacuucaucgagaccaucucccuggcgggcagcuacaaggacuggagcuacuccggccagagcacccagcucgggaucgaguuccugaagcggggcgacaaguccgucuacuacacgagcaacccgaccaccuuccaccuggacggggaggugaucaccuucgacaaccucaagacgcugcugucccuccgcgaggugcggaccaucaaggucuucaccaccguggacaacaucaaccugcacacgcagguggucgacaugagcaugaccuacggccagcaguucggccccaccuaccuggacggggccgacgugaccaagaucaagccccacaacucccacgagggcaagacguucuacgugcucccgaacgacgacacccugcgcgucgaggccuucgaguacuaccacaccaccgaccccagcuuccuggggcgguacauguccgcccucaaccacacgaagaaguggaaguacccccaggugaacggccugaccagcaucaagugggccgacaacaacugcuaccuggcgaccgcccuccugacccugcagcagaucgagcucaaguucaaccccccggcccugcaggacgccuacuaccgcgcgcgggccggggaggccgccaacuucugcgcccugauccucgcguacugcaacaagacggugggcgagcugggcgacguccgcgagaccauguccuaccuguuccagcacgccaaccucgacagcugcaagcgggugcugaacgucgugugcaagaccugcgggcagcagcagaccacccugaagggcguggaggccgucauguacauggggacgcucuccuacgagcaguucaagaagggcgugcagauccccugcaccugcgggaagcaggccaccaaguaccuggugcagcaggagagccccuucgucaugauguccgcccccccggcgcaguacgagcugaagcacggcaccuucacgugcgccagcgaguacaccggcaacuaccagugcgggcacuacaagcacaucaccuccaaggagacccucuacugcaucgacggcgcccugcugacgaagagcagcgaguacaaggggcccaucaccgacguguucuacaaggagaacuccuacaccaccacgaucaagcccgugaccuacaagcucgacggcgucgugugcaccgagaucgaccccaagcuggacaacuacuacaagaaggacaacagcuacuucaccgagcagccgaucgaccuggugcccaaccagcccuaccccaacgccuccuucgacaacuucacguucgucugcgacaacaucaaguucgccgacgaccucaaccagcugaccggguacaagaagccggcgagccgcgagcugaaggugaccuucuuccccgaccucaacggcgacguggucgccaucgacuacaagcacuacacccccuccuucaagaagggcgccaagcugcugcacaagcccaucguguggcacgugaacaacgccacgaacaaggcgaccuacaagccgaacaccuggugcauccggugccucuggagcaccaagcccgucgagacguccaacagcuucgacgugcugaaguccgaggacgcccaggggauggacaaccuggccugcgaggaccucaagcccgugagcgaggaggucguggagaaccccaccauccagaaggacgugcuggagugcaacgucaagaccaccgagguggugggcgacaucauccugaagccggccaacaacucccucaagaucacggaggaggucgggcacaccgaccugauggccgcguacguggacaacagcucccugaccaucaagaagcccaacgagcucagccgcgugcugggccugaagacccucgccacgcacgggcuggccgccgucaacuccgugcccugggacaccaucgccaacuacgcgaagccguuccugaacaagguggucagcaccaccacgaacaucgugacccgcugccucaaccgggugugcaccaacuacaugcccuacuucuucacccugcugcuccagcugugcaccuucacgcgcuccaccaacagccggaucaaggccuccaugcccaccaccaucgccaagaacacggucaagagcgugggcaaguucugccuggaggccagcuucaacuaccucaagucccccaacuucagcaagcugaucaacaucaucaucugguuccugcuccuguccgugugccugggcagccucaucuacuccaccgccgcgcuggggguccugaugagcaaccucggcaugccguccuacugcaccggguaccgcgagggcuaccugaacagcaccaacgugacgaucgccaccuacugcaccggcuccauccccugcagcgugugccuguccgggcucgacagccuggacaccuaccccucccuggagacgauccagaucaccaucagcuccuucaagugggaccucaccgccuucggccuggucgccgagugguuccuggccuacauccucuucacccgguucuucuacgugcuggggcuggcggccaucaugcagcucuucuucagcuacuucgccgugcacuucaucuccaacagcuggcugauguggcugaucaucaaccugguccagauggcccccaucuccgcgauggugcgcauguacaucuucuucgccagcuucuacuacguguggaagagcuacguccacgugguggacggcugcaacuccagcacgugcaugaugugcuacaagcggaaccgcgccacccgggucgagugcaccaccaucgugaacgggguccgccgguccuucuacguguacgccaacggcggcaagggguucugcaagcuccacaacuggaacugcgugaacugcgacacguucugcgccggcagcaccuucaucuccgacgaggucgcgcgcgaccugagccugcaguucaagcggccgaucaaccccaccgaccaguccagcuacaucguggacuccgugaccgucaagaacgggagcauccaccucuacuucgacaaggccggccagaagacguacgagcgccacucccugagccacuucgugaaccuggacaaccuccgggccaacaacaccaaggggucccugcccaucaacgugaucgucuucgacggcaagagcaagugcgaggaguccagcgccaaguccgccagcguguacuacucccagcugaugugccagcccauccuccugcuggaccaggcgcucgugagcgacgucggcgacagcgccgagguggccgugaagauguucgacgccuacgucaacaccuucuccagcaccuucaacgugccgauggagaagcugaagacgcugguggccaccgcggaggccgagcucgccaagaacgucucccuggacaacgugcugagcaccuucaucuccgccgcgcgccagggguucguggacagcgacgucgagaccaaggacgugguggagugccucaagcugucccaccagagcgacaucgaggucacgggcgacuccugcaacaacuacaugcugaccuacaacaagguggagaacaugaccccccgggaccucggggccugcaucgacugcagcgcccgccacaucaacgcccagguggccaagucccacaacaucgcgcugaucuggaacgucaaggacuucaugagccuguccgagcagcuccggaagcagauccgcagcgccgccaagaagaacaaccugcccuucaagcugaccugcgccacgacccgccagguggugaacgucgugaccaccaagaucgcccucaagggcgggugaggacuagucccuguucccagagcccacuuuuuuuucuuuuuuugaaauaaaauagccugucuuucagaucucaaaggcucuuuucagagccaccaaaaaaaaaaaaaaaaaaaaaaaaaaaaaaaaaaaaaaaaaaaaaaaaaaaaaaaaaaaaaaaaaaaaaaaaaaaaaaaaaaaaaaaaaaaaaaaaaaaaa

SEQ ID NO: 19523 - RNA, 6113 nt, Artificial Sequence
  SARS-CoV-2__MT911803.1__non-structural protein 3 (NSP3) mRNA gc
aggagagucccgcagucggcguccagcggcucugcuuguucgugugugugucguugcaggccuuauucaagcuuaccauggcccccaccaaggugaccuucggcgacgacacggucaucgaggugcagggguacaagagcgugaacaucaccuucgagcuggacgagcgcaucgacaagguccucaacgagaagugcuccgccuacaccguggagcugggcaccgaggugaacgaguucgcgugcgucguggccgacgccgugaucaagacgcugcagccggucagcgagcuccugaccccccuggggaucgaccucgacgagugguccauggccaccuacuaccuguucgacgagagcggcgaguucaagcuggccucccacauguacugcagcuucuacccccccgacgaggacgaggaggagggggacugcgaggaggaggaguucgagccguccacccaguacgaguacggcacggaggacgacuaccagggcaagccccucgaguucggggcgaccagcgccgcccugcagcccgaggaggagcaggaggaggacuggcuggacgacgacucccagcagaccgugggccagcaggacgggagcgaggacaaccagaccacgaccauccagaccaucguggagguccagccccagcucgagauggagcugaccccgguggugcagacgaucgaggucaacuccuucagcggcuaccugaagcucaccgacaacguguacaucaagaacgccgacaucguggaggaggcgaagaaggucaagcccaccgugguggucaacgccgccaacguguaccugaagcacgggggcggcguggccggggcccugaacaaggcgaccaacaacgccaugcaggucgaguccgacgacuacaucgccacgaacggcccccucaagguggggggcagcugcguccuguccggccacaaccuggccaagcacugccuccacgugguggggcccaacgucaacaagggcgaggacauccagcugcugaagagcgccuacgagaacuucaaccagcacgaggugcuccuggcgccgcugcucuccgccgggaucuucggcgccgaccccauccacagccugcgggugugcgucgacaccgugcgcaccaacguguaccuggccgucuucgacaagaaccucuacgacaagcugguguccagcuuccuggagaugaagagcgagaagcagguggagcagaagaucgccgagauccccaaggaggaggucaagcccuucaucaccgaguccaagccgagcguggagcagcggaagcaggacgacaagaagaucaaggcgugcguggaggaggucacgaccacccucgaggagaccaaguuccugacggagaaccugcuccuguacaucgacaucaacgggaaccugcaccccgacuccgccacccucgugagcgacaucgacaucaccuuccugaagaaggacgcccccuacaucgugggcgacgucgugcaggagggcgugcugaccgccgucgugauccccacgaagaaggccgggggcaccaccgagaugcucgcgaaggcccugcgcaaggugccgaccgacaacuacaucacgaccuaccccgggcagggccugaacggguacaccgucgaggaggccaagaccgugcucaagaagugcaaguccgccuucuacauccugcccagcaucaucuccaacgagaagcaggagauccugggcaccgugagcuggaaccuccgggagaugcuggcgcacgccgaggagacgcgcaagcugaugcccgucugcguggagaccaaggccaucguguccaccauccagcggaaguacaagggcaucaagauccaggagggggucguggacuacggcgcccgcuucuacuucuacaccagcaagacgaccguggccucccugaucaacacccucaacgaccugaacgagacccuggucacgaugccgcucggguacgugacccacggccugaaccuggaggaggcggcccgguacaugcgcagccucaaggugcccgccaccgucuccgugagcucccccgacgccgugaccgccuacaacggguaccugacgagcuccagcaagacccccgaggagcacuucaucgagaccaucucccuggcgggcagcuacaaggacuggagcuacuccggccagagcacccagcucgggaucgaguuccugaagcggggcgacaaguccgucuacuacacgagcaacccgaccaccuuccaccuggacggggaggugaucaccuucgacaaccucaagacgcugcugucccuccgcgaggugcggaccaucaaggucuucaccaccguggacaacaucaaccugcacacgcagguggucgacaugagcaugaccuacggccagcaguucggccccaccuaccuggacggggccgacgugaccaagaucaagccccacaacucccacgagggcaagacguucuacgugcucccgaacgacgacacccugcgcgucgaggccuucgaguacuaccacaccaccgaccccagcuuccuggggcgguacauguccgcccucaaccacacgaagaaguggaaguacccccaggugaacggccugaccagcaucaagugggccgacaacaacugcuaccuggcgaccgcccuccugacccugcagcagaucgagcucaaguucaaccccccggcccugcaggacgccuacuaccgcgcgcgggccggggaggccgccaacuucugcgcccugauccucgcguacugcaacaagacggugggcgagcugggcgacguccgcgagaccauguccuaccuguuccagcacgccaaccucgacagcugcaagcgggugcugaacgucgugugcaagaccugcgggcagcagcgcaccacccugaagggcguggaggccgucauguacauggggacgcucuccuacgagcaguucaagaagggcgugcagauccccugcaccugcgggaagcaggccaccaaguaccuggugcagcaggagagccccuucgucaugauguccgcccccccggcgcaguacgagcugaagcacggcaccuucacgugcgccagcgaguacaccggcaacuaccagugcgggcacuacaagcacaucaccuccaaggagacccucuacugcaucgacggcgcccugcugacgaagagcagcgaguacaaggggcccaucaccgacguguucuacaaggagaacuccuacaccaccacgaucaagcccgugaccuacaagcucgacggcgucgugugcaccgagaucgaccccaagcuggacaacuacuacaagaaggacaacagcuacuucaccgagcagccgaucgaccuggugcccaaccagcccuaccccaacgccuccuucgacaacuucaaguucgucugcgacaacaucaaguucgccgacgaccucaaccagcugacgggguacaagaagccggcgagccgggagcugaaggugaccuucuuccccgaccucaacggcgacguggucgccaucgacuacaagcacuacacccccuccuucaagaagggcgccaagcugcugcacaagcccaucguguggcacgugaacaacgccaccaacaaggcgacguacaagccgaacaccuggugcauccgcugccucuggagcaccaagcccgucgagaccuccaacagcuucgacgugcugaaguccgaggacgcccaggggauggacaaccuggccugcgaggaccucaagcccgugagcgaggaggucguggagaaccccacgauccagaaggacgugcuggagugcaacgucaagaccaccgagguggugggcgacaucauccugaagccggccaacaacucccucaagaucaccgaggaggucgggcacacggaccugauggccgcguacguggacaacagcucccugaccaucaagaagcccaacgagcucagccgcgugcugggccugaagacccucgccacccacgggcuggccgccgucaacuccgugcccugggacacgaucgccaacuacgcgaagccguuccugaacaagguggucagcaccaccaccaacaucgugacgcggugccucaaccgcgugugcaccaacuacaugcccuacuucuucacccugcugcuccagcugugcaccuucacccgguccacgaacagccgcaucaaggccuccaugcccaccaccaucgccaagaacaccgucaagagcgugggcaaguucugccuggaggccagcuucaacuaccucaagucccccaacuucagcaagcugaucaacaucaucaucugguuccugcuccuguccgugugccugggcagccucaucuacuccacggccgcgcuggggguccugaugagcaaccucggcaugccguccuacugcaccggguaccgggagggcuaccugaacagcaccaacgugaccaucgccacguacugcaccggcuccauccccugcagcgugugccuguccgggcucgacagccuggacaccuaccccucccuggagaccauccagaucacgaucagcuccuucaagugggaccucaccgccuucggccuggucgccgagugguuccuggccuacauccucuucacccgcuucuucuacgugcuggggcuggcggccaucaugcagcucuucuucagcuacuucgccgugcacuucaucuccaacagcuggcugauguggcugaucaucaaccugguccagauggcccccaucuccgcgauggugcggauguacaucuucuucgccagcuucuacuacguguggaagagcuacguccacgugguggacggcugcaacuccagcaccugcaugaugugcuacaagcgcaaccgggccacgcgcgucgagugcaccaccaucgugaacgggguccggcgcuccuucuacguguacgccaacggcggcaagggguucugcaagcuccacaacuggaacugcgugaacugcgacaccuucugcgccggcagcacguucaucuccgacgaggucgcgcgggaccugagccugcaguucaagcgcccgaucaaccccaccgaccaguccagcuacaucguggacuccgugaccgucaagaacgggagcauccaccucuacuucgacaaggccggccagaagaccuacgagcggcacucccugagccacuucgugaaccuggacaaccuccgcgccaacaacacgaaggggucccugcccaucaacgugaucgucuucgacggcaagagcaagugcgaggaguccagcgccaaguccgccagcguguacuacucccagcugaugugccagcccauccuccugcuggaccaggcgcucgugagcgacgucggcgacagcgccgagguggccgugaagauguucgacgccuacgucaacaccuucuccagcaccuucaacgugccgauggagaagcugaagacccugguggccacggcggaggccgagcucgccaagaacgucucccuggacaacgugcugagcaccuucaucuccgccgcgcggcagggguucguggacagcgacgucgagaccaaggacgugguggagugccucaagcugucccaccagagcgacaucgaggucaccggcgacuccugcaacaacuacaugcugacguacaacaagguggagaacaugaccccccgcgaccucggggccugcaucgacugcagcgcccggcacaucaacgcccagguggccaagucccacaacaucgcgcugaucuggaacgucaaggacuucaugagccuguccgagcagcuccgcaagcagauccgcagcgccgccaagaagaacaaccugcccuucaagcugaccugcgccaccacgcggcagguggugaacgucgugaccaccaagaucgcccucaagggcgggugaggacuagucccuguucccagagcccacuuuuuuuucuuuuuuugaaauaaaauagccugucuuucagaucucaaaggcucuuuucagagccaccaaaaaaaaaaaaaaaaaaaaaaaaaaaaaaaaaaaaaaaaaaaaaaaaaaaaaaaaaaaaaaaaaaaaaaaaaaaaaaaaaaaaaaaaaaaaaaaaaaaaa

SEQ ID NO: 19524 - RNA, 6113 nt, Artificial Sequence
  SARS-CoV-2__MT911815.1__non-structural protein 3 (NSP3) mRNA gc
aggagagucccgcagucggcguccagcggcucugcuuguucgugugugugucguugcaggccuuauucaagcuuaccauggcccccaccaaggugaccuucggcgacgacacggucaucgaggugcagggguacaagagcgugaacaucaccuucgagcuggacgagcgcaucgacaagguccucaacgagaagugcuccgccuacaccguggagcugggcaccgaggugaacgaguucgcgugcgucguggccgacgccgugaucaagacgcugcagccggucagcgagcuccugaccccccuggggaucgaccucgacgagugguccauggccaccuacuaccuguucgacgagagcggcgaguucaagcuggccucccacauguacugcagcuucuacccccccgacgaggacgaggaggagggggacugcgaggaggaggaguucgagccguccacccaguacgaguacggcacggaggacgacuaccagggcaagccccucgaguucggggcgaccagcguggcccugcagcccgaggaggagcaggaggaggacuggcuggacgacgacucccagcagaccgugggccagcaggacgggagcgaggacaaccagaccacgaccauccagaccaucgucgaggugcagccccagcucgagauggagcugaccccggugguccagacgaucgaggugaacuccuucagcggcuaccugaagcucaccgacaacguguacaucaagaacgccgacaucgucgaggaggccaagaaggugaagcccaccguggucgugaacgcggccaacguguaccugaagcacgggggcggcgucgccggggcccugaacaaggccaccaacaacgcgaugcagguggaguccgacgacuacaucgccacgaacggcccccucaaggucgggggcagcugcgugcuguccggccacaaccuggccaagcacugccuccacguggucgggcccaacgugaacaagggcgaggacauccagcugcugaagagcgccuacgagaacuucaaccagcacgaggugcuccuggccccgcugcucuccgcggggaucuucggcgccgaccccauccacagccugcgggucugcguggacaccgugcgcaccaacgucuaccuggccguguucgacaagaaccucuacgacaagcugguguccagcuuccuggagaugaagagcgagaagcaggucgagcagaagaucgccgagauccccaaggaggaggugaagcccuucaucaccgaguccaagccgagcguggagcagcggaagcaggacgacaagaagaucaaggccugcgucgaggaggugacgaccacccucgaggagaccaaguuccugacggagaaccugcuccuguacaucgacaucaacgggaaccugcaccccgacuccgcgacccucgugagcgacaucgacaucaccuuccugaagaaggacgcccccuacaucgucggcgacguggugcaggagggcguccugaccgccguggugauccccacgaagaaggccgggggcaccaccgagaugcucgccaaggcgcugcgcaaggucccgaccgacaacuacaucacgaccuaccccgggcagggccugaacggguacaccguggaggaggccaagaccgugcucaagaagugcaaguccgccuucuacauccugcccagcaucaucuccaacgagaagcaggagauccugggcaccgucagcuggaaccuccgggagaugcuggcccacgcggaggagacgcgcaagcugaugcccgugugcguggagaccaaggccaucgucuccaccauccagcggaaguacaagggcaucaagauccaggagggggugguggacuacggcgcccgcuucuacuucuacaccagcaagacgaccgucgccucccugaucaacacccucaacgaccugaacgagacccuggugacgaugccgcucggguacgugacccacggccugaaccuggaggaggccgcgcgguacaugcgcagccucaagguccccgccaccguguccgugagcucccccgacgccgucaccgccuacaacggguaccugacgagcuccagcaagacccccgaggagcacuucaucgagaccaucucccuggccggcagcuacaaggacuggagcuacuccggccagagcacccagcucgggaucgaguuccugaagcggggcgacaaguccguguacuacacgagcaacccgaccaccuuccaccuggacggggaggugaucaccuucgacaaccucaagacgcugcugucccuccgcgagguccggaccaucaagguguucaccaccguggacaacaucaaccugcacacgcaggucguggacaugagcaugaccuacggccagcaguucggccccaccuaccuggacggggcggacgugaccaagaucaagccccacaacucccacgagggcaagacguucuacguccucccgaacgacgacacccugcgcguggaggccuucgaguacuaccacaccaccgaccccagcuuccuggggcgguacauguccgcccucaaccacacgaagaaguggaaguacccccaggugaacggccugaccagcaucaagugggccgacaacaacugcuaccuggccaccgcgcuccugacccugcagcagaucgagcucaaguucaaccccccggcccugcaggacgccuacuaccgcgcccgggcgggggaggccgccaacuucugcgcccugauccucgccuacugcaacaagacggucggcgagcugggcgacgugcgcgagaccauguccuaccuguuccagcacgcgaaccucgacagcugcaagcggguccugaacguggugugcaagaccugcgggcagcagcagaccacccugaagggcgucgaggccgugauguacauggggacgcucuccuacgagcaguucaagaagggcgugcagauccccugcaccugcgggaagcaggccaccaaguaccugguccagcaggagagccccuucgugaugauguccgcccccccggcccaguacgagcugaagcacggcaccuucacgugcgcgagcgaguacaccggcaacuaccagugcgggcacuacaagcacaucaccuccaaggagacccucuacugcaucgacggcgcccugcugacgaagagcagcgaguacaaggggcccaucaccgacguguucuacaaggagaacuccuacaccaccacgaucaagcccgucaccuacaagcucgacggcguggugugcaccgagaucgaccccaagcuggacaacuacuacaagaaggacaacagcuacuucaccgagcagccgaucgaccugguccccaaccagcccuaccccaacgccuccuucgacaacuucaaguucgugugcgacaacaucaaguucgccgacgaccucaaccagcugacgggguacaagaagccggccagccgcgagcugaaggugaccuucuuccccgaccucaacggcgacgucguggcgaucgacuacaagcacuacacccccuccuucaagaagggcgccaagcugcugcacaagcccaucguguggcacgucaacaacgccaccaacaaggccacguacaagccgaacaccuggugcauccggugccucuggagcaccaagcccguggagaccuccaacagcuucgacgugcugaaguccgaggacgcgcaggggauggacaaccuggccugcgaggaccucaagcccgucagcgaggaggugguggagaaccccacgauccagaaggacguccuggagugcaacgugaagaccaccgagguggucggcgacaucauccugaagccggccaacaacucccucaagaucaccgaggagguggggcacacggaccugauggccgccuacguggacaacagcucccugaccaucaagaagcccaacgagcucagccgcguccugggccugaagacccucgcgacccacgggcuggccgccgugaacuccgugcccugggacacgaucgccaacuacgccaagccguuccugaacaaggucgugagcaccaccaccaacaucgugacgcgcugccucaaccgggucugcaccaacuacaugcccuacuucuucacccugcugcuccagcugugcaccuucacccgcuccacgaacagccggaucaaggcguccaugcccaccaccaucgccaagaacaccgugaagagcgugggcaaguucugccuggaggccagcuucaacuaccucaagucccccaacuucagcaagcugaucaacaucaucaucugguuccugcuccuguccgucugccugggcagccucaucuacuccacggccgcccugggggugcugaugagcaaccucggcaugccguccuacugcaccggguaccgcgagggcuaccugaacagcaccaacgugaccaucgcgacguacugcaccggcuccauccccugcagcgucugccuguccgggcucgacagccuggacaccuaccccucccuggagaccauccagaucacgaucagcuccuucaagugggaccucaccgccuucggccugguggccgagugguuccuggccuacauccucuucacccgguucuucuacgugcuggggcuggccgcgaucaugcagcucuucuucagcuacuucgccguccacuucaucuccaacagcuggcugauguggcugaucaucaaccuggugcagauggcccccaucuccgccauggugcgcauguacaucuucuucgcgagcuucuacuacgucuggaagagcuacgugcacguggucgacggcugcaacuccagcaccugcaugaugugcuacaagcggaaccgcgccacgcggguggagugcaccaccaucgucaacggggugcgccgguccuucuacguguacgccaacggcggcaagggguucugcaagcuccacaacuggaacugcgucaacugcgacaccuucugcgccggcagcacguucaucuccgacgagguggcccgcgaccugagccugcaguucaagcggccgaucaaccccaccgaccaguccagcuacaucguggacuccgucaccgugaagaacgggagcauccaccucuacuucgacaaggcgggccagaagaccuacgagcgccacucccugagccacuucgugaaccuggacaaccuccgggccaacaacacgaaggggucccugcccaucaacgucaucguguucgacggcaagagcaagugcgaggaguccagcgccaaguccgccagcguguacuacucccagcugaugugccagcccauccuccugcuggaccaggcccucgucagcgacgugggcgacagcgcggagguggccgucaagauguucgacgccuacgugaacaccuucuccagcaccuucaacgugccgauggagaagcugaagacccuggucgccacggccgaggcggagcucgccaagaacgugucccuggacaacgugcugagcaccuucaucuccgccgcccgccagggguucgucgacagcgacguggagaccaaggacguggucgagugccucaagcugucccaccagagcgacaucgaggugaccggcgacuccugcaacaacuacaugcugacguacaacaagguggagaacaugaccccccgggaccucggggcgugcaucgacugcagcgcccgccacaucaacgcccaggucgccaagucccacaacaucgcccugaucuggaacgugaaggacuucaugagccuguccgagcagcuccggaagcagauccgcagcgcggccaagaagaacaaccugcccuucaagcugaccugcgccaccacgcgccagguggucaacguggugaccaccaagaucgcccucaagggcgggugaggacuagucccuguucccagagcccacuuuuuuuucuuuuuuugaaauaaaauagccugucuuucagaucucaaaggcucuuuucagagccaccaaaaaaaaaaaaaaaaaaaaaaaaaaaaaaaaaaaaaaaaaaaaaaaaaaaaaaaaaaaaaaaaaaaaaaaaaaaaaaaaaaaaaaaaaaaaaaaaaaaaa

SEQ ID NO: 19525 - RNA, 6113 nt, Artificial Sequence
  SARS-CoV-2__MT911818.1__non-structural protein 3 (NSP3) mRNA gc
aggagagucccgcagucggcguccagcggcucugcuuguucgugugugugucguugcaggccuuauucaagcuuaccauggcccccaccaaggugaccuucggcgacgacacggucaucgaggugcagggguacaagagcgugaacaucaccuucgagcuggacgagcgcaucgacaagguccucaacgagaagugcuccgccuacaccguggagcugggcaccgaggugaacgaguucgcgugcgucguggccgacgccgugaucaagacgcugcagccggucagcgagcuccugaccccccuggggaucgaccucgacgagugguccauggccaccuacuaccuguucgacgagagcggcgaguucaagcuggccucccacauguacugcagcuucuacccccccgacgaggacgaggaggagggggacugcgaggaggaggaguucgagccguccacccaguacgaguacggcacggaggacgacuaccagggcaagccccucgaguucggggcgaccagcgccgcccugcagcccgaggaggagcaggaggaggacuggcuggacgacgacucccagcagaccgugggccagcaggacgggagcgaggacaaccagaccacgaccauccagaccaucguggagguccagccccagcucgagauggagcugaccccgguggugcagacgaucgaggucaacuccuucagcggcuaccugaagcucaccgacaacguguacaucaagaacgccgacaucguggaggaggcgaagaaggucaagcccaccgugguggucaacgccgccaacguguaccugaagcacgggggcggcguggccggggcccugaacaaggcgaccaacaacgccaugcaggucgaguccgacgacuacaucgccacgaacggcccccucaagguggggggcagcugcguccuguccggccacaaccuggccaagcacugccuccacgugguggggcccaacgucaacaagggcgaggacauccagcugcugaagagcgccuacgagaacuucaaccagcacgaggugcuccuggcgccgcugcucuccgccgggaucuucggcgccgaccccauccacagccugcgggugugcgucgacaccgugcgcaccaacguguaccuggccgucuucgacaagaaccucuacgacaagcugguguccagcuuccuggagaugaagagcgagaagcagguggagcagaagaucgccgagauccccaaggaggaggucaagcccuucaucaccgaguccaagccgagcguggagcagcggaagcaggacgacaagaagaucaaggcgugcguggaggaggucacgaccacccucgaggagaccaaguuccugacggagaaccugcuccuguacaucgacaucaacgggaaccugcaccccgacuccgccacccucgugagcgacaucgacaucaccuuccugaagaaggacgcccccuacaucgugggcgacgucgugcaggagggcgugcugaccgccgucgugauccccacgaagaaggccgggggcaccaccgagaugcucgcgaaggcccugcgcaaggugccgaccgacaacuacaucacgaccuaccccgggcagggccugaacggguacaccgucgaggaggccaagaccgugcucaagaagugcaaguccgccuucuacauccugcccagcaucaucuccaacgagaagcaggagauccugggcaccgugagcuggaaccuccgggagaugcuggcgcacgccgaggagacgcgcaagcugaugcccgucugcguggagaccaaggccaucguguccaccauccagcggaaguacaagggcaucaagauccaggagggggucguggacuacggcgcccgcuucuacuucuacaccagcaagacgaccguggccucccugaucaacacccucaacgaccugaacgagacccuggucacgaugccgcucggguacgugacccacggccugaaccuggaggaggcggcccgguacaugcgcagccucaaggugcccgccaccgucuccgugagcucccccgacgccgugaccgccuacaacggguaccugacgagcuccagcaagacccccgaggagcacuucaucgagaccaucucccuggcgggcagcuacaaggacuggagcuacuccggccagagcacccagcucgggaucgaguuccugaagcggggcgacaaguccgucuacuacacgagcaacccgaccaccuuccaccuggacggggaggugaucaccuucgacaaccucaagacgcugcugucccuccgcgaggugcggaccaucaaggucuucaccaccguggacaacaucaaccugcacacgcagguggucgacaugagcaugaccuacggccagcaguucggccccaccuaccuggacggggccgacgugaccaagaucaagccccacaacucccacgagggcaagacguucuacgugcucccgaacgacgacacccugcgcgucgaggccuucgaguacuaccacaccaccgaccccagcuuccuggggcgguacauguccgcccucaaccacacgaagaaguggaaguacccccaggugaacggccugaccagcaucaagugggccgacaacaacugcuaccuggcgaccgcccuccugacccugcagcagaucgagcucaaguucaaccccccggcccugcaggacgccuacuaccgcgcgcgggccggggaggccgccaacuucugcgcccugauccucgcguacugcaacaagacggugggcgagcugggcgacguccgcgagaccauguccuaccuguuccagcacgccaaccucgacagcugcaagcgggugcugaacgucgugugcaagaccugcgggcagcagcagaccacccugaaguccguggaggccgucauguacaugggcacgcucagcuacgagcaguucaagaagggggugcagauccccugcaccugcggcaagcaggccaccaaguaccuggugcagcaggagucccccuucgucaugaugagcgcccccccggcgcaguacgagcugaagcacgggaccuucacgugcgccuccgaguacaccggcaacuaccagugcggccacuacaagcacaucaccagcaaggagacccucuacugcaucgacggggcccugcugacgaagagcuccgaguacaagggccccaucaccgacguguucuacaaggagaacagcuacaccaccacgaucaagcccgugaccuacaagcucgacggggucgugugcaccgagaucgaccccaagcuggacaacuacuacaagaaggacaacuccuacuucaccgagcagccgaucgaccuggugcccaaccagcccuaccccaacgccagcuucgacaacuucaaguucgucugcgacaacaucaaguucgccgacgaccucaaccagcugacgggcuacaagaagccggcgucccgcgagcugaaggugaccuucuuccccgaccucaacggggacguggucgccaucgacuacaagcacuacacccccagcuucaagaagggcgccaagcugcugcacaagcccaucguguggcacgugaacaacgccaccaacaaggcgacguacaagccgaacaccuggugcauccggugccucugguccaccaagcccgucgagaccagcaacuccuucgacgugcugaagagcgaggacgcccagggcauggacaaccuggccugcgaggaccucaagcccguguccgaggaggucguggagaaccccacgauccagaaggacgugcuggagugcaacgucaagaccaccgagguggugggggacaucauccugaagccggccaacaacagccucaagaucaccgaggaggucggccacacggaccugauggccgcguacguggacaacuccagccugaccaucaagaagcccaacgagcucucccgcgugcuggggcugaagacccucgccacccacggccuggccgccgucaacagcgugcccugggacacgaucgccaacuacgcgaagccguuccugaacaagguggucuccaccaccaccaacaucgugacgcgcugccucaaccgggugugcaccaacuacaugcccuacuucuucacccugcugcuccagcugugcaccuucacccgcagcacgaacucccggaucaaggccagcaugcccaccaccaucgccaagaacaccgucaagagcguggggaaguucugccuggaggccuccuucaacuaccucaagagccccaacuucuccaagcugaucaacaucaucaucugguuccugcuccugagcgugugccugggcucccucaucuacagcacggccgcgcugggcguccugauguccaaccucgggaugccgagcuacugcaccggcuaccgcgagggguaccugaacuccaccaacgugaccaucgccacguacugcaccggcagcauccccugcuccgugugccugagcggccucgacucccuggacaccuaccccagccuggagaccauccagaucacgaucuccagcuucaagugggaccucaccgccuucgggcuggucgccgagugguuccuggccuacauccucuucacccgguucuucuacgugcugggccuggcggccaucaugcagcucuucuucuccuacuucgccgugcacuucaucagcaacuccuggcugauguggcugaucaucaaccugguccagauggcccccaucagcgcgauggugcgcauguacaucuucuucgccagcuucuacuacguguggaaguccuacguccacgugguggacgggugcaacagcuccaccugcaugaugugcuacaagcggaaccgcgccacgcgggucgagugcaccaccaucgugaacggcguccgccggagcuucuacguguacgccaacgggggcaagggcuucugcaagcuccacaacuggaacugcgugaacugcgacaccuucugcgccggguccacguucaucagcgacgaggucgcgcgcgaccugucccugcaguucaagcggccgaucaaccccaccgaccagagcuccuacaucguggacagcgugaccgucaagaacggcuccauccaccucuacuucgacaaggccgggcagaagaccuacgagcgccacagccugucccacuucgugaaccuggacaaccuccgggccaacaacacgaagggcagccugcccaucaacgugaucgucuucgacgggaaguccaagugcgaggagagcuccgccaagagcgccuccguguacuacagccagcugaugugccagcccauccuccugcuggaccaggcgcucgugagcgacgucggcgacuccgccgagguggccgugaagauguucgacgccuacgucaacaccuucagcuccaccuucaacgugccgauggagaagcugaagacccugguggccacggcggaggccgagcucgccaagaacgucagccuggacaacgugcuguccaccuucaucagcgccgcgcgccagggcuucguggacuccgacgucgagaccaaggacgugguggagugccucaagcugagccaccaguccgacaucgaggucaccggggacagcugcaacaacuacaugcugacguacaacaagguggagaacaugaccccccgggaccucggcgccugcaucgacugcuccgcccgccacaucaacgcccagguggccaagagccacaacaucgcgcugaucuggaacgucaaggacuucaugucccugagcgagcagcuccggaagcagauccgcuccgccgccaagaagaacaaccugcccuucaagcugaccugcgccaccacgcgccagguggugaacgucgugaccaccaagaucgcccucaaggggggcugaggacuagucccuguucccagagcccacuuuuuuuucuuuuuuugaaauaaaauagccugucuuucagaucucaaaggcucuuuucagagccaccaaaaaaaaaaaaaaaaaaaaaaaaaaaaaaaaaaaaaaaaaaaaaaaaaaaaaaaaaaaaaaaaaaaaaaaaaaaaaaaaaaaaaaaaaaaaaaaaaaaaa

SEQ ID NO: 19526 - RNA, 6113 nt, Artificial Sequence
  SARS-CoV-2__MT911819.1__non-structural protein 3 (NSP3) mRNA gc
aggagagucccgcagucggcguccagcggcucugcuuguucgugugugugucguugcaggccuuauucaagcuuaccauggcccccaccaaggugaccuucggcgacgacacggucaucgaggugcagggguacaagagcgugaacaucaccuucgagcuggacgagcgcaucgacaagguccucaacgagaagugcuccgccuacaccguggagcugggcaccgaggugaacgaguucgcgugcgucguggccgacgccgugaucaagacgcugcagccggucagcgagcuccugaccccccuggggaucgaccucgacgagugguccauggccaccuacuaccuguucgacgagagcggcgaguucaagcuggccucccacauguacugcagcuucuacccccccgacgaggacgaggaggagggggacugcgaggaggaggaguucgagccguccacccaguacgaguacggcacggaggacgacuaccagggcaagccccucgaguucggggcgaccagcgccgcccugcagcccgaggaggagcaggaggaggacuggcuggacgacgacucccagcagaccgugggccagcaggacgggagcgaggacaaccagaccacgaccauccagaccaucguggagguccagccccagcucgagauggagcugaccccgguggugcagacgaucgaggucaacuccuucagcggcuaccugaagcucaccgacaacguguacaucaagaacgccgacaucguggaggaggcgaagaaggucaagcccaccgugguggucaacgccgccaacguguaccugaagcacgggggcggcguggccggggcccugaacaaggcgaccaacaacgccaugcaggucgaguccgacgacuacaucgccacgaacggcccccucaagguggggggcagcugcguccuguccggccacaaccuggccaagcacugccuccacgugguggggcccaacgucaacaagggcgaggacauccagcugcugaagagcgccuacgagaacuucaaccagcacgaggugcuccuggcgccgcugcucuccgccgggaucuucggcgccgaccccauccacagccugcgggugugcgucgacaccgugcgcaccaacguguaccuggccgucuucgacaagaaccucuacgacaagcugguguccagcuuccuggagaugaagagcgagaagcagguggagcagaagaucgccgagauccccaaggaggaggucaagcccuucaucaccgaguccaagccgagcguggagcagcggaagcaggacgacaagaagaucaaggcgugcguggaggaggucacgaccacccucgaggagaccaaguuccugacggagaaccugcuccuguacaucgacaucaacgggaaccugcaccccgacuccgccacccucgugagcgacaucgacaucaccuuccugaagaaggacgcccccuacaucgugggcgacgucgugcaggagggcgugcugaccgccgucgugauccccacgaagaaggccgggggcaccaccgagaugcucgcgaaggcccugcgcaaggugccgaccgacaacuacaucacgaccuaccccgggcagggccugaacggguacaccgucgaggaggccaagaccgugcucaagaagugcaaguccgccuucuacauccugcccagcaucaucuccaacgagaagcaggagauccugggcaccgugagcuggaaccuccgggagaugcuggcgcacgccgaggagacgcgcaagcugaugcccgucugcguggagaccaaggccaucguguccaccauccagcggaaguacaagggcaucaagauccaggagggggucguggacuacggcgcccgcuucuacuucuacaccagcaagacgaccguggccucccugaucaacacccucaacgaccugaacgagacccuggucacgaugccgcucggguacgugacccacggccugaaccuggaggaggcggcccgguacaugcgcagccucaaggugcccgccaccgucuccgugagcucccccgacgccgugaccgccuacaacggguaccugacgagcuccagcaagacccccgaggagcacuucaucgagaccaucucccuggcgggcagcuacaaggacuggagcuacuccggccagagcacccagcucgggaucgaguuccugaagcggggcgacaaguccgucuacuacacgagcaacccgaccaccuuccaccuggacggggaggugaucaccuucgacaaccucaagacgcugcugucccuccgcgaggugcggaccaucaaggucuucaccaccguggacaacaucaaccugcacacgcagguggucgacaugagcaugaccuacggccagcaguucggccccaccuaccuggacggggccgacgugaccaagaucaagccccacaacucccacgagggcaagacguucuacgugcucccgaacgacgacacccugcgcgucgaggccuucgaguacuaccacaccaccgaccccagcuuccuggggcgguacauguccgcccucaaccacacgaagaaguggaaguacccccaggugaacggccugaccagcaucaagugggccgacaacaacugcuaccuggcgaccgcccuccugacccugcagcagaucgagcucaaguucaaccccccggcccugcaggacgccuacuaccgcgcgcgggccggggaggccgccaacuucugcgcccugauccucgcguacugcaacaagacggugggcgagcugggcgacguccgcgagaccauguccuaccuguuccagcacgccaaccucgacagcugcaagcgggugcugaacgucgugugcaagaccugcgggcagcagcagaccacccugaagggcguggaggccgucauguacauggggacgcucuccuacgagcaguucaagaagggcgugcagauccccugcaccugcgggaagcaggccaccaaguaccuggugcagcaggagagccccuucgucaugauguccgcccccccggcgcaguacgagcugaagcacggcaccuucacgugcgccagcgaguacaccggcaacuaccagugcgggcacuacaagcacaucaccuccaaggagacccucuacugcaucgacggcgcccugcugacgaagagcagcgaguacaaggggcccaucaccgacguguucuacaaggagaacuccuacaccaccacgaucaagcccgugaccuacaagcucgacggcgucgugugcaccgagaucgaccccaagcuggacaacuacuacaagaaggacaacagcuacuucaccgagcagccgaucgaccuggugcccaaccagcccuaccccaacgccuccuucgacaacuucaaguucgucugcgacaacaucaaguucgccgacgaccucaaccagcugacgggguacaagaagccggcgagccgcgagcugaaggugaccuucuuccccgaccucaacggcgacguggucgccaucgacuacaagcacuacacccccuccuucaagaagggcgccaagcugcugcacaagcccaucguguggcacgugaacaacgccaccaacaaggcgacguacaagccgaacaccuggugcauccggugccucuggagcaccaagcccgucgagaccuccaacagcuucgacgugcugaaguccgaggacgcccaggggauggacaaccuggccugcgaggaccucaagcccgugagcgaggaggucguggagaaccccacgauccagaaggacgugcuggagugcaacgucaagaccaccgagguggugggcgacaucauccugaagccggccaacaacucccucaagaucaccgaggaggucgggcacacggaccugauggccgcguacguggacaacagcucccugaccaucaagaagcccaacgagcucagccgcgugcugggccugaagacccucgccacccacgggcuggccgccgucaacuccgugcccugggacacgaucgccaacuacgcgaagccguuccugaacaagguggucagcaccaccaccaacaucgugacgcgcugccucaaccgggugugcaccaacuacaugcccuacuucuucacccugcugcuccagcugugcaccuucacccgcuccacgaacagccggaucaaggccuccaugcccaccaccaucgccaagaacaccgucaagagcgugggcaaguucugccuggaggccagcuucaacuaccucaagucccccaacuucagcaagcugaucaacaucaucaucugguuccugcuccuguccgugugccugggcagccucaucuacuccacggccgcgcuggggguccugaugagcaaccucggcaugccguccuacugcaccggguaccgcgagggcuaccugaacagcaccaacgugaccaucgccacguacugcaccggcuccauccccugcagcgugugccuguccgggcucgacagccuggacaccuaccccucccuggagaccauccagaucacgaucagcuccuucaagugggaccucaccgccuucggccuggucgccgagugguuccuggccuacauccucuucacccgguucuucuacgugcuggggcuggcggccaucaugcagcucuucuucagcuacuucgccgugcacuucaucuccaacagcuggcugauguggcugaucaucaaccugguccagauggcccccaucuccgcgauggugcgcauguacaucuucuucgccagcuucuacuacguguggaagagcuacguccacgugguggacggcugcaaccucuccaccugcaugaugugcuacaagcggaaccgcgccacgcgggucgagugcaccaccaucgugaacgggguccgccggagcuucuacguguacgccaacggcggcaagggguucugcaagcugcacaacuggaacugcgugaacugcgacaccuucugcgccggcuccacguucaucagcgacgaggucgcgcgcgaccugucccuccaguucaagcggccgaucaaccccaccgaccagagcuccuacaucguggacagcgugaccgucaagaacggguccauccaccuguacuucgacaaggccggccagaagaccuacgagcgccacagccugucccacuucgugaaccucgacaaccugcgggccaacaacacgaaggggagccugcccaucaacgugaucgucuucgacggcaaguccaagugcgaggagagcuccgccaagagcgccuccguguacuacagccagcucaugugccagcccauccugcugcucgaccaggcgcugguguccgacgucggcgacagcgccgagguggccgugaagauguucgacgccuacgucaacaccuucagcuccaccuucaacgugccgauggagaagcugaagacccucguggccacggcggaggccgagcuggccaagaacgucagccuggacaacgugcucuccaccuucaucagcgccgcgcgccagggguucguggacuccgacgucgagaccaaggacgugguggagugccugaagcugagccaccaguccgacaucgaggucaccggcgacagcugcaacaacuacaugcucacguacaacaagguggagaacaugaccccccgggaccugggggccugcaucgacugcuccgcccgccacaucaacgcccagguggccaagagccacaacaucgcgcugaucuggaacgucaaggacuucaugucccucagcgagcagcugcggaagcagauccgcuccgccgccaagaagaacaaccugcccuucaagcucaccugcgccaccacgcgccagguggugaacgucgugaccaccaagaucgcccugaagggcgggugaggacuagucccuguucccagagcccacuuuuuuuucuuuuuuugaaauaaaauagccugucuuucagaucucaaaggcucuuuucagagccaccaaaaaaaaaaaaaaaaaaaaaaaaaaaaaaaaaaaaaaaaaaaaaaaaaaaaaaaaaaaaaaaaaaaaaaaaaaaaaaaaaaaaaaaaaaaaaaaaaaaaa

SEQ ID NO: 19527 - RNA, 6113 nt, Artificial Sequence
  SARS-CoV-2__MT911823.1__non-structural protein 3 (NSP3) mRNA gc
aggagagucccgcagucggcguccagcggcucugcuuguucgugugugugucguugcaggccuuauucaagcuuaccauggcccccaccaaggugaccuucggcgacgacacggucaucgaggugcagggguacaagagcgugaacaucaccuucgagcuggacgagcgcaucgacaagguccucaacgagaagugcuccgccuacaccguggagcugggcaccgaggugaacgaguucgcgugcgucguggccgacgccgugaucaagacgcugcagccggucagcgagcuccugaccccccuggggaucgaccucgacgagugguccauggccaccuacuaccuguucgacgaguucggcgaguucaagcuggccagccacauguacugcuccuucuacccccccgacgaggacgaggaggagggggacugcgaggaggaggaguucgagccgagcacccaguacgaguacggcacggaggacgacuaccagggcaagccccucgaguucggggcgaccuccgccgcccugcagcccgaggaggagcaggaggaggacuggcuggacgacgacagccagcagaccgugggccagcaggacggguccgaggacaaccagaccacgaccauccagaccaucguggagguccagccccagcucgagauggagcugaccccgguggugcagacgaucgaggucaacagcuucuccggcuaccugaagcucaccgacaacguguacaucaagaacgccgacaucguggaggaggcgaagaaggucaagcccaccgugguggucaacgccgccaacguguaccugaagcacgggggcggcguggccggggcccugaacaaggcgaccaacaacgccaugcaggucgagagcgacgacuacaucgccacgaacggcccccucaagguggggggcuccugcguccugagcggccacaaccuggccaagcacugccuccacgugguggggcccaacgucaacaagggcgaggacauccagcugcugaaguccgccuacgagaacuucaaccagcacgaggugcuccuggcgccgcugcucagcgccgggaucuucggcgccgaccccauccacucccugcgggugugcgucgacaccgugcgcaccaacguguaccuggccgucuucgacaagaaccucuacgacaagcuggugagcuccuuccuggagaugaagagcgagaagcagguggagcagaagaucgccgagauccccaaggaggaggucaagcccuucaucaccgagagcaagccguccguggagcagcggaagcaggacgacaagaagaucaaggcgugcguggaggaggucacgaccacccucgaggagaccaaguuccugacggagaaccugcuccuguacaucgacaucaacgggaaccugcaccccgacagcgccacccucguguccgacaucgacaucaccuuccugaagaaggacgcccccuacaucgugggcgacgucgugcaggagggcgugcugaccgccgucgugauccccacgaagaaggccgggggcaccaccgagaugcucgcgaaggcccugcgcaaggugccgaccgacaacuacaucacgaccuaccccgggcagggccugaacggguacaccgucgaggaggccaagaccgugcucaagaagugcaagagcgccuucuacauccugcccuccaucaucagcaacgagaagcaggagauccugggcaccguguccuggaaccuccgggagaugcuggcgcacgccgaggagacgcgcaagcugaugcccgucugcguggagaccaaggccaucgugagcaccauccagcggaaguacaagggcaucaagauccaggagggggucguggacuacggcgcccgcuucuacuucuacaccuccaagacgaccguggccagccugaucaacacccucaacgaccugaacgagacccuggucacgaugccgcucggguacgugacccacggccugaaccuggaggaggcggcccgguacaugcgcucccucaaggugcccgccaccgucagcguguccagccccgacgccgugaccgccuacaacggguaccugacguccagcuccaagacccccgaggagcacuucaucgagaccaucagccuggcgggcuccuacaaggacuggagcuacagcggccaguccacccagcucgggaucgaguuccugaagcggggcgacaagagcgucuacuacacguccaacccgaccaccuuccaccuggacggggaggugaucaccuucgacaaccucaagacgcugcugagccuccgcgaggugcggaccaucaaggucuucaccaccguggacaacaucaaccugcacacgcagguggucgacauguccaugaccuacggccagcaguucggccccaccuaccuggacggggccgacgugaccaagaucaagccccacaacagccacgagggcaagacguucuacgugcucccgaacgacgacacccugcgcgucgaggccuucgaguacuaccacaccaccgaccccuccuuccuggggcgguacaugagcgcccucaaccacacgaagaaguggaaguacccccaggugaacggccugaccuccaucaagugggccgacaacaacugcuaccuggcgaccgcccuccugacccugcagcagaucgagcucaaguucaaccccccggcccugcaggacgccuacuaccgcgcgcgggccggggaggccgccaacuucugcgcccugauccucgcguacugcaacaagacggugggcgagcugggcgacguccgcgagaccaugagcuaccuguuccagcacgccaaccucgacuccugcaagcgggugcugaacgucgugugcaagaccugcgggcagcagcagaccacccugaagggcguggaggccgucauguacauggggacgcucagcuacgagcaguucaagaagggcgugcagauccccugcaccugcgggaagcaggccaccaaguaccuggugcagcaggagucccccuucgucaugaugagcgcccccccggcgcaguacgagcugaagcacggcaccuucacgugcgccuccgaguacaccggcaacuaccagugcgggcacuacaagcacaucaccagcaaggagacccucuacugcaucgacggcgcccugcugacgaaguccagcgaguacaaggggcccaucaccgacguguucuacaaggagaacagcuacaccaccacgaucaagcccgugaccuacaagcucgacggcgucgugugcaccgagaucgaccccaagcuggacaacuacuacaagaaggacaacuccuacuucaccgagcagccgaucgaccuggugcccaaccagcccuaccccaacgccagcuucgacaacuucaaguucgucugcgacaacaucaaguucgccgacgaccucaaccagcugacgggguacaagaagccggcgucccgcgagcugaaggugaccuucuuccccgaccucaacggcgacguggucgccaucgacuacaagcacuacacccccagcuucaagaagggcgccaagcugcugcacaagcccaucguguggcacgugaacaacgccaccaacaaggcgacguacaagccgaacaccuggugcauccggugccucugguccaccaagcccgucgagaccagcaacuccuucgacgugcugaagagcgaggacgcccaggggauggacaaccuggccugcgaggaccucaagcccguguccgaggaggucguggagaaccccacgauccagaaggacgugcuggagugcaacgucaagaccaccgagguggugggcgacaucauccugaagccggccaacaacagccucaagaucaccgaggaggucgggcacacggaccugauggccgcguacguggacaacuccagccugaccaucaagaagcccaacgagcucucccgcgugcugggccugaagacccucgccacccacgggcuggccgccgucaacagcgugcccugggacacgaucgccaacuacgcgaagccguuccugaacaagguggucuccaccaccaccaacaucgugacgcgcugccucaaccgggugugcaccaacuacaugcccuacuucuucacccugcugcuccagcugugcaccuucacccgcagcacgaacucccggaucaaggccagcaugcccaccaccaucgccaagaacaccgucaaguccgugggcaaguucugccuggaggccagcuucaacuaccucaagagccccaacuucuccaagcugaucaacaucaucaucugguuccugcuccugagcgugugccugggcucccucaucuacagcacggccgcgcuggggguccugauguccaaccucggcaugccgagcuacugcaccggguaccgcgagggcuaccugaacuccaccaacgugaccaucgccacguacugcaccggcagcauccccugcuccgugugccugagcgggcucgacucccuggacaccuaccccagccuggagaccauccagaucacgaucuccagcuucaagugggaccucaccgccuucggccuggucgccgagugguuccuggccuacauccucuucacccgguucuucuacgugcuggggcuggcggccaucaugcagcucuucuucuccuacuucgccgugcacuucaucagcaacuccuggcugauguggcugaucaucaaccugguccagauggcccccaucagcgcgauggugcgcauguacaucuucuucgccuccuucuacuacguguggaagagcuacguccacgugguggacggcugcaacagcuccaccugcaugaugugcuacaagcggaaccgcgccacgcgggucgagugcaccaccaucgugaacgggguccgccggagcuucuacguguacgccaacggcggcaagggguucugcaagcuccacaacuggaacugcgugaacugcgacaccuucugcgccggcuccacguucaucagcgacgaggucgcgcgcgaccugucccugcaguucaagcggccgaucaaccccaccgaccagagcuccuacaucguggacagcgugaccgucaagaacggguccauccaccucuacuucgacaaggccggccagaagaccuacgagcgccacagccugucccacuucgugaaccuggacaaccuccgggccaacaacacgaaggggagccugcccaucaacgugaucgucuucgacggcaaguccaagugcgaggagagcuccgccaagagcgccuccguguacuacagccagcugaugugccagcccauccuccugcuggaccaggcgcucguguccgacgucggcgacagcgccgagguggccgugaagauguucgacgccuacgucaacaccuucagcuccaccuucaacgugccgauggagaagcugaagacccugguggccacggcggaggccgagcucgccaagaacgucagccuggacaacgugcuguccaccuucaucagcgccgcgcgccagggguucguggacuccgacgucgagaccaaggacgugguggagugccucaagcugagccaccaguccgacaucgaggucaccggcgacagcugcaacaacuacaugcugacguacaacaagguggagaacaugaccccccgggaccucggggccugcaucgacugcuccgcccgccacaucaacgcccagguggccaagagccacaacaucgcgcugaucuggaacgucaaggacuucaugucccugagcgagcagcuccggaagcagauccgcuccgccgccaagaagaacaaccugcccuucaagcugaccugcgccaccacgcgccagguggugaacgucgugaccaccaagaucgcccucaagggcgggugaggacuagucccuguucccagagcccacuuuuuuuucuuuuuuugaaauaaaauagccugucuuucagaucucaaaggcucuuuucagagccaccaaaaaaaaaaaaaaaaaaaaaaaaaaaaaaaaaaaaaaaaaaaaaaaaaaaaaaaaaaaaaaaaaaaaaaaaaaaaaaaaaaaaaaaaaaaaaaaaaaaaa

SEQ ID NO: 19528 - RNA, 6113 nt, Artificial Sequence
  SARS-CoV-2__MT911825.1__non-structural protein 3 (NSP3) mRNA gc
aggagagucccgcagucggcguccagcggcucugcuuguucgugugugugucguugcaggccuuauucaagcuuaccauggcccccaccaaggugaccuucggcgacgacacggucaucgaggugcagggguacaagagcgugaacaucaccuucgagcuggacgagcgcaucgacaagguccucaacgagaagugcuccgccuacaccguggagcugggcaccgaggugaacgaguucgcgugcgucguggccgacgccgugaucaagacgcugcagccggucagcgagcuccugaccccccuggggaucgaccucgacgagugguccauggccaccuacuaccuguucgacgagagcggcgaguucaagcuggccucccacauguacugcagcuucuacccccccgacgaggacgaggaggagggggacugcgaggaggaggaguucgagccguccacccaguacgaguacggcacggaggacgacuaccagggcaagccccucgaguucggggcgaccagcgccgcccugcagcccgaggaggagcaggaggaggacuggcuggacgacgacucccagcagaccgugggccagcaggacgggagcgaggacaaccagaccacgaccauccagaccaucguggagguccagccccagcucgagauggagcugaccccgguggugcagacgaucgaggucaacuccuucagcggcuaccugaagcucaccgacaacguguacaucaagaacgccgacaucguggaggaggcgaagaaggucaagcccaccgugguggucaacgccgccaacguguaccugaagcacgggggcggcguggccggggcccugaacaaggcgaccaacaacgccaugcaggucgaguccgacgacuacaucgccacgaacggcccccucaagguggggggcagcugcguccuguccggccacaaccuggccaagcacugccuccacgugguggggcccaacgucaacaagggcgaggacauccagcugcugaagagcgccuacgagaacuucaaccagcacgaggugcuccuggcgccgcugcucuccgccgggaucuucggcgccgaccccauccacagccugcgggugugcgucgacaccgugcgcaccaacguguaccuggccgucuucgacaagaaccucuacgacaagcugguguccagcuuccuggagaugaagagcgagaagcagguggagcagaagaucgccgagauccccaaggaggaggucaagcccuucaucaccgaguccaagccgagcguggagcagcggaagcaggacgacaagaagaucaaggcgugcguggaggaggucacgaccacccucgaggagaccaaguuccugacggagaaccugcuccuguacaucgacaucaaggggaaccugcaccccgacuccgccacccucgugagcgacaucgacaucaccuuccugaagaaggacgcccccuacaucgugggcgacgucgugcaggagggcgugcugaccgccgucgugauccccacgaagaaggccgggggcaccaccgagaugcucgcgaaggcccugcgcaaggugccgaccgacaacuacaucacgaccuaccccgggcagggccugaacggguacaccgucgaggaggccaagaccgugcucaagaagugcaaguccgccuucuacauccugcccagcaucaucuccaacgagaagcaggagauccugggcaccgugagcuggaaccuccgggagaugcuggcgcacgccgaggagacgcgcaagcugaugcccgucugcguggagaccaaggccaucguguccaccauccagcggaaguacaagggcaucaagauccaggagggggucguggacuacggcgcccgcuucuacuucuacaccagcaagacgaccguggccucccugaucaacacccucaacgaccugaacgagacccuggucacgaugccgcucggguacgugacccacggccugaaccuggaggaggcggcccgguacaugcgcagccucaaggugcccgccaccgucuccgugagcucccccgacgccgugaccgccuacaacggguaccugacgagcuccagcaagacccccgaggagcacuucaucgagaccaucucccuggcgggcagcuacaaggacuggagcuacuccggccagagcacccagcucgggaucgaguuccugaagcggggcgacaaguccgucuacuacacgagcaacccgaccaccuuccaccuggacggggaggugaucaccuucgacaaccucaagacgcugcugucccuccgcgaggugcggaccaucaaggucuucaccaccguggacaacaucaaccugcacacgcagguggucgacaugagcaugaccuacggccagcaguucggccccaccuaccuggacggggccgacgugaccaagaucaagccccacaacucccacgagggcaagacguucuacgugcucccgaacgacgacacccugcgcgucgaggccuucgaguacuaccacaccaccgaccccagcuuccuggggcgguacauguccgcccucaaccacacgaagaaguggaaguacccccaggugaacggccugaccagcaucaagugggccgacaacaacugcuaccuggcgaccgcccuccugacccugcagcagaucgagcucaaguucaaccccccggcccugcaggacgccuacuaccgcgcgcgggccggggaggccgccaacuucugcgcccugauccucgcguacugcaacaagacggugggcgagcugggcgacguccgcgagaccauguccuaccuguuccagcacgccaaccucgacagcugcaagcgggugcugaacgucgugugcaagaccugcgggcagcagcagaccacccugaagggcguggaggccgucauguacauggggacgcucuccuacgagcaguucaagaagggcgugcagauccccugcaccugcgggaagcaggccaccaaguaccuggugcagcaggagagccccuucgucaugauguccgcccccccggcgcaguacgagcugaagcacggcaccuucacgugcgccagcgaguacaccggcaacuaccagugcgggcacuacaagcacaucaccuccaaggagacccucuacugcaucgacggcgcccugcugacgaagagcagcgaguacaaggggcccaucaccgacguguucuacaaggagaacuccuacaccaccacgaucaagcccgugaccuacaagcucgacggcgucgugugcaccgagaucgaccccaagcuggacaacuacuacaagaaggacaacagcuacuucaccgagcagccgaucgaccuggugcccaaccagcccuaccccaacgccuccuucgacaacuucaaguucgucugcgacaacaucaaguucgccgacgaccucaaccagcugacgggguacaagaagccggcgagccgcgagcugaaggugaccuucuuccccgaccucaacggcgacguggucgccaucgacuacaagcacuacacccccuccuucaagaagggcgccaagcugcugcacaagcccaucguguggcacgugaacaacgccaccaacaaggcgacguacaagccgaacaccuggugcauccggugccucuggagcaccaagcccgucgagaccuccaacagcuucgacgugcugaaguccgaggacgcccaggggauggacaaccuggccugcgaggaccucaagcccgugagcgaggaggucguggagaaccccacgauccagaaggacgugcuggagugcaacgucaagaccaccgagguggugggcgacaucauccugaagccggccaacaacucccucaagaucaccgaggaggucgggcacacggaccugauggccgcguacguggacaacagcucccugaccaucaagaagcccaacgagcucagccgcgugcugggccugaagacccucgccacccacgggcuggccgccgucaacuccgugcccugggacacgaucgccaacuacgcgaagccguuccugaacaagguggucagcaccaccaccaacaucgugacgcgcugccucaaccgggugugcaccaacuacaugcccuacuucuucacccugcugcuccagcugugcaccuucacccgcuccacgaacagccggaucaaggccuccaugcccaccaccaucgccaagaacaccgucaagagcgugggcaaguucugccuggaggccagcuucaacuaccucaagucccccaacuucagcaagcugaucaacaucaucaucugguuccugcuccuguccgugugccugggcagccucaucuacuccacggccgcgcuggggguccugaugagcaaccucggcaugccguccuacugcaccggguaccgcgagggcuaccugaacagcaccaacgugaccaucgccacguacugcaccggcuccauccccugcagcgugugccuguccgggcucgacagccuggacaccuaccccucccuggagaccauccagaucacgaucagcuccuucaagugggaccucaccgccuucggccuggucgccgagugguuccuggccuacauccucuucacccgguucuucuacgugcuggggcuggcggccaucaugcagcucuucuucagcuacuucgccgugcacuucaucuccaacagcuggcugauguggcugaucaucaaccugguccagauggcccccaucuccgcgauggugcgcauguacaucuucuucgccagcuucuacuacguguggaagagcuacguccacgugguggacggcugcaacuccagcaccugcaugaugugcuacaagcggaaccgcgccacgcgggucgagugcaccaccaucgugaacgggguccgccgguccuucuacguguacgccaacggcggcaagggguucugcaagcuccacaacuggaacugcgugaacugcgacaccuucugcgccggcagcacguucaucuccgacgaggucgcgcgcgaccugagccugcaguucaagcggccgaucaaccccaccgaccaguccagcuacaucguggacuccgugaccgucaagaacgggagcauccaccucuacuucgacaaggccggccagaagaccuacgagcgccacucccugagccacuucgugaaccuggacaaccuccgggccaacaacacgaaggggucccugcccaucaacgugaucgucuucgacggcaagagcaagugcgaggaguccagcgccaaguccgccagcguguacuacucccagcugaugugccagcccauccuccugcuggaccaggcgcucgugagcgacgucggcgacagcgccgagguggccgugaagauguucgacgccuacgucaacaccuucuccagcaccuucaacgugccgauggagaagcugaagacccugguggccacggcggaggccgagcucgccaagaacgucucccuggacaacgugcugagcaccuucaucuccgccgcgcgccagggguucguggacagcgacgucgagaccaaggacgugguggagugccucaagcugucccaccagagcgacaucgaggucaccggcgacuccugcaacaacuacaugcugacguacaacaagguggagaacaugaccccccgggaccucggggccugcaucgacugcagcgcccgccacaucaacgcccagguggccaagucccacaacaucgcgcugaucuggaacgucaaggacuucaugagccuguccgagcagcuccggaagcagauccgcagcgccgccaagaagaacaaccugcccuucaagcugaccugcgccaccacgcgccagguggugaacgucgugaccaccaagaucgcccucaagggcgggugaggacuagucccuguucccagagcccacuuuuuuuucuuuuuuugaaauaaaauagccugucuuucagaucucaaaggcucuuuucagagccaccaaaaaaaaaaaaaaaaaaaaaaaaaaaaaaaaaaaaaaaaaaaaaaaaaaaaaaaaaaaaaaaaaaaaaaaaaaaaaaaaaaaaaaaaaaaaaaaaaaaaa

SEQ ID NO: 19529 - RNA, 6113 nt, Artificial Sequence
  SARS-CoV-2__MT483878.1__non-structural protein 3 (NSP3) mRNA gc
aggagagucccgcagucggcguccagcggcucugcuuguucgugugugugucguugcaggccuuauucaagcuuaccauggcccccaccaaggugaccuucggcgacgacacggucaucgaggugcagggguacaagagcgugaacaucaccuucgagcuggacgagcgcaucgacaagguccucaacgagaagugcuccgccuacaccguggagcugggcaccgaggugaacgaguucgcgugcgucguggccgacgccgugaucaagacgcugcagccggucagcgagcuccugaccccccuggggaucgaccucgacgagugguccauggccaccuacuaccuguucgacgagagcggcgaguucaagcuggccucccacauguacugcagcuucuacccccccgacgaggacgaggaggagggggacugcgaggaggaggaguucgagccguccacccaguacgaguacggcacggaggacgacuaccagggcaagccccucgaguucggggcgaccagcgccgcccugcagcccgaggaggagcaggaggaggacuggcuggacgacgacucccggcagaccgugggccagcaggacgggagcgaggacaaccagaccacgaccauccagaccaucguggagguccagccccagcucgagauggagcugaccccgguggugcagacgaucgaggucaacuccuucagcggcuaccugaagcucaccgacaacguguacaucaagaacgccgacaucguggaggaggcgaagaaggucaagcccaccgugguggucaacgccgccaacguguaccugaagcacgggggcggcguggccggggcccugaacaaggcgaccaacaacgccaugcaggucgaguccgacgacuacaucgccacgaacggcccccucaagguggggggcagcugcguccuguccggccacaaccuggccaagcacugccuccacgugguggggcccaacgucaacaagggcgaggacauccagcugcugaagagcgccuacgagaacuucaaccagcacgaggugcuccuggcgccgcugcucuccgccgggaucuucggcgccgaccccauccacagccugcgcgugugcgucgacaccgugcggaccaacguguaccuggccgucuucgacaagaaccucuacgacaagcugguguccagcuuccuggagaugaagagcgagaagcagguggagcagaagaucgccgagauccccaaggaggaggucaagcccuucaucaccgaguccaagccgagcguggagcagcgcaagcaggacgacaagaagaucaaggcgugcguggaggaggucacgaccacccucgaggagaccaaguuccugacggagaaccugcuccuguacaucgacaucaacgggaaccugcaccccgacuccgccacccucgugagcgacaucgacaucaccuuccugaagaaggacgcccccuacaucgugggcgacgucgugcaggagggcgugcugaccgccgucgugauccccacgaagaaggccgggggcaccaccgagaugcucgcgaaggcccugcggaaggugccgaccgacaacuacaucacgaccuaccccgggcagggccugaacggguacaccgucgaggaggccaagaccgugcucaagaagugcaaguccgccuucuacauccugcccagcaucaucuccaacgagaagcaggagauccugggcaccgugagcuggaaccuccgcgagaugcuggcgcacgccgaggagacgcggaagcugaugcccgucugcguggagaccaaggccaucguguccaccauccagcgcaaguacaagggcaucaagauccaggagggggucguggacuacggcgcccgguucuacuucuacaccagcaagacgaccguggccucccugaucaacacccucaacgaccugaacgagacccuggucacgaugccgcucggguacgugacccacggccugaaccuggaggaggcggcccgcuacaugcggagccucaaggugcccgccaccgucuccgugagcucccccgacgccgugaccgccuacaacggguaccugacgagcuccagcaagacccccgaggagcacuucaucgagaccaucucccuggcgggcagcuacaaggacuggagcuacuccggccagagcacccagcucgggaucgaguuccugaagcgcggcgacaaguccgucuacuacacgagcaacccgaccaccuuccaccuggacggggaggugaucaccuucgacaaccucaagacgcugcugucccuccgggaggugcgcaccaucaaggucuucaccaccguggacaacaucaaccugcacacgcagguggucgacaugagcaugaccuacggccagcaguucggccccaccuaccuggacggggccgacgugaccaagaucaagccccacaacucccacgagggcaagacguucuacgugcucccgaacgacgacacccugcgggucgaggccuucgaguacuaccacaccaccgaccccagcuuccuggggcgcuacauguccgcccucaaccacacgaagaaguggaaguacccccaggugaacggccugaccagcaucaagugggccgacaacaacugcuaccuggcgaccgcccuccugacccugcagcagaucgagcucaaguucaaccccccggcccugcaggacgccuacuaccgggcgcgcgccggggaggccgccaacuucugcgcccugauccucgcguacugcaacaagacggugggcgagcugggcgacguccgggagaccauguccuaccuguuccagcacgccaaccucgacagcugcaagcgcgugcugaacgucgugugcaagaccugcgggcagcagcagaccacccugaagggcguggaggccgucauguacauggggacgcucuccuacgagcaguucaagaagggcgugcagauccccugcaccugcgggaagcaggccaccaaguaccuggugcagcaggagagccccuucgucaugauguccgcccccccggcgcaguacgagcugaagcacggcaccuucacgugcgccagcgaguacaccggcaacuaccagugcgggcacuacaagcacaucaccuccaaggagacccucuacugcaucgacggcgcccugcugacgaagagcagcgaguacaaggggcccaucaccgacguguucuacaaggagaacuccuacaccaccacgaucaagcccgugaccuacaagcucgacggcgucgugugcaccgagaucgaccccaagcuggacaacuacuacaagaaggacaacagcuacuucaccgagcagccgaucgaccuggugcccaaccagcccuaccccaacgccuccuucgacaacuucaaguucgucugcgacaacaucaaguucgccgacgaccucaaccagcugacgggguacaagaagccggcgagccgggagcugaaggugaccuucuuccccgaccucaacggcgacguggucgccaucgacuacaagcacuacacccccuccuucaagaagggcgccaagcugcugcacaagcccaucguguggcacgugaacaacgccaccaacaaggcgacguacaagccgaacaccuggugcauccgcugccucuggagcaccaagcccgucgagaccuccaacagcuucgacgugcugaaguccgaggacgcccaggggauggacaaccuggccugcgaggaccucaagcccgugagcgaggaggucguggagaaccccacgauccagaaggacgugcuggagugcaacgucaagaccaccgagguggugggcgacaucauccugaagccggccaacaacucccucaagaucaccgaggaggucgggcacacggaccugauggccgcguacguggacaacagcucccugaccaucaagaagcccaacgagcucagccgcgugcugggccugaagacccucgccacccacgggcuggccgccgucaacuccgugcccugggacacgaucgccaacuacgcgaagccguuccugaacaagguggucagcaccaccaccaacaucgugacgcggugccucaaccgcgugugcaccaacuacaugcccuacuucuucacccugcugcuccagcugugcaccuucacccgguccacgaacagccgcaucaaggccuccaugcccaccaccaucgccaagaacaccgucaagagcgugggcaaguucugccuggaggccagcuucaacuaccucaagucccccaacuucagcaagcugaucaacaucaucaucugguuccugcuccuguccgugugccugggcagccucaucuacuccacggccgcgcuggggguccugaugagcaaccucggcaugccguccuacugcaccggguaccgggagggcuaccugaacagcaccaacgugaccaucgccacguacugcaccggcuccauccccugcagcgugugccuguccgggcucgacagccuggacaccuaccccucccuggagaccauccagaucacgaucagcuccuucaagugggaccucaccgccuucggccuggucgccgagugguuccuggccuacauccucuucacccgcuucuucuacgugcuggggcuggcggccaucaugcagcucuucuucagcuacuucgccgugcacuucaucuccaacagcuggcugauguggcugaucaucaaccugguccagauggcccccaucuccgcgauggugcggauguacaucuucuucgccagcuucuacuacguguggaagagcuacguccacgugguggacggcugcaacuccagcaccugcaugaugugcuacaagcgcaaccgggccacgcgcgucgagugcaccaccaucgugaacgggguccggcgcuccuucuacguguacgccaacggcggcaagggguucugcaagcuccacaacuggaacugcgugaacugcgacaccuucugcgccggcagcacguucaucuccgacgaggucgcgcgggaccugagccugcaguucaagcgcccgaucaaccccaccgaccaguccagcuacaucguggacuccgugaccgucaagaacgggagcauccaccucuacuucgacaaggccggccagaagaccuacgagcggcacucccugagccacuucgugaaccuggacaaccuccgcgccaacaacacgaaggggucccugcccaucaacgugaucgucuucgacggcaagagcaagugcgaggaguccagcgccaaguccgccagcguguacuacucccagcugaugugccagcccauccuccugcuggaccaggcgcucgugagcgacgucggcgacagcgccgagguggccgugaagauguucgacgccuacgucaacaccuucuccagcaccuucaacgugccgauggagaagcugaagacccugguggccacggcggaggccgagcucgccaagaacgucucccuggacaacgugcugagcaccuucaucuccgccgcgcggcagggguucguggacagcgacgucgagaccaaggacgugguggagugccucaagcugucccaccagagcgacaucgaggucaccggcgacuccugcaacaacuacaugcugacguacaacaagguggagaacaugaccccccgcgaccucggggccugcaucgacugcagcgcccggcacaucaacgcccagguggccaagucccacaacaucgcgcugaucuggaacgucaaggacuucaugagccuguccgagcagcuccgcaagcagauccgcagcgccgccaagaagaacaaccugcccuucaagcugaccugcgccaccacgcggcagguggugaacgucgugaccaccaagaucgcccucaagggcgggugaggacuagucccuguucccagagcccacuuuuuuuucuuuuuuugaaauaaaauagccugucuuucagaucucaaaggcucuuuucagagccaccaaaaaaaaaaaaaaaaaaaaaaaaaaaaaaaaaaaaaaaaaaaaaaaaaaaaaaaaaaaaaaaaaaaaaaaaaaaaaaaaaaaaaaaaaaaaaaaaaaaaa

SEQ ID NO: 19530 - RNA, 6113 nt, Artificial Sequence
  SARS-CoV-2__MT483879.1__non-structural protein 3 (NSP3) mRNA gc
aggagagucccgcagucggcguccagcggcucugcuuguucgugugugugucguugcaggccuuauucaagcuuaccauggcccccaccaaggugaccuucggcgacgacacggucaucgaggugcagggguacaagagcgugaacaucaccuucgagcuggacgagcgcaucgacaagguccucaacgagaagugcuccgccuacaccguggagcugggcaccgaggugaacgaguucgcgugcgucguggccgacgccgugaucaagacgcugcagccggucagcgagcuccugaccccccuggggaucgaccucgacgagugguccauggccaccuacuaccuguucgacgagagcggcgaguucaagcuggccucccacauguacugcagcuucuacccccccgacgaggacgaggaggagggggacugcgaggaggaggaguucgagccguccacccaguacgaguacggcacggaggacgacuaccagggcaagccccucgaguucggggcgaccagcgccgcccugcagcccgaggaggagcaggaggaggacuggcuggacgacgacucccagcagaccgugggccagcaggacgggagcgaggacaaccagaccacgaccauccagaccaucguggagguccagccccagcucgagauggagcugaccccgguggugcagacgaucgaggucaacuccuucagcggcuaccugaagcucaccgacaacguguacaucaagaacgccgacaucguggaggaggcgaagaaggucaagcccaccgugguggucaacgccgccaacguguaccugaagcacgggggcggcguggccggggcccugaacaaggcgaccaacaacgccaugcaggucgaguccgacgacuacaucgccacgaacggcccccucaagguggggggcagcugcguccuguccggccacaaccuggccaagcacugccuccacgugguggggcccaacgucaacaagggcgaggacauccagcugcugaagagcgccuacgagaacuucaaccagcacgaggugcuccuggcgccgcugcucuccgccgggaucuucggcgccgaccccauccacagccugcgggugugcgucgacaccgugcgcaccaacguguaccuggccgucuucgacaagaaccucuacgacaagcugguguccagcuuccuggagaugaagagcgagaagcagguggagcagaagaucgccgagauccccaaggaggaggucaagcccuucaucaccgaguccaagccgagcguggagcagcggaagcaggacgacaagaagaucaaggcgugcguggaggaggucacgaccacccucgaggagaccaaguuccugacggagaaccugcuccuguacaucgacaucaacgggaaccugcaccccgacuccgccacccucgugagcgacaucgacaucaccuuccugaagaaggacgcccccuacaucgugggcgacgucgugcaggagggcgugcugaccgccgucgugauccccacgaagaaggccgggggcaccaccgagaugcucgcgaaggcccugcgcaaggugccgaccgacaacuacaucacgaccuaccccgggcagggccugaacggguacaccgucgaggaggccaagaccgugcucaagaagugcaaguccgccuucuacauccugcccagcaucaucuccaacgagaagcaggagauccugggcaccgugagcuggaaccuccgggagaugcuggcgcacgccgaggagacgcgcaagcugaugcccgucugcguggagaccaaggccaucguguccaccauccagcggaaguacaagggcaucaagauccaggagggggucguggacuacggcgcccgcuucuacuucuacaccagcaagacgaccguggccucccugaucaacacccucaacgaccugaacgagacccuggucacgaugccgcucggguacgugacccacggccugaaccuggaggaggcggcccgguacaugcgcagccucaaggugcccgccaccgucuccgugagcucccccgacgccgugaccgccuacaacggguaccugacgagcuccagcaagacccccgaggagcacuucaucgagaccaucucccuggcgggcagcuacaaggacuggagcuacuccggccagagcacccagcucgggaucgaguuccugaagcggggcgacaaguccgucuacuacacgagcaacccgaccaccuuccaccuggacggggaggugaucaccuucgacaaccucaagacgcugcugucccuccgcgaggugcggaccaucaaggucuucaccaccguggacaacaucaaccugcacacgcagguggucgacaugagcaugaccuacggccagcaguucggccccaccuaccuggacggggccgacgugaccaagaucaagccccacaacucccacgagggcaagacguucuacgugcucccgaacgacgacacccugcgcgucgaggccuucgaguacuaccacaccaccgaccccagcuuccuggggcgguacauguccgcccucaaccacacgaagaaguggaaguacccccaggugaacggccugaccagcaucaagugggccgacaacaacugcuaccuggcgaccgcccuccugacccugcagcagaucgagcucaaguucaaccccccggcccugcaggacgccuacuaccgcgcgcgggccggggaggccgccaacuucugcgcccugauccucgcguacugcaacaagacggugggcgagcugggcgacguccgcgagaccauguccuaccuguuccagcacgccaaccucgacagcugcaagcgggugcugaacgucgugugcaagaccugcgggcagcagcagaccacccugaagggcguggaggccgucauguacauggggacgcucuccuacgagcaguucaagaagggcgugcagauccccugcaccugcgggaagcaggccaccaaguaccuggugcagcaggagagccccuucgucaugauguccgcccccccggcgcaguacgagcugaagcacggcaccuucacgugcgccagcgaguacaccggcaacuaccagugcgggcacuacaagcacaucaccuccaaggagacccucuacugcaucgacggcgcccugcugacgaagagcagcgaguacaaggggcccaucaccgacguguucuacaaggagaacuccuacaccaccacgaucaagcccgugaccuacaagcucgacggcgucgugugcaccgagaucgaccccaagcuggacaacuacuacaagaaggacaacagcuacuucaccgagcagccgaucgaccuggugcccaaccagcccuaccccaacgccuccuucgacaacuucaaguucgucugcgacaacaucaaguucgccgacgaccucaaccagcugacgggguacaagaagccggcgagccgcgagcugaaggugaccuucuuccccgaccucaacggcgacguggucgccaucgacuacaagcacuacacccccuccuucaagaagggcgccaagcugcugcacaagcccaucguguggcacgugaacaacgccaccaacaaggcgacguacaagccgaacaccuggugcauccggugccucuggagcaccaagcccgucgagaccuccaacagcuucgacgugcugaaguccgaggacgcccaggggauggacaaccuggccugcgaggaccucaagcccgugagcgaggaggucguggagaaccccacgauccagaaggacgugcuggagugcaacgucaagaccaccgagguggugggcgacaucauccugaagccggccaacaacucccucaagaucaccgaggaggucgggcacacggaccugauggccgcguacguggacaacagcucccugaccaucaagaagcccaacgagcucagccgcgugcugggccugaagacccucgccacccacgggcuggccgccgucaacuccgugcccugggacacgaucgccagcuacgcgaagccguuccugaacaagguggucuccaccaccaccaacaucgugacgcgcugccucaaccgggugugcaccaacuacaugcccuacuucuucacccugcugcuccagcugugcaccuucacccgcagcacgaacucccggaucaaggccagcaugcccaccaccaucgccaagaacaccgucaagagcgugggcaaguucugccuggaggccuccuucaacuaccucaagagccccaacuucuccaagcugaucaacaucaucaucugguuccugcuccugagcgugugccugggcucccucaucuacagcacggccgcgcuggggguccugauguccaaccucggcaugccgagcuacugcaccggguaccgcgagggcuaccugaacuccaccaacgugaccaucgccacguacugcaccggcagcauccccugcuccgugugccugagcgggcucgacucccuggacaccuaccccagccuggagaccauccagaucacgaucuccagcuucaagugggaccucaccgccuucggccuggucgccgagugguuccuggccuacauccucuucacccgguucuucuacgugcuggggcuggcggccaucaugcagcucuucuucuccuacuucgccgugcacuucaucagcaacuccuggcugauguggcugaucaucaaccugguccagauggcccccaucagcgcgauggugcgcauguacaucuucuucgccagcuucuacuacguguggaaguccuacguccacgugguggacggcugcaacagcuccaccugcaugaugugcuacaagcggaaccgcgccacgcgggucgagugcaccaccaucgugaacgggguccgccggagcuucuacguguacgccaacggcggcaagggguucugcaagcuccacaacuggaacugcgugaacugcgacaccuucugcgccggcuccacguucaucagcgacgaggucgcgcgcgaccugucccugcaguucaagcggccgaucaaccccaccgaccagagcuccuacaucguggacagcgugaccgucaagaacggguccauccaccucuacuucgacaaggccggccagaagaccuacgagcgccacagccugucccacuucgugaaccuggacaaccuccgggccaacaacacgaaggggagccugcccaucaacgugaucgucuucgacggcaaguccaagugcgaggagagcuccgccaagagcgccuccguguacuacagccagcugaugugccagcccauccuccugcuggaccaggcgcucgugagcgacgucggcgacuccgccgagguggccgugaagauguucgacgccuacgucaacaccuucagcuccaccuucaacgugccgauggagaagcugaagacccugguggccacggcggaggccgagcucgccaagaacgucagccuggacaacgugcuguccaccuucaucagcgccgcgcgccagggguucguggacuccgacgucgagaccaaggacgugguggagugccucaagcugagccaccaguccgacaucgaggucaccggcgacagcugcaacaacuacaugcugacguacaacaagguggagaacaugaccccccgggaccucggggccugcaucgacugcuccgcccgccacaucaacgcccagguggccaagagccacaacaucgcgcugaucuggaacgucaaggacuucaugucccugagcgagcagcuccggaagcagauccgcuccgccgccaagaagaacaaccugcccuucaagcugaccugcgccaccacgcgccagguggugaacgucgugaccaccaagaucgcccucaagggcgggugaggacuagucccuguucccagagcccacuuuuuuuucuuuuuuugaaauaaaauagccugucuuucagaucucaaaggcucuuuucagagccaccaaaaaaaaaaaaaaaaaaaaaaaaaaaaaaaaaaaaaaaaaaaaaaaaaaaaaaaaaaaaaaaaaaaaaaaaaaaaaaaaaaaaaaaaaaaaaaaaaaaaa

SEQ ID NO: 19531 - RNA, 6113 nt, Artificial Sequence
  SARS-CoV-2__MT893659.1__non-structural protein 3 (NSP3) mRNA gc
aggagagucccgcagucggcguccagcggcucugcuuguucgugugugugucguugcaggccuuauucaagcuuaccauggcccccaccaaggugaccuucggcgacgacacggucaucgaggugcagggguacaagagcgugaacaucaccuucgagcuggacgagcgcaucgacaagguccucaacgagaagugcuccgccuacaccguggagcugggcaccgaggugaacgaguucgcgugcgucguggccgacgccgugaucaagacgcugcagccggucagcgagcuccugaccccccuggggaucgaccucgacgagugguccauggccaccuacuaccuguucgacgagagcggcgaguucaagcuggccucccacauguacugcagcuucuacccccccgacgaggacgaggaggagggggacugcgaggaggaggaguucgagccguccacccaguacgaguacggcacggaggacgacuaccagggcaagccccucgaguucggggcgaccagcgccgcccugcagcccgaggaggagcaggaggaggacuggcuggacgacgacucccagcagaccgugggccagcaggacagcuccgaggacaaccagaccacgaccauccagaccaucguggagguccagccccagcucgagauggagcugaccccgguggugcagacgaucgaggucaacagcuucuccggguaccugaagcucaccgacaacguguacaucaagaacgccgacaucguggaggaggcgaagaaggucaagcccaccgugguggucaacgccgccaacguguaccugaagcacggcgggggcguggccggcgcccugaacaaggcgaccaacaacgccaugcaggucgagagcgacgacuacaucgccacgaacgggccccucaaggugggcggguccugcguccugagcggccacaaccuggccaagcacugccuccacguggugggccccaacgucaacaagggggaggacauccagcugcugaaguccgccuacgagaacuucaaccagcacgaggugcuccuggcgccgcugcucagcgccggcaucuucggggccgaccccauccacucccugcgggugugcgucgacaccgugcgcaccaacguguaccuggccgucuucgacaagaaccucuacgacaagcuggugagcagcuuccuggagaugaaguccgagaagcagguggagcagaagaucgccgagauccccaaggaggaggucaagcccuucaucaccgagagcaagccguccguggagcagcggaagcaggacgacaagaagaucaaggcgugcguggaggaggucacgaccacccucgaggagaccaaguuccugacggagaaccugcuccuguacaucgacaucaacggcaaccugcaccccgacagcgccacccucguguccgacaucgacaucaccuuccugaagaaggacgcccccuacaucgugggggacgucgugcaggagggcgugcugaccgccgucgugauccccacgaagaaggccggcgggaccaccgagaugcucgcgaaggcccugcgcaaggugccgaccgacaacuacaucacgaccuaccccggccaggggcugaacggcuacaccgucgaggaggccaagaccgugcucaagaagugcaagagcgccuucuacauccugcccuccaucaucagcaacgagaagcaggagauccuggggaccguguccuggaaccuccgggagaugcuggcgcacgccgaggagacgcgcaagcugaugcccgucugcguggagaccaaggccaucgugagcaccauccagcggaaguacaagggcaucaagauccaggagggcgucguggacuacggggcccgcuucuacuucuacaccuccaagacgaccguggccagccugaucaacacccucaacgaccugaacgagacccuggucacgaugccgcucggcuacgugacccacgggcugaaccuggaggaggcggcccgguacaugcgcucccucaaggugcccgccaccgucagcguguccagccccgacgccgugaccgccuacaacggcuaccugacguccagcuccaagacccccgaggagcacuucaucgagaccaucagccuggcggggagcuacaaggacugguccuacagcggccaguccacccagcucggcaucgaguuccugaagcggggggacaagagcgucuacuacacguccaacccgaccaccuuccaccuggacggcgaggugaucaccuucgacaaccucaagacgcugcugagccuccgcgaggugcggaccaucaaggucuucaccaccguggacaacaucaaccugcacacgcagguggucgacauguccaugaccuacgggcagcaguucggccccaccuaccuggacggcgccgacgugaccaagaucaagccccacaacagccacgaggggaagacguucuacgugcucccgaacgacgacacccugcgcgucgaggccuucgaguacuaccacaccaccgaccccuccuuccugggccgguacaugagcgcccucaaccacacgaagaaguggaaguacccccaggugaacgggcugaccuccaucaagugggccgacaacaacugcuaccuggcgaccgcccuccugacccugcagcagaucgagcucaaguucaaccccccggcccugcaggacgccuacuaccgcgcgcgggccggcgaggccgccaacuucugcgcccugauccucgcguacugcaacaagacggugggggagcugggcgacguccgcgagaccaugagcuaccuguuccagcacgccaaccucgacuccugcaagcgggugcugaacgucgugugcaagaccugcggccagcagcagaccacccugaaggggguggaggccgucauguacaugggcacgcucagcuacgagcaguucaagaagggggugcagauccccugcaccugcggcaagcaggccaccaaguaccuggugcagcaggagucccccuucgucaugaugagcgcccccccggcgcaguacgagcugaagcacgggaccuucacgugcgccuccgaguacaccggcaacuaccagugcggccacuacaagcacaucaccagcaaggagacccucuacugcaucgacggggcccugcugacgaagagcuccgaguacaagggccccaucaccgacguguucuacaaggagaacagcuacaccaccacgaucaagcccgugaccuacaagcucgacggggucgugugcaccgagaucgaccccaagcuggacaacuacuacaagaaggacaacuccuacuucaccgagcagccgaucgaccuggugcccaaccagcccuaccccaacgccagcuucgacaacuucaaguucgucugcgacaacaucaaguucgccgacgaccucaaccagcugacgggcuacaagaagccggcgucccgcgagcugaaggugaccuucuuccccgaccucaacggggacguggucgccaucgacuacaagcacuacacccccagcuucaagaagggcgccaagcugcugcacaagcccaucguguggcacgugaacaacgccaccaacaaggcgacguacaagccgaacaccuggugcauccggugccucugguccaccaagcccgucgagaccagcaacuccuucgacgugcugaagagcgaggacgcccagggcauggacaaccuggccugcgaggaccucaagcccguguccgaggaggucguggagaaccccacgauccagaaggacgugcuggagugcaacgucaagaccaccgagguggugggggacaucauccugaagccggccaacaacagccucaagaucaccgaggaggucggccacacggaccugauggccgcguacguggacaacuccagccugaccaucaagaagcccaacgagcucucccgcgugcuggggcugaagacccucgccacccacggccuggccgccgucaacagcgugcccugggacacgaucgccaacuacgcgaagccguuccugaacaagguggucuccaccaccaccaacaucgugacgcgcugccucaaccgggugugcaccaacuacaugcccuacuucuucacccugcugcuccagcugugcaccuucacccgcagcacgaacucccggaucaaggccagcaugcccaccaccaucgccaagaacaccgucaagagcguggggaaguucugccuggaggccuccuucaacuaccucaagagccccaacuucuccaagcugaucaacaucaucaucugguuccugcuccugagcgugugccugggcucccucaucuacagcacggccgcgcugggcguccugauguccaaccucgggaugccgagcuacugcaccggcuaccgcgagggguaccugaacuccaccaacgugaccaucgccacguacugcaccggcagcauccccugcuccgugugccugagcggccucgacucccuggacaccuaccccagccuggagaccauccagaucacgaucuccagcuucaagugggaccucaccgccuucgggcuggucgccgagugguuccuggccuacauccucuucacccgguucuucuacgugcugggccuggcggccaucaugcagcucuucuucuccuacuucgccgugcacuucaucagcaacuccuggcugauguggcugaucaucaaccugguccagauggcccccaucagcgcgauggugcgcauguacaucuucuucgccagcuucuacuacguguggaaguccuacguccacgugguggacgggugcaacagcuccaccugcaugaugugcuacaagcggaaccgcgccacgcgggucgagugcaccaccaucgugaacggcguccgccggagcuucuacguguacgccaacgggggcaagggcuucugcaagcuccacaacuggaacugcgugaacugcgacaccuucugcgccggguccacguucaucagcgacgaggucgcgcgcgaccugucccugcaguucaagcggccgaucaaccccaccgaccagagcuccuacaucguggacagcgugaccgucaagaacggcuccauccaccucuacuucgacaaggccgggcagaagaccuacgagcgccacagccugucccacuucgugaaccuggacaaccuccgggccaacaacacgaagggcagccugcccaucaacgugaucgucuucgacgggaaguccaagugcgaggagagcuccgccaagagcgccuccguguacuacagccagcugaugugccagcccauccuccugcuggaccaggcgcucgugagcgacgucggcgacuccgccgagguggccgugaagauguucgacgccuacgucaacaccuucagcuccaccuucaacgugccgauggagaagcugaagacccugguggccacggcggaggccgagcucgccaagaacgucagccuggacaacgugcuguccaccuucaucagcgccgcgcgccagggcuucguggacuccgacgucgagaccaaggacgugguggagugccucaagcugagccaccaguccgacaucgaggucaccggggacagcugcaacaacuacaugcugacguacaacaagguggagaacaugaccccccgggaccucggcgccugcaucgacugcuccgcccgccacaucaacgcccagguggccaagagccacaacaucgcgcugaucuggaacgucaaggacuucaugucccugagcgagcagcuccggaagcagauccgcuccgccgccaagaagaacaaccugcccuucaagcugaccugcgccaccacgcgccagguggugaacgucgugaccaccaagaucgcccucaaggggggcugaggacuagucccuguucccagagcccacuuuuuuuucuuuuuuugaaauaaaauagccugucuuucagaucucaaaggcucuuuucagagccaccaaaaaaaaaaaaaaaaaaaaaaaaaaaaaaaaaaaaaaaaaaaaaaaaaaaaaaaaaaaaaaaaaaaaaaaaaaaaaaaaaaaaaaaaaaaaaaaaaaaaa

SEQ ID NO: 19532 - RNA, 6113 nt, Artificial Sequence
  SARS-CoV-2__MT893667.1__non-structural protein 3 (NSP3) mRNA gc
aggagagucccgcagucggcguccagcggcucugcuuguucgugugugugucguugcaggccuuauucaagcuuaccauggcccccaccaaggugaccuucggcgacgacacggucaucgaggugcagggguacaagagcgugaacaucaccuucgagcuggacgagcgcaucgacaagguccucaacgagaagugcuccgccuacaccguggagcugggcaccgaggugaacgaguucgcgugcgucguggccgacgccgugaucaagacgcugcagccggucagcgagcuccugaccccccuggggaucgaccucgacgagugguccauggccaccuacuaccuguucgacgagagcggcgaguucaagcuggccucccacauguacugcagcuucuacccccccgacgaggacgaggaggagggggacugcgaggaggaggaguucgagccguccacccaguacgaguacggcacggaggacgacuaccagggcaagccccucgaguucggggcgaccagcgccgcccugcagcccgaggaggagcaggaggaggacuggcuggacgacgacucccagcagaccgugggccagcaggacgggagcgaggacaaccagaccacgaccauccagaccaucguggagguccagccccagcucgagauggagcugaccccgguggugcagacgaucgaggucaacuccuucagcggcuaccugaagcucaccgacaacguguacaucaagaacgccgacaucguggaggaggucaagaaggugaagcccaccguggucgugaacgcggccaacguguaccugaagcacgggggcggcgucgccggggcccugaacaaggccaccaacaacgcgaugcagguggaguccgacgacuacaucgccacgaacggcccccucaaggucgggggcagcugcgugcuguccggccacaaccuggccaagcacugccuccacguggucgggcccaacgugaacaagggcgaggacauccagcugcugaagagcgccuacgagaacuucaaccagcacgaggugcuccuggccccgcugcucuccgcggggaucuucggcgccgaccccauccacagccugcgggucugcguggacaccgugcgcaccaacgucuaccuggccguguucgacaagaaccucuacgacaagcugguguccagcuuccuggagaugaagagcgagaagcaggucgagcagaagaucgccgagauccccaaggaggaggugaagcccuucaucaccgaguccaagccgagcguggagcagcggaagcaggacgacaagaagaucaaggccugcgucgaggaggugacgaccacccucgaggagaccaaguuccugacggagaaccugcuccuguacaucgacaucaacgggaaccugcaccccgacuccgcgacccucgugagcgacaucgacaucaccuuccugaagaaggacgcccccuacaucgucggcgacguggugcaggagggcguccugaccgccguggugauccccacgaagaaggccgggggcaccaccgagaugcucgccaaggcgcugcgcaaggucccgaccgacaacuacaucacgaccuaccccgggcagggccugaacggguacaccguggaggaggccaagaccgugcucaagaagugcaaguccgccuucuacauccugcccagcaucaucuccaacgagaagcaggagauccugggcaccgucagcuggaaccuccgggagaugcuggcccacgcggaggagacgcgcaagcugaugcccgugugcguggagaccaaggccaucgucuccaccauccagcggaaguacaagggcaucaagauccaggagggggugguggacuacggcgcccgcuucuacuucuacaccagcaagacgaccgucgccucccugaucaacacccucaacgaccugaacgagacccuggugacgaugccgcucggguacgugacccacggccugaaccuggaggaggccgcgcgguacaugcgcagccucaagguccccgccaccguguccgugagcucccccgacgccgucaccgccuacaacggguaccugacgagcuccagcaagacccccgaggagcacuucaucgagaccaucucccuggccggcagcuacaaggacuggagcuacuccggccagagcacccagcucgggaucgaguuccugaagcggggcgacaaguccguguacuacacgagcaacccgaccaccuuccaccuggacggggaggugaucaccuucgacaaccucaagacgcugcugucccuccgcgagguccggaccaucaagguguucaccaccguggacaacaucaaccugcacacgcaggucguggacaugagcaugaccuacggccagcaguucggccccaccuaccuggacggggcggacgugaccaagaucaagccccacaacucccacgagggcaagacguucuacguccucccgaacgacgacacccugcgcguggaggccuucgaguacuaccacaccaccgaccccagcuuccuggggcgguacauguccgcccucaaccacacgaagaaguggaaguacccccaggugaacggccugaccagcaucaagugggccgacaacaacugcuaccuggccaccgcgcuccugacccugcagcagaucgagcucaaguucaaccccccggcccugcaggacgccuacuaccgcgcccgggcgggggaggccgccaacuucugcgcccugauccucgccuacugcaacaagacggucggcgagcugggcgacgugcgcgagaccauguccuaccuguuccagcacgcgaaccucgacagcugcaagcggguccugaacguggugugcaagaccugcgggcagcagcagaccacccugaagggcgucgaggccgugauguacauggggacgcucuccuacgagcaguucaagaagggcgugcagauccccugcaccugcgggaagcaggccaccaaguaccugguccagcaggagagccccuucgugaugauguccgcccccccggcccaguacgagcugaagcacggcaccuucacgugcgcgagcgaguacaccggcaacuaccagugcgggcacuacaagcacaucaccuccaaggagacccucuacugcaucgacggcgcccugcugacgaagagcagcgaguacaaggggcccaucaccgacguguucuacaaggagaacuccuacaccaccacgaucaagcccgucaccuacaagcucgacggcguggugugcaccgagaucgaccccaagcuggacaacuacuacaagaaggacaacagcuacuucaccgagcagccgaucgaccugguccccaaccagcccuaccccaacgccuccuucgacaacuucaaguucgugugcgacaacaucaaguucgccgacgaccucaaccagcugacgggguacaagaagccggccagccgcgagcugaaggugaccuucuuccccgaccucaacggcgacgucguggcgaucgacuacaagcacuacacccccuccuucaagaagggcgccaagcugcugcacaagcccaucguguggcacgucaacaacgccaccaacaaggccacguacaagccgaacaccuggugcauccggugccucuggagcaccaagcccguggagaccuccaacagcuucgacgugcugaaguccgaggacgcgcaggggauggacaaccuggccugcgaggaccucaagcccgucagcgaggaggugguggagaaccccacgauccagaaggacguccuggagugcaacgugaagaccaccgagguggucggcgacaucauccugaagccggccaacaacucccucaagaucaccgaggagguggggcacacggaccugauggccgccuacguggacaacagcucccugaccaucaagaagcccaacgagcucagccgcguccugggccugaagacccucgcgacccacgggcuggccgccgugaacuccgugcccugggacacgaucgccaacuacgccaagccguuccugaacaaggucgugagcaccaccaccaacaucgugacgcgcugccucaaccgggucugcaccaacuacaugcccuacuucuucacccugcugcuccagcugugcaccuucacccgcuccacgaacagccggaucaaggcguccaugcccaccaccaucgccaagaacaccgugaagagcgugggcaaguucugccuggaggccagcuucaacuaccucaagucccccaacuucagcaagcugaucaacaucaucaucugguuccugcuccuguccgucugccugggcagccucaucuacuccacggccgcccugggggugcugaugagcaaccucggcaugccguccuacugcaccggguaccgcgagggcuaccugaacagcaccaacgugaccaucgcgacguacugcaccggcuccauccccugcagcgucugccuguccgggcucgacagccuggacaccuaccccucccuggagaccauccagaucacgaucagcuccuucaagugggaccucaccgccuucggccugguggccgagugguuccuggccuacauccucuucacccgguucuucuacgugcuggggcuggccgcgaucaugcagcucuucuucagcuacuucgccguccacuucaucuccaacagcuggcugauguggcugaucaucaaccuggugcagauggcccccaucuccgccauggugcgcauguacaucuucuucgcgagcuucuacuacgucuggaagagcuacgugcacguggucgacggcugcaacuccagcaccugcaugaugugcuacaagcggaaccgcgccacgcggguggagugcaccaccaucgucaacggggugcgccgguccuucuacguguacgccaacggcggcaagggguucugcaagcuccacaacuggaacugcgucaacugcgacaccuucugcgccggcagcacguucaucuccgacgagguggcccgcgaccugagccugcaguucaagcggccgaucaaccccaccgaccaguccagcuacaucguggacuccgucaccgugaagaacgggagcauccaccucuacuucgacaaggcgggccagaagaccuacgagcgccacucccugagccacuucgugaaccuggacaaccuccgggccaacaacacgaaggggucccugcccaucaacgucaucguguucgacggcaagagcaagugcgaggaguccagcgccaaguccgccagcguguacuacucccagcugaugugccagcccauccuccugcuggaccaggcccucgucagcgacgugggcgacagcgcggagguggccgucaagauguucgacgccuacgugaacaccuucuccagcaccuucaacgugccgauggagaagcugaagacccuggucgccacggccgaggcggagcucgccaagaacgugucccuggacaacgugcugagcaccuucaucuccgccgcccgccagggguucgucgacagcgacguggagaccaaggacguggucgagugccucaagcugucccaccagagcgacaucgaggugaccggcgacuccugcaacaacuacaugcugacguacaacaagguggagaacaugaccccccgggaccucggggcgugcaucgacugcagcgcccgccacaucaacgcccaggucgccaagucccacaacaucgcccugaucuggaacgugaaggacuucaugagccuguccgagcagcuccggaagcagauccgcagcgcggccaagaagaacaaccugcccuucaagcugaccugcgccaccacgcgccagguggucaacguggugaccaccaagaucgcccucaagggcgggugaggacuagucccuguucccagagcccacuuuuuuuucuuuuuuugaaauaaaauagccugucuuucagaucucaaaggcucuuuucagagccaccaaaaaaaaaaaaaaaaaaaaaaaaaaaaaaaaaaaaaaaaaaaaaaaaaaaaaaaaaaaaaaaaaaaaaaaaaaaaaaaaaaaaaaaaaaaaaaaaaaaaa

SEQ ID NO: 19533 - RNA, 6113 nt, Artificial Sequence
  SARS-CoV-2__MT893675.1__non-structural protein 3 (NSP3) mRNA gc
aggagagucccgcagucggcguccagcggcucugcuuguucgugugugugucguugcaggccuuauucaagcuuaccauggcccccaccaaggugaccuucggcgacgacacggucaucgaggugcagggguacaagagcgugaacaucaccuucgagcuggacgagcgcaucgacaagguccucaacgagaagugcuccgccuacaccguggagcugggcaccgaggugaacgaguucgcgugcgucguggccgacgccgugaucaagacgcugcagccggucagcgagcuccugaccccccuggggaucgaccucgacgagugguccauggccaccuacuaccuguucgacgagagcggcgaguucaagcuggccucccacauguacugcagcuucuacccccccgacgaggacgaggaggagggggacugcgaggaggaggaguucgagccguccacccaguacgaguacggcacggaggacgacuaccagggcaagccccucgaguucggggcgaccagcgccgcccugcagcccgaggaggagcaggaggaggacuggcuggacgacgacucccagcagaccgugggccagcaggacgggagcgaggacaaccagaccacgaccauccagaccaucguggagguccagccccagcucgagauggagcugaccccgguggugcagacgaucgaggucaacuccuucagcggcuaccugaagcucaccgacaacguguacaucaagaacgccgacaucguggaggaggcgaagaaggucaagcccaccgugguggucaacgccgccaacguguaccugaagcacgggggcggcguggccggggcccugaacaaggcgaccaacaacgccaugcaggucgaguccgacgacuacaucgccacgaacggcccccucaagguggggggcagcugcguccuguccggccacaaccuggccaagcacugccuccacgugguggggcccaacgucaacaagggcgaggacauccagcugcugaagagcgccuacgagaacuucaaccagcacgaggugcuccuggcgccgcugcucuccgccgggaucuucggcgccgaccccauccacagccugcgggugugcgucgacaccgugcgcaccaacguguaccuggccgucuucgacaagaaccucuacgacaagcuggugcuguccuuccucgagaugaagagcgagaagcagguggagcagaagaucgccgagauccccaaggaggaggucaagcccuucaucaccgagagcaagccguccguggagcagcggaagcaggacgacaagaagaucaaggcgugcguggaggaggucacgaccacccuggaggagaccaaguuccugacggagaaccuccugcuguacaucgacaucaacgggaaccuccaccccgacagcgccacccugguguccgacaucgacaucaccuuccugaagaaggacgcccccuacaucgugggcgacgucgugcaggagggcgugcucaccgccgucgugauccccacgaagaaggccgggggcaccaccgagaugcuggcgaaggcccugcgcaaggugccgaccgacaacuacaucacgaccuaccccgggcagggccucaacggguacaccgucgaggaggccaagaccgugcugaagaagugcaagagcgccuucuacauccugcccuccaucaucagcaacgagaagcaggagauccucggcaccguguccuggaaccugcgggagaugcuggcgcacgccgaggagacgcgcaagcugaugcccgucugcguggagaccaaggccaucgugagcaccauccagcggaaguacaagggcaucaagauccaggagggggucguggacuacggcgcccgcuucuacuucuacaccuccaagacgaccguggccagccucaucaacacccugaacgaccugaacgagacccucgucacgaugccgcugggguacgugacccacggccugaaccucgaggaggcggcccgguacaugcgcucccugaaggugcccgccaccgucagcguguccagccccgacgccgugaccgccuacaacggguaccugacguccagcuccaagacccccgaggagcacuucaucgagaccaucagccucgcgggcuccuacaaggacuggagcuacagcggccaguccacccagcuggggaucgaguuccugaagcggggcgacaagagcgucuacuacacguccaacccgaccaccuuccaccucgacggggaggugaucaccuucgacaaccugaagacgcugcucagccugcgcgaggugcggaccaucaaggucuucaccaccguggacaacaucaaccugcacacgcagguggucgacauguccaugaccuacggccagcaguucggccccaccuaccucgacggggccgacgugaccaagaucaagccccacaacagccacgagggcaagacguucuacgugcugccgaacgacgacacccugcgcgucgaggccuucgaguacuaccacaccaccgaccccuccuuccucgggcgguacaugagcgcccugaaccacacgaagaaguggaaguacccccaggugaacggccugaccuccaucaagugggccgacaacaacugcuaccucgcgaccgcccugcugacccuccagcagaucgagcugaaguucaaccccccggcccugcaggacgccuacuaccgcgcgcgggccggggaggccgccaacuucugcgcccucauccuggcguacugcaacaagacggugggcgagcugggcgacguccgcgagaccaugagcuaccucuuccagcacgccaaccuggacuccugcaagcgggugcugaacgucgugugcaagaccugcgggcagcagcagaccacccucaagggcguggaggccgucauguacauggggacgcugagcuacgagcaguucaagaagggcgugcagauccccugcaccugcgggaagcaggccaccaaguaccuggugcagcaggagucccccuucgucaugaugagcgcccccccggcgcaguacgagcucaagcacggcaccuucacgugcgccuccgaguacaccggcaacuaccagugcgggcacuacaagcacaucaccagcaaggagacccuguacugcaucgacggcgcccugcucacgaaguccagcgaguacaaggggcccaucaccgacguguucuacaaggagaacagcuacaccaccacgaucaagcccgugaccuacaagcuggacggcgucgugugcaccgagaucgaccccaagcuggacaacuacuacaagaaggacaacuccuacuucaccgagcagccgaucgaccucgugcccaaccagcccuaccccaacgccagcuucgacaacuucaaguucgucugcgacaacaucaaguucgccgacgaccugaaccagcugacgggguacaagaagccggcgucccgcgagcucaaggugaccuucuuccccgaccugaacggcgacguggucgccaucgacuacaagcacuacacccccagcuucaagaagggcgccaagcugcuccacaagcccaucguguggcacgugaacaacgccaccaacaaggcgacguacaagccgaacaccuggugcauccggugccugugguccaccaagcccgucgagaccagcaacuccuucgacgugcugaagagcgaggacgcccaggggauggacaaccucgccugcgaggaccugaagcccguguccgaggaggucguggagaaccccacgauccagaaggacgugcuggagugcaacgucaagaccaccgagguggugggcgacaucauccucaagccggccaacaacagccugaagaucaccgaggaggucgggcacacggaccugauggccgcguacguggacaacuccagccucaccaucaagaagcccaacgagcugucccgcgugcugggccucaagacccuggccacccacgggcuggccgccgucaacagcgugcccugggacacgaucgccaacuacgcgaagccguuccucaacaagguggucuccaccaccaccaacaucgugacgcgcugccugaaccgggugugcaccaacuacaugcccuacuucuucacccugcuccugcagcugugcaccuucacccgcagcacgaacucccggaucaaggccagcaugcccaccaccaucgccaagaacaccgucaaguccgugggcaaguucugccucgaggccagcuucaacuaccugaagagccccaacuucuccaagcugaucaacaucaucaucugguuccuccugcugagcgugugccucggcucccugaucuacagcacggccgcgcuggggguccucauguccaaccugggcaugccgagcuacugcaccggguaccgcgagggcuaccugaacuccaccaacgugaccaucgccacguacugcaccggcagcauccccugcuccgugugccucagcgggcuggacucccuggacaccuaccccagccucgagaccauccagaucacgaucuccagcuucaagugggaccugaccgccuucggccuggucgccgagugguuccucgccuacauccuguucacccgguucuucuacgugcuggggcucgcggccaucaugcagcuguucuucuccuacuucgccgugcacuucaucagcaacuccuggcugauguggcugaucaucaaccucguccagauggcccccaucagcgcgauggugcgcauguacaucuucuucgccuccuucuacuacguguggaagagcuacguccacgugguggacggcugcaacagcuccaccugcaugaugugcuacaagcggaaccgcgccacgcgggucgagugcaccaccaucgugaacgggguccgccggagcuucuacguguacgccaacggcggcaagggguucugcaagcugcacaacuggaacugcgugaacugcgacaccuucugcgccggcuccacguucaucagcgacgaggucgcgcgcgaccugucccuccaguucaagcggccgaucaaccccaccgaccagagcuccuacaucguggacagcgugaccgucaagaacggguccauccaccuguacuucgacaaggccggccagaagaccuacgagcgccacagccugucccacuucgugaaccucgacaaccugcgggccaacaacacgaaggggagccugcccaucaacgugaucgucuucgacggcaaguccaagugcgaggagagcuccgccaagagcgccuccguguacuacagccagcucaugugccagcccauccugcugcucgaccaggcgcugguguccgacgucggcgacagcgccgagguggccgugaagauguucgacgccuacgucaacaccuucagcuccaccuucaacgugccgauggagaagcugaagacccucguggccacggcggaggccgagcuggccaacaacgucagccuggacaacgugcucuccaccuucaucagcgccgcgcgccagggguucguggacuccgacgucgagaccaaggacgugguggagugccugaagcugagccaccaguccgacaucgaggucaccggcgacagcugcaacaacuacaugcucacguacaacaagguggagaacaugaccccccgggaccugggggccugcaucgacugcuccgcccgccacaucaacgcccagguggccaagagccacaacaucgcgcugaucuggaacgucaaggacuucaugucccucagcgagcagcugcggaagcagauccgcuccgccgccaagaagaacaaccugcccuucaagcucaccugcgccaccacgcgccagguggugaacgucgugaccaccaagaucgcccugaagggcgggugaggacuagucccuguucccagagcccacuuuuuuuucuuuuuuugaaauaaaauagccugucuuucagaucucaaaggcucuuuucagagccaccaaaaaaaaaaaaaaaaaaaaaaaaaaaaaaaaaaaaaaaaaaaaaaaaaaaaaaaaaaaaaaaaaaaaaaaaaaaaaaaaaaaaaaaaaaaaaaaaaaaaa

SEQ ID NO: 19534 - RNA, 6113 nt, Artificial Sequence
  SARS-CoV-2__MT893685.1__non-structural protein 3 (NSP3) mRNA gc
aggagagucccgcagucggcguccagcggcucugcuuguucgugugugugucguugcaggccuuauucaagcuuaccauggcccccaccaaggugaccuucggcgacgacacggucaucgaggugcagggguacaagagcgugaacaucaccuucgagcuggacgagcgcaucgacaagguccucaacgagaagugcuccgccuacaccguggagcugggcaccgaggugaacgaguucgcgugcgucguggccgacgccgugaucaagacgcugcagccggucagcgagcuccugaccccccuggggaucgaccucgacgagugguccauggccaccuacuaccuguucgacgagagcggcgaguucaagcuggccucccacauguacugcagcuucuacccccccgacgaggacgaggaggagggggacugcgaggaggaggaguucgagccguccacccaguacgaguacggcacggaggacgacuaccagggcaagccccucgaguucggggcgaccagcgccgcccugcagcccgaggaggagcaggaggaggacuggcuggacgacgacucccagcagaccgugggccagcaggacgggagcgaggacaaccagaccacgaccauccagaccaucguggagguccagccccagcucgagauggagcugaccccgguggugcagacgaucgaggucaacuccuucagcggcuaccugaagcucaccgacaacguguacaucaagaacgccgacaucguggaggaggcgaagaaggucaagcccaccgugguggucaacgccgccaacguguaccugaagcacgggggcggcguggccggggcccugaacaaggcgaccaacaacgccaugcaggucgaguccgacgacuacaucgccacgaacggcccccucaagguggggggcagcugcguccuguccggccacaaccuggccaagcacugccuccacgugguggggcccaacgucaacaagggcgaggacauccagcugcugaagagcgccuacgagaacuucaaccagcacgaggugcuccuggcgccgcugcucuccgccgggaucuucggcgccgaccccauccacagccugcgggugugcgucgacaccgugcgcaccaacguguaccuggccgucuucgacaagaaccucuacgacaagcugguguccagcuuccuggagaugaagagcgagaagcagguggagcagaagaucgccgagauccccaaggaggaggucaagcccuucaucaccgaguccaagccgagcguggagcagcggaagcaggacgacaagaagaucaaggcgugcguggaggaggucacgaccacccucgaggagaccaaguuccugacggagaaccugcuccuguacaucgacaucaacgggaaccugcaccccgacuccgccacccucgugagcgacaucgacaucaccuuccugaagaaggacgcccccuacaucgugggcgacgucgugcaggagggcgugcugaccgccgucgugauccccacgaagaaggccgggggcaccaccgagaugcucgcgaaggcccugcgcaaggugccgaccgacaacuacaucacgaccuaccccgggcagggccugaacggguacaccgucgaggaggccaagaccgugcucaagaagugcaaguccgccuucuacauccugcccagcaucaucuccaacgagaagcaggagauccugggcaccgugagcuggaaccuccgggagaugcuggcgcacgccgaggagacgcgcaagcugaugcccgucugcguggagaccaaggccaucguguccaccauccagcggaaguacaagggcaucaagauccaggagggggucguggacuacggcgcccgcuucuacuucuacaccagcaagacgaccguggccucccugaucaacacccucaacgaccugaacgagacccuggucacgaugccgcucggguacgugacccacggccugaaccuggaggaggcggcccgguacaugcgcagccucaaggugcccgccaccgucuccgugagcucccccgacgccgugaccgccuacaacggguaccugacgagcuccagcaagacccccgaggagcacuucaucgagaccaucucccuggcgggcagcuacaaggacuggagcuacuccggccagagcacccagcucgggaucgaguuccugaagcggggcgacaaguccgucuacuacacgagcaacccgaccaccuuccaccuggacggggaggugaucaccuucgacaaccucaagacgcugcugucccuccgcgaggugcggaccaucaaggucuucaccaccguggacaacaucaaccugcacacgcagguggucgacaugagcaugaccuacggccagcaguucggccccaccuaccuggacggggccgacgugaccaagaucaagccccacaacucccacgagggcaagacguucuacgugcucccgaacgacgacacccugcgcgucgaggccuucgaguacuaccacaccaccgaccccagcuuccuggggcgguacauguccgcccucaaccacacgaagaaguggaaguacccccaggugaacggccugaccagcaucaagugggccgacaacaacugcuaccuggcgaccgcccuccugacccugcagcagaucgagcucaaguucaaccccccggcccugcaggacgccuacuaccgcgcgcgggccggggaggccgccaacuucugcgcccugauccucgcguacugcaacaagacggugggcgagcugggcgacguccgcgagaccauguccuaccuguuccagcacgccaaccucgacagcugcaagcgggugcugaacgucgugugcaagaccugcgggcagcagcagaccacccugaagggcguggaggccgucauguacauggggacgcucuccuacgagcaguucaagaagggcgugcagauccccugcaccugcgggaagcaggccaccaaguaccuggugcagcaggagagccccuucgucaugauguccgcccccccggcgcaguacgagcugaagcacggcaccuucacgugcgccagcgaguacaccggcaacuaccagugcgggcacuacaagcacaucaccuccaaggagacccucuacugcaucgacggcgcccugcugacgaagagcagcgaguacaaggggcccaucaccgacguguucuacaaggagaacuccuacaccaccacgaucaagcccgugaccuacaagcucgacggcgucgugugcaccgagaucgaccccaagcuggacaacuacuacaagaaggacaacagcuacuucaccgagcagccgaucgaccuggugcccaaccagcccuaccccaacgccuccuucgacaacuucaaguucgucugcgacaacaucaaguucgccgacgaccucaaccagcugacgggguacaagaagccggcgagccgcgagcugaaggugaccuucuuccccgaccucaacggcgacguggucgccaucgacuacaagcacuacacccccuccuucaagaagggcgccaagcugcugcacaagcccaucguguggcacgugaacaacgccaccaacaaggcgacguacaagccgaacaccuggugcauccggugccucuggagcaccaagcccgucgagaccuccaacagcuucgacgugcugaaguccgaggacgcccaggggauggacaaccuggccugcgaggaccucaagcccgugagcgaggaggucguggagaaccccacgauccagaaggacgugcuggagugcaacgucaagaccaccgagguggugggcgacaucauccugaagccggccaacaacucccucaagaucaccgaggaggucgggcacacggaccugauggccgcguacguggacaacagcucccugaucaucaagaagcccaacgagcucagccgcgugcugggccugaagacccucgccacccacgggcuggccgccgucaacuccgugcccugggacaccaucgccaacuacgcgaagccguuccugaacaagguggucagcacgaccaccaacaucgugacccgcugccucaaccgggugugcacgaacuacaugcccuacuucuucacccugcugcuccagcugugcaccuucacccgcuccaccaacagccggaucaaggccuccaugcccacgaccaucgccaagaacaccgucaagagcgugggcaaguucugccuggaggccagcuucaacuaccucaagucccccaacuucagcaagcugaucaacaucaucaucugguuccugcuccuguccgugugccugggcagccucaucuacuccaccgccgcgcuggggguccugaugagcaaccucggcaugccguccuacugcacgggguaccgcgagggcuaccugaacagcaccaacgugaccaucgccaccuacugcacgggcuccauccccugcagcgugugccuguccgggcucgacagccuggacaccuaccccucccuggagaccauccagaucaccaucagcuccuucaagugggaccucacggccuucggccuggucgccgagugguuccuggccuacauccucuucacccgguucuucuacgugcuggggcuggcggccaucaugcagcucuucuucagcuacuucgccgugcacuucaucuccaacagcuggcugauguggcugaucaucaaccugguccagauggcccccaucuccgcgauggugcgcauguacaucuucuucgccagcuucuacuacguguggaagagcuacguccacgugguggacggcugcaacuccagcaccugcaugaugugcuacaagcggaaccgcgccacccgggucgagugcacgaccaucgugaacgggguccgccgguccuucuacguguacgccaacggcggcaagggguucugcaagcuccacaacuggaacugcgugaacugcgacaccuucugcgccggcagcaccuucaucuccgacgaggucgcgcgcgaccugagccugcaguucaagcggccgaucaaccccacggaccaguccagcuacaucguggacuccgugaccgucaagaacgggagcauccaccucuacuucgacaaggccggccagaagaccuacgagcgccacucccugagccacuucgugaaccuggacaaccuccgggccaacaacaccaaggggucccugcccaucaacgugaucgucuucgacggcaagagcaagugcgaggaguccagcgccaaguccgccagcguguacuacucccagcugaugugccagcccauccuccugcuggaccaggcgcucgugagcgacgucggcgacagcgccgagguggccgugaagauguucgacgccuacgucaacacguucuccagcaccuucaacgugccgauggagaagcugaagacccugguggccaccgcggaggccgagcucgccaagaacgucucccuggacaacgugcugagcacguucaucuccgccgcgcgccagggguucguggacagcgacgucgagaccaaggacgugguggagugccucaagcugucccaccagagcgacaucgaggucaccggcgacuccugcaacaacuacaugcugaccuacaacaagguggagaacaugacgccccgggaccucggggccugcaucgacugcagcgcccgccacaucaacgcccagguggccaagucccacaacaucgcgcugaucuggaacgucaaggacuucaugagccuguccgagcagcuccggaagcagauccgcagcgccgccaagaagaacaaccugcccuucaagcugaccugcgccaccacccgccagguggugaacgucgugacgaccaagaucgcccucaagggcgggugaggacuagucccuguucccagagcccacuuuuuuuucuuuuuuugaaauaaaauagccugucuuucagaucucaaaggcucuuuucagagccaccaaaaaaaaaaaaaaaaaaaaaaaaaaaaaaaaaaaaaaaaaaaaaaaaaaaaaaaaaaaaaaaaaaaaaaaaaaaaaaaaaaaaaaaaaaaaaaaaaaaaa

SEQ ID NO: 19535 - RNA, 6113 nt, Artificial Sequence
  SARS-CoV-2__MT897460.1__non-structural protein 3 (NSP3) mRNA gc
aggagagucccgcagucggcguccagcggcucugcuuguucgugugugugucguugcaggccuuauucaagcuuaccauggcccccaccaaggugaccuucggcgacgacacggucaucgaggugcagggguacaagagcgugaacaucaccuucgagcuggacgagcgcaucgacaagguccucaacgagaagugcuccgccuacaccguggagcugggcaccgaggugaacgaguucgcgugcgucguggccgacgccgugaucaagacgcugcagccggucagcgagcuccugaccccccuggggaucgaccucgacgagugguccauggccaccuacuaccuguucgacgagagcggcgaguucaagcuggccucccacauguacugcagcuucuacccccccgacgaggacgaggaggagggggacugcgaggaggaggaguucgagccguccacccaguacgaguacggcacggaggacgacuaccagggcaagccccucgaguucggggcgaccagcgccgcccugcagcccgaggaggagcaggaggaggacuggcuggacgacgacucccagcagaccgugggccagcaggacgggagcgaggacaaccagaccacgaccauccagaccaucguggagguccagccccagcucgagauggagcugaccccgguggugcagacgaucgaggucaacuccuucagcggcuaccugaagcucaccgacaacguguacaucaagaacgccgacaucguggaggaggcgaagaaggucaagcccaccgugguggucaacgccgccaacguguaccugaagcacgggggcggcguggccggggcccugaacaaggcgaccaacaacgccaugcaggucgaguccgacgacuacaucgccacgaacggcccccucaagguggggggcagcugcguccuguccggccacaaccuggccaagcacugccuccacgugguggggcccaacgucaacaagggcgaggacauccagcugcugaagagcgccuacgagaacuucaaccagcacgaggugcuccuggcgccgcugcucuccgccgggaucuucggcgccgaccccauccacagccugcgggugugcgucgacaccgugcgcaccaacguguaccuggccgucuucgacaagaaccucuacgacaagcugguguccagcuuccuggagaugaagagcgagaagcagguggagcagaagaucgccgagauccccaaggaggaggucaagcccuucaucaccgaguccaagccgagcguggagcagcggaagcaggacgacaagaagaucaaggcgugcguggaggaggucacgaccacccucgaggagaccaaguuccugacggagaaccugcuccuguacaucgacaucaacgggaaccugcaccccgacuccgccacccucgugagcgacaucgacaucaccuuccugaagaaggacgcccccuacaucgugggcgacgucgugcaggagggcgugcugaccgccgucgugauccccacgaagaaggccgggggcaccaccgagaugcucgcgaaggcccugcgcaaggugccgaccgacaacuacaucacgaccuaccccgggcagggccugaacggguacaccgucgaggaggccaagaccgugcucaagaagugcaaguccgccuucuacauccugcccagcaucaucuccaacgagaagcaggagauccugggcaccgugagcuggaaccuccgggagaugcuggcgcacgccgaggagacgcgcaagcugaugcccgucugcguggagaccaaggccaucguguccaccauccagcggaaguacaagggcaucaagauccaggagggggucguggacuacggcgcccgcuucuacuucuacaccagcaagacgaccguggccucccugaucaacacccucaacgaccugaacgagacccuggucacgaugccgcucggguacgugacccacggccugaaccuggaggaggcggcccgguacaugcgcagccucaaggugcccgccaccgucuccgugagcucccccgacgccgugaccgccuacaacggguaccugacgagcuccagcaagacccccgaggagcacuucaucgagaccaucucccuggcgggcagcuacaaggacuggagcuacuccggccagagcacccagcucgggaucgaguuccugaagcggggcgacaaguccgucuacuacacgagcaacccgaccaccuuccaccuggacggggaggugaucaccuucgacaaccucaagacgcugcugucccuccgcgaggugcggaccaucaaggucuucaccaccguggacaacaucaaccugcacacgcagguggucgacaugagcaugaccuacggccagcaguucggccccaccuaccuggacggggccgacgugaccaagaucaagccccacaacucccacgagggcaagacguucuacgugcucccgaacgacgacacccugcgcgucgaggccuucgaguacuaccacaccaccgaccccagcuuccuggggcgguacauguccgcccucaaccacacgaagaaguggaaguacccccaggugaacggccugaccagcaucaagugggccgacaacaacugcuaccuggcgaccgcccuccugacccugcagcagaucgagcucaaguucaaccccccggcccugcaggacgccuacuaccgcgcgcgggccggggaggccgccaacuucugcgcccugauccucgcguacugcaacaagacggugggcgagcugggcgacguccgcgagaccauguccuaccuguuccagcacgccaaccucgacagcugcaagcgggugcugaacgucgugugcaagaccugcgggcagcagcagaccacccugaagggcguggaggccgucauguacauggggacgcucuccuacgagcaguucaagaagggcuuccagauccccugcaccugcgggaagcaggccaccaaguaccuggugcagcaggagagccccuucgugaugauguccgcccccccggcgcaguacgagcugaagcacggcaccuucacgugcgccagcgaguacaccggcaacuaccagugcgggcacuacaagcacaucaccuccaaggagacccucuacugcaucgacggcgcccugcugacgaagagcagcgaguacaaggggcccaucaccgacgucuucuacaaggagaacuccuacaccaccacgaucaagcccgugaccuacaagcucgacggcguggucugcaccgagaucgaccccaagcuggacaacuacuacaagaaggacaacagcuacuucaccgagcagccgaucgaccuggugcccaaccagcccuaccccaacgccuccuucgacaacuucaaguucgugugcgacaacaucaaguucgccgacgaccucaaccagcugacgggguacaagaagccggcgagccgcgagcugaaggucaccuucuuccccgaccucaacggcgacgugguggccaucgacuacaagcacuacacccccuccuucaagaagggcgccaagcugcugcacaagcccaucgucuggcacgugaacaacgccaccaacaaggcgacguacaagccgaacaccuggugcauccggugccucuggagcaccaagcccguggagaccuccaacagcuucgacguccugaaguccgaggacgcccaggggauggacaaccuggccugcgaggaccucaagcccgugagcgaggagguggucgagaaccccacgauccagaaggacgugcuggagugcaacgugaagaccaccgaggucgugggcgacaucauccugaagccggccaacaacucccucaagaucaccgaggagguggggcacacggaccugauggccgcguacgucgacaacagcucccugaccaucaagaagcccaacgagcucagccgcgugcugggccugaagacccucgccacccacgggcuggccgccgugaacuccguccccugggacacgaucgccaacuacgcgaagccguuccugaacaagguggugagcaccaccaccaacaucgucacgcgcugccucaaccgggugugcaccaacuacaugcccuacuucuucacccugcugcuccagcugugcaccuucacccgcuccacgaacagccggaucaaggccuccaugcccaccaccaucgccaagaacaccgugaagagcgucggcaaguucugccuggaggccagcuucaacuaccucaagucccccaacuucagcaagcugaucaacaucaucaucugguuccugcuccuguccgugugccugggcagccucaucuacuccacggccgcgcugggggugcugaugagcaaccucggcaugccguccuacugcaccggguaccgcgagggcuaccugaacagcaccaacgucaccaucgccacguacugcaccggcuccauccccugcagcgugugccuguccgggcucgacagccuggacaccuaccccucccuggagaccauccagaucacgaucagcuccuucaagugggaccucaccgccuucggccugguggccgagugguuccuggccuacauccucuucacccgguucuucuacguccuggggcuggcggccaucaugcagcucuucuucagcuacuucgccgugcacuucaucuccaacagcuggcugauguggcugaucaucaaccuggugcagauggcccccaucuccgcgaugguccgcauguacaucuucuucgccagcuucuacuacguguggaagagcuacgugcacgucguggacggcugcaacuccagcaccugcaugaugugcuacaagcggaaccgcgccacgcggguggagugcaccaccaucgucaacggggugcgccgguccuucuacgucuacgccaacggcggcaagggguucugcaagcuccacaacuggaacugcgugaacugcgacaccuucugcgccggcagcacguucaucuccgacgagguggcgcgcgaccugagccugcaguucaagcggccgaucaaccccaccgaccaguccagcuacaucgucgacuccgugaccgugaagaacgggagcauccaccucuacuucgacaaggccggccagaagaccuacgagcgccacucccugagccacuucgucaaccuggacaaccuccgggccaacaacacgaaggggucccugcccaucaacgugaucguguucgacggcaagagcaagugcgaggaguccagcgccaaguccgccagcgucuacuacucccagcugaugugccagcccauccuccugcuggaccaggcgcucgugagcgacgugggcgacagcgccgaggucgccgugaagauguucgacgccuacgugaacaccuucuccagcaccuucaacgucccgauggagaagcugaagacccugguggccacggcggaggccgagcucgccaagaacgugucccuggacaacguccugagcaccuucaucuccgccgcgcgccagggguucguggacagcgacguggagaucaaggacgucguggagugccucaagcugucccaccagagcgacaucgaggugaccggcgacuccugcaacaacuacaugcugaccuacaacaaggucgagaacaugacgccccgggaccucggggccugcaucgacugcagcgcccgccacaucaacgcccagguggccaagucccacaacaucgcgcugaucuggaacgugaaggacuucaugagccuguccgagcagcuccggaagcagauccgcagcgccgccaagaagaacaaccugcccuucaagcugaccugcgccaccacccgccaggucgugaacguggucacgaccaagaucgcccucaagggcgggugaggacuagucccuguucccagagcccacuuuuuuuucuuuuuuugaaauaaaauagccugucuuucagaucucaaaggcucuuuucagagccaccaaaaaaaaaaaaaaaaaaaaaaaaaaaaaaaaaaaaaaaaaaaaaaaaaaaaaaaaaaaaaaaaaaaaaaaaaaaaaaaaaaaaaaaaaaaaaaaaaaaaa

SEQ ID NO: 19536 - RNA, 6113 nt, Artificial Sequence
  SARS-CoV-2__MT897461.1__non-structural protein 3 (NSP3) mRNA gc
aggagagucccgcagucggcguccagcggcucugcuuguucgugugugugucguugcaggccuuauucaagcuuaccauggcccccaccaaggugaccuucggcgacgacacggucaucgaggugcagggguacaagagcgugaacaucaccuucgagcuggacgagcgcaucgacaagguccucaacgagaagugcuccgccuacaccguggagcugggcaccgaggugaacgaguucgcgugcgucguggccgacgccgugaucaagacgcugcagccggucagcgagcuccugaccccccuggggaucgaccucgacgagugguccauggccaccuacuaccuguucgacgagagcggcgaguucaagcuggccucccacauguacugcagcuucuacccccccgacgaggacgaggaggagggggacugcgaggaggaggaguucgagccguccacccaguacgaguacggcacggaggacgacuaccagggcaagccccucgaguucggggcgaccagcgccgcccugcagcccgaggaggagcaggaggaggacuggcuggacgacgacucccagcagaccgugggccagcaggacgggagcgaggacaaccagaccacgaccauccagaccaucguggagguccagccccagcucgagauggagcugaccccgguggugcagacgaucgaggucaacuccuucagcggcuaccugaagcucaccgacaacguguacaucaagaacgccgacaucguggaggaggcgaagaaggucaagcccaccgugguggucaacgccgccaacguguaccugaagcacgggggcggcguggccggggcccugaacaaggcgaccaacaacgccaugcaggucgaguccgacgacuacaucgccacgaacggcccccucaagguggggggcagcugcguccuguccggccacaaccuggccaagcacugccuccacgugguggggcccaacgucaacaagggcgaggacauccagcugcugaagagcgccuacgagaacuucaaccagcacgaggugcuccuggcgccgcugcucuccgccgggaucuucggcgccgaccccauccacagccugcgggugugcgucgacaccgugugcaccaacguguaccuggccgucuucgacaagaaccucuacgacaagcugguguccagcuuccuggagaugaagagcgagaagcagguggagcagaagaucgccgagauccccaaggaggaggucaagcccuucaucaccgaguccaagccgagcguggagcagcgcaagcaggacgacaagaagaucaaggcgugcguggaggaggucacgaccacccucgaggagaccaaguuccugacggagaaccugcuccuguacaucgacaucaacgggaaccugcaccccgacuccgccacccucgugagcgacaucgacaucaccuuccugaagaaggacgcccccuacaucgugggcgacgucgugcaggagggcgugcugaccgccgucgugauccccacgaagaaggccgggggcaccaccgagaugcucgcgaaggcccugcggaaggugccgaccgacaacuacaucacgaccuaccccgggcagggccugaacggguacaccgucgaggaggccaagaccgugcucaagaagugcaaguccgccuucuacauccugcccagcaucaucuccaacgagaagcaggagauccugggcaccgugagcuggaaccuccgcgagaugcuggcgcacgccgaggagacgcggaagcugaugcccgucugcguggagaccaaggccaucguguccaccauccagcgcaaguacaagggcaucaagauccaggagggggucguggacuacggcgcccgguucuacuucuacaccagcaagacgaccguggccucccugaucaacacccucaacgaccugaacgagacccuggucacgaugccgcucggguacgugacccacggccugaaccuggaggaggcggcccgcuacaugcggagccucaaggugcccgccaccgucuccgugagcucccccgacgccgugaccgccuacaacggguaccugacgagcuccagcaagacccccgaggagcacuucaucgagaccaucucccuggcgggcagcuacaaggacuggagcuacuccggccagagcacccagcucgggaucgaguuccugaagcgcggcgacaaguccgucuacuacacgagcaacccgaccaccuuccaccuggacggggaggugaucaccuucgacaaccucaagacgcugcugucccuccgggaggugcgcaccaucaaggucuucaccaccguggacaacaucaaccugcacacgcagguggucgacaugagcaugaccuacggccagcaguucggccccaccuaccuggacggggccgacgugaccaagaucaagccccacaacucccacgagggcaagacguucuacgugcucccgaacgacgacacccugcgggucgaggccuucgaguacuaccacaccaccgaccccagcuuccuggggcgcuacauguccgcccucaaccacacgaagaaguggaaguacccccaggugaacggccugaccagcaucaagugggccgacaacaacugcuaccuggcgaccgcccuccugacccugcagcagaucgagcucaaguucaaccccccggcccugcaggacgccuacuaccgggcgcgcgccggggaggccgccaacuucugcgcccugauccucgcguacugcaacaagacggugggcgagcugggcgacguccgggagaccauguccuaccuguuccagcacgccaaccucgacagcugcaagcgcgugcugaacgucgugugcaagaccugcgggcagcagcagaccacccugaagggcguggaggccgucauguacauggggacgcucuccuacgagcaguucaagaagggcgugcagauccccugcaccugcgggaagcaggccaccaaguaccuggugcagcaggagagccccuucgucaugauguccgcccccccggcgcaguacgagcugaagcacggcaccuucacgugcgccagcgaguacaccggcaacuaccagugcgggcacuacaagcacaucaccuccaaggagacccucuacugcaucgacggcgcccugcugacgaagagcagcgaguacaaggggcccaucaccgacguguucuacaaggagaacuccuacaccaccacgaucaagcccgugaccuacaagcucgacggcgucgugugcaccgagaucgaccccaagcuggacaacuacuacaagaaggacaacagcuacuucaccgagcagccgaucgaccuggugcccaaccagcccuaccccaacgccuccuucgacaacuucaaguucgucugcgacaacaucaaguucgccgacgaccucaaccagcugacgggguacaagaagccggcgagccgggagcugaaggugaccuucuuccccgaccucaacggcgacguggucgccaucgacuacaagcacuacacccccuccuucaagaagggcgccaagcugcugcacaagcccaucguguggcacgugaacaacgccaccaacaaggcgacguacaagccgaacaccuggugcauccgcugccucuggagcaccaagcccgucgagaccuccaacagcuucgacgugcugaaguccgaggacgcccaggggauggacaaccuggccugcgaggaccucaagcccgugagcgaggaggucguggagaaccccacgauccagaaggacgugcuggagugcaacgucaagaccaccgagguggugggcgacaucauccugaagccggccaacaacucccucaagaucaccgaggaggucgggcacacggaccugauggccgcguacguggacaacagcucccugaccaucaagaagcccaacgagcucagccgggugcugggccugaagacccucgccacccacgggcuggccgccgucaacuccgugcccugggacacgaucgccaacuacgcgaagccguuccugaacaagguggucagcaccaccaccaacaucgugacgcgcugccucaaccgcgugugcaccaacuacaugcccuacuucuucacccugcugcuccagcugugcaccuucacccgguccacgaacagccgcaucaaggccuccaugcccaccaccaucgccaagaacaccgucaagagcgugggcaaguucugccuggaggccagcuucaacuaccucaagucccccaacuucagcaagcugaucaacaucaucaucugguuccugcuccuguccgugugccugggcagccucaucuacuccacggccgcgcuggggguccugaugagcaaccucggcaugccguccuacugcaccggguaccgggagggcuaccugaacagcaucaacgugaccaucgccaccuacugcacgggcuccauccccugcagcgugugccuguccgggcucgacagccuggacaccuaccccucccuggagaccauccagaucaccaucagcuccuucaagugggaccucacggccuucggccuggucgccgagugguuccuggccuacauccucuucacccgcuucuucuacgugcuggggcuggcggccaucaugcagcucuucuucagcuacuucgccgugcacuucaucuccaacagcuggcugauguggcugaucaucaaccugguccagauggcccccaucuccgcgauggugcggauguacaucuucuucgccagcuucuacuacguguggaagagcuacguccacgugguggacggcugcaacuccagcaccugcaugaugugcuacaagcgcaaccgggccacccgcgucgagugcacgaccaucgugaacgggguccggcgcuccuucuacguguacgccaacggcggcaagggguucugcaagcuccacaacuggaacugcgugaacugcgacaccuucugcgccggcagcaccuucaucuccgacgaggucgcgcgggaccugagccugcaguucaagcgcccgaucaaccccacggaccaguccagcuacaucguggacuccgugaccgucaagaacgggagcauccaccucuacuucgacaaggccggccagaagaccuacgagcggcacucccugagccacuucgugaaccuggacaaccuccgcgccaacaacaccaaggggucccugcccaucaacgugaucgucuucgacggcaagagcaagugcgaggaguccagcgccaaguccgccagcguguacuacucccagcugaugugccagcccauccuccugcuggaccaggcgcucgugagcgacgucggcgacagcgccgagguggccgugaagauguucgacgccuacgucaacacguucuccagcaccuucaacgugccgauggagaagcugaagacccugguggccaccgcggaggccgagcucgccaagaacgucucccuggacaacgugcugagcacguucaucuccgccgcgcggcagggguucguggacagcgacgucgagaccaaggacgugguggagugccucaagcugucccaccagagcgacaucgaggucaccggcgacuccugcaacaacuacaugcugaccuacaacaagguggagaacaugacgccccgcgaccucggggccugcaucgacugcagcgcccggcacaucaacgcccagguggccaagucccacaacaucgcgcugaucuggaacgucaaggacuucaugagccuguccgagcagcuccgcaagcagauccggagcgccgccaagaagaacaaccugcccuucaagcugaccugcgccaccacccgccagguggugaacgucgugacgaccaagaucgcccucaagggcgggugaggacuagucccuguucccagagcccacuuuuuuuucuuuuuuugaaauaaaauagccugucuuucagaucucaaaggcucuuuucagagccaccaaaaaaaaaaaaaaaaaaaaaaaaaaaaaaaaaaaaaaaaaaaaaaaaaaaaaaaaaaaaaaaaaaaaaaaaaaaaaaaaaaaaaaaaaaaaaaaaaaaaa

SEQ ID NO: 19537 - RNA, 6113 nt, Artificial Sequence
  SARS-CoV-2__MT890230.1__non-structural protein 3 (NSP3) mRNA gc
aggagagucccgcagucggcguccagcggcucugcuuguucgugugugugucguugcaggccuuauucaagcuuaccauggcccccaccaaggugaccuucggcgacgacacggucaucgaggugcagggguacaagagcgugaacaucaccuucgagcuggacgagcgcaucgacaagguccucaacgagaagugcuccgccuacaccguggagcugggcaccgaggugaacgaguucgcgugcgucguggccgacgccgugaucaagacgcugcagccggucagcgagcuccugaccccccuggggaucgaccucgacgagugguccauggccaccuacuaccuguucgacgagagcggcgaguucaagcuggccucccacauguacugcagcuucuacccccccgacgaggacgaggaggagggggacugcgaggaggaggaguucgagccguccacccaguacgaguacggcacggaggacgacuaccagggcaagccccucgaguucggggcgaccagcgccgcccugcagcccgaggaggagcaggaggaggacuggcuggacgacgacucccagcagaccgugggccagcaggacgggagcgaggacaaccagaccacgaccauccagaccaucguggagguccagccccagcucgagauggagcugaccccgguggugcagacgaucgaggucaacuccuucagcggcuaccugaagcucaccgacaacguguacaucaagaacgccgacaucguggaggaggcgaagaaggucaagcccaccgugguggucaacgccgccaacguguaccugaagcacgggggcggcguggccggggcccugaacaaggcgaccaacaacgccaugcaggucgaguccgacgacuacaucgccacgaacggcccccucaagguggggggcagcugcguccuguccggccacaaccuggccaagcacugccuccacgugguggggcccaacgucaacaagggcgaggacauccagcugcugaagagcgccuacgagaacuucaaccagcacgaggugcuccuggcgccgcugcucuccgccgggaucuucggcgccgaccccauccacagccugcgggugugcgucgacaccgugcgcaccaacguguaccuggccgucuucgacaagaaccucuacgacaagcugguguccagcuuccuggagaugaagagcgagaagcagguggagcagaagaucgccgagauccccaaggaggaggucaagcccuucaucaccgaguccaagccgagcguggagcagcggaagcaggacgacaagaagaucaaggcgugcguggaggaggucacgaccacccucgaggagaccaaguuccugacggagaaccugcuccuguacaucgacaucaacgggaaccugcaccccgacuccgccacccucgugagcgacaucgacaucaccuuccugaagaaggacgcccccuacaucgugggcgacgucgugcaggagggcgugcugaccgccgucgugauccccacgaagaaggccgggggcaccaccgagaugcucgcgaaggcccugcgcaaggugccgaccgacaacuacaucacgaccuaccccgggcagggccugaacggguacaccgucgaggaggccaagaccgugcucaagaagugcaaguccgccuucuacauccugcccagcaucaucuccaacgagaagcaggagauccugggcaccgugagcuggaaccuccgggagaugcuggcgcacgccgaggagacgcgcaagcugaugcccgucugcguggagaccaaggccaucguguccaccauccagcggaaguacaagggcaucaagauccaggagggggucguggacuacggcgcccgcuucuacuucuacaccagcaagacgaccguggccucccugaucaacacccucaacgaccugaacgagacccuggucacgaugccgcucggguacgugacccacggccugaaccuggaggaggcggcccgguacaugcgcagccucaaggugcccgccaccgucuccgugagcucccccgacgccgugaccgccuacaacggguaccugacgagcuccagcaagacccccgaggagcacuucaucgagaccaucucccuggcgggcagcuacaaggacuggagcuacuccggccagagcacccagcucgggaucgaguuccugaagcggggcgacaaguccgucuacuacacgagcaacccgaccaccuuccaccuggacggggaggugaucaccuucgacaaccucaagacgcugcugucccuccgcgaggugcggaccaucaaggucuucaccaccguggacaacaucaaccugcacacgcagguggucgacaugagcaugaccuacggccagcaguucggccccaccuaccuggacggggccgacgugaccaagaucaagccccacaacucccacgagggcaagacguucuacgugcucccgaacgacgacacccugcgcgucgaggccuucgaguacuaccacaccaccgaccccagcuuccuggggcgguacauguccgcccucaaccacacgaagaaguggaaguacccccaggugaacggccugaccagcaucaagugggccgacaacaacugcuaccuggcgaccgcccuccugacccugcagcagaucgagcucaaguucaaccccccggcccugcaggacgccuacuaccgcgcgcgggccggggaggccgccaacuucugcgcccugauccucgcguacugcaacaagacggugggcgagcugggcgacguccgcgagaccauguccuaccuguuccagcacgccaaccucgacagcugcaagcgggugcugaacgucgugugcaagaccugcgggcagcagcagaccacccugaagggcguggaggccgucauguacauggggacgcucuccuacgagcaguucaagaagggcgugcagauccccugcaccugcgggaagcaggccaccaaguaccuggugcagcaggagagcuccuucgucaugaugagcgccccccccgcgcaguacgagcugaagcacggcaccuucacgugcgccuccgaguacaccggcaacuaccagugcgggcacuacaagcacaucaccagcaaggagacccucuacugcaucgacggcgcccugcugacgaagagcuccgaguacaaggggccgaucaccgacguguucuacaaggagaacagcuacaccaccacgaucaagcccgugaccuacaagcucgacggcgucgugugcaccgagaucgaccccaagcuggacaacuacuacaagaaggacaacuccuacuucaccgagcagcccaucgaccuggugccgaaccagcccuaccccaacgccagcuucgacaacuucaaguucgucugcgacaacaucaaguucgccgacgaccucaaccagcugacgggguacaagaagcccgcgucccgcgagcugaaggugaccuucuucccggaccucaacggcgacguggucgccaucgacuacaagcacuacacccccagcuucaagaagggcgccaagcugcugcacaagcccaucguguggcacgugaacaacgccaccaacaaggcgacguacaagcccaacaccuggugcauccggugccucugguccaccaagccggucgagaccagcaacuccuucgacgugcugaagagcgaggacgcccaggggauggacaaccuggccugcgaggaccucaagcccguguccgaggaggucguggagaaccccacgauccagaaggacgugcuggagugcaacgucaagaccaccgagguggugggcgacaucauccugaagcccgccaacaacagccucaagaucaccgaggaggucgggcacacggaccugauggccgcguacguggacaacuccagccugaccaucaagaagccgaacgagcucucccgcgugcugggccugaagacccucgccacccacgggcuggccgccgucaacagcgugcccugggacacgaucgccaacuacgcgaagcccuuccugaacaagguggucuccaccaccaccaacaucgugacgcgcugccucaaccgggugugcaccaacuacaugccguacuucuucacccugcugcuccagcugugcaccuucacccgcagcacgaacucccggaucaaggccagcaugcccaccaccaucgccaagaacaccgucaagagcgugggcaaguucugccuggaggccuccuucaacuaccucaagagccccaacuucuccaagcugaucaacaucaucaucugguuccugcuccugagcgugugccugggcucccucaucuacagcacggccgcgcuggggguccugauguccaaccucggcaugcccagcuacugcaccggguaccgcgagggcuaccugaacuccaccaacgugaccaucgccacguacugcaccggcagcaucccgugcuccgugugccugagcgggcucgacucccuggacaccuaccccagccuggagaccauccagaucacgaucuccagcuucaagugggaccucaccgccuucggccuggucgccgagugguuccuggccuacauccucuucacccgguucuucuacgugcuggggcuggcggccaucaugcagcucuucuucuccuacuucgccgugcacuucaucagcaacuccuggcugauguggcugaucaucaaccugguccagauggcccccaucagcgcgauggugcgcauguacaucuucuucgccagcuucuacuacguguggaaguccuacguccacgugguggacggcugcaacagcuccaccugcaugaugugcuacaagcggaaccgcgccacgcgggucgagugcaccaccaucgugaacgggguccgccggagcuucuacguguacgccaacggcggcaagggguucugcaagcuccacaacuggaacugcgugaacugcgacaccuucugcgccggcuccacguucaucagcgacgaggucgcgcgcgaccugucccugcaguucaagcggcccaucaacccgaccgaccagagcuccuacaucguggacagcgugaccgucaagaacggguccauccaccucuacuucgacaaggccggccagaagaccuacgagcgccacagccugucccacuucgugaaccuggacaaccuccgggccaacaacacgaaggggagccugcccaucaacgugaucgucuucgacggcaaguccaagugcgaggagagcuccgccaagagcgccuccguguacuacagccagcugaugugccagcccauccuccugcuggaccaggcgcucgugagcgacgucggcgacuccgccgagguggccgugaagauguucgacgccuacgucaacaccuucagcuccaccuucaacgugcccauggagaagcugaagacccugguggccacggcggaggccgagcucgccaagaacgucagccuggacaacgugcuguccaccuucaucagcgccgcgcgccagggguucguggacuccgacgucgagaccaaggacgugguggagugccucaagcugagccaccaguccgacaucgaggucaccggcgacagcugcaacaacuacaugcugacguacaacaagguggagaacaugaccccgcgggaccucggggccugcaucgacugcuccgcccgccacaucaacgcccagguggccaagagccacaacaucgcgcugaucuggaacgucaaggacuucaugucccugagcgagcagcuccggaagcagauccgcuccgccgccaagaagaacaaccugcccuucaagcugaccugcgccaccacgcgccagguggugaacgucgugaccaccaagaucgcccucaagggcgggugaggacuagucccuguucccagagcccacuuuuuuuucuuuuuuugaaauaaaauagccugucuuucagaucucaaaggcucuuuucagagccaccaaaaaaaaaaaaaaaaaaaaaaaaaaaaaaaaaaaaaaaaaaaaaaaaaaaaaaaaaaaaaaaaaaaaaaaaaaaaaaaaaaaaaaaaaaaaaaaaaaaaa

SEQ ID NO: 19538 - RNA, 6113 nt, Artificial Sequence
  SARS-CoV-2__MT890285.1__non-structural protein 3 (NSP3) mRNA gc
aggagagucccgcagucggcguccagcggcucugcuuguucgugugugugucguugcaggccuuauucaagcuuaccauggcccccaccaaggugaccuucggcgacgacacggucaucgaggugcagggguacaagagcgugaacaucaccuucgagcuggacgagcgcaucgacaagguccucaacgagaagugcuccgccuacaccguggagcugggcaccgaggugaacgaguucgcgugcgucguggccgacgccgugaucaagacgcugcagccggucagcgagcuccugaccccccuggggaucgaccucgacgagugguccauggccaccuacuaccuguucgacgagagcggcgaguucaagcuggccucccacauguacugcagcuucuacccccccgacgaggacgaggaggagggggacugcgaggaggaggaguucgagccguccacccaguacgaguacggcacggaggacgacuaccagggcaagccccucgaguucggggcgaccagcgccgcccugcagcccgaggaggagcaggaggaggacuggcuggacgacgacucccagcagaccgugggccagcaggacgggagcgaggacaaccagaccacgaccauccagaccaucguggagguccagccccagcucgagauggagcugaccccgguggugcagacgaucgaggucaacuccuucagcggcuaccugaagcucaccgacaacguguacaucaagaacgccgacaucguggaggaggcgaagaaggucaagcccaccgugguggucaacgccgccaacguguaccugaagcacgggggcggcguggccggggcccugaacaaggcgaccaacaacgccaugcaggucgaguccgacgacuacaucgccacgaacggcccccucaagguggggggcagcugcguccuguccggccacaaccuggccaagcacugccuccacgugguggggcccaacgucaacaagggcgaggacauccagcugcugaagagcgccuacgagaacuucaaccagcacgaggugcuccuggcgccgcugcucuccgccgggaucuucggcgccgaccccauccacagccugcgggugugcgucgacaccgugcgcaccaacguguaccuggccgucuucgacaagaaccucuacgacaagcugguguccagcuuccuggagaugaagagcgagaagcagguggagcagaagaucgccgagauccccaaggaggaggucaagcccuucaucaccgaguccaagccgagcguggagcagcggaagcaggacgacaagaagaucaaggcgugcguggaggaggucacgaccacccucgaggagaccaaguuccugacggagaaccugcuccuguacaucgacaucaacgggaaccugcaccccgacuccgccacccucgugagcgacaucgacaucaccuuccugaagaaggacgcccccuacaucgugggcgacgucgugcaggagggcgugcugaccgccgucgugauccccacgaagaaggccgggggcaccaccgagaugcucgcgaaggcccugcgcaaggugccgaccgacaacuacaucacgaccuaccccgggcagggccugaacggguacaccgucgaggaggccaagaccgugcucaagaagugcaaguccgccuucuacauccugcccagcaucaucuccaacgagaagcaggagauccugggcaccgugagcuggaaccuccgggagaugcuggcgcacgccgaggagacgcgcaagcugaugcccgucugcguggagaccaaggccaucguguccaccauccagcggaaguacaagggcaucaagauccaggagggggucguggacuacggcgcccgcuucuacuucuacaccagcaagacgaccguggccucccugaucaacacccucaacgaccugaacgagacccuggucacgaugccgcucggguacgugacccacggccugaaccuggaggaggcggcccgguacaugcgcagccucaaggugcccgccaccgucuccgugagcucccccgacgccgugaccgccuacaacggguaccugacgagcuccagcaagacccccgaggagcacuucaucgagaccaucucccuggcgggcagcuacaaggacuggagcuacuccggccagagcacccagcucgggaucgaguuccugaagcggggcgacaaguccgucuacuacacgagcaacccgaccaccuuccaccuggacggggaggugaucaccuucgacaaccucaagacgcugcugucccuccgcgaggugcggaccaucaaggucuucaccaccguggacaacaucaaccugcacacgcagguggucgacaugagcaugaccuacggccagcaguucggccccaccuaccuggacggggccgacgugaccaagaucaagccccacaacucccacgagggcaagacguucuacgugcucccgaacgacgacacccugcgcgucgaggccuucgaguacuaccacaccaccgaccccagcuuccuggggcgguacauguccgcccucaaccacacgaagaaguggaaguacccccaggugaacggccugaccagcaucaagugggccgacaacaacugcuaccuggcgaccgcccuccugacccugcagcagaucgagcucaaguucaaccccccggcccugcaggacgccuacuaccgcgcgcgggccggggaggccgccaacuucugcgcccugauccucgcguacugcaacaagacggugggcgagcugggcgacguccgcgagaccauguccuaccuguuccagcacgccaaccucgacagcugcaagcgggugcugaacgucgugugcaagaccugcgggcagcagcagaccacccugaagggcguggaggccgucauguacauggggacgcucuccuacgagcaguucaagaagggcgugcagauccccugcaccugcgggaagcaggccaccaaguaccuggugcagcaggagagccccuucgucaugauguccgcccccccggcgcaguacgagcugaagcacggcaccuucacgugcgccagcgaguacaccggcaacuaccagugcgggcacuacaagcacaucaccuccaaggagacccucuacugcaucgacggcgcccugcugacgaagagcagcgaguacaaggggcccaucaccgacguguucuacaaggagaacuccuacaccaccacgaucaagcccgugaccuacaagcucgacggcgucgugugcaccgagaucgaccccaagcuggacaacuacuacaagaaggacaacagcuacuucaccgagcagccgaucgaccuggugcccaaccagcccuaccccaacgccuccuucgacaacuucaaguucgucugcgacaacaucaaguucgccgacgaccucaaccagcugacgggguacaagaagccggcgagccgcgagcugaaggugaccuucuuccccgaccucaacggcgacguggucgccaucgacuacaagcacuacacccccuccuucaagaagggcgccaagcugcugcacaagcccaucguguggcacgugaacaacgccaccaacaaggcgacguacaagccgaacaccuggugcauccggugccucuggagcaccaagcccgucgagaccuccaacagcuucgacgugcugaaguccgaggacgcccaggggauggacaaccuggccugcgaggaccucaagcccgugagcgaggaggucguggagaaccccacgauccagaaggacgugcuggagugcaacgucaagaccaccgagguggugggcgacaucauccugaagccggccaacaacucccucaagaucaccgaggaggucgggcacacggaccugauggccgcguacguggacaacagcucccugaccaucaagaagcccaacgagcucagccgcgugcugggccugaagacccucgccacccacgggcuggccgccgucacguccgugcccugggacaccaucgccaacuacgcgaagccguuccugaacaagguggucagcaccaccacgaacaucgugacccgcugccucaaccgggugugcaccaacuacaugcccuacuucuucacccugcugcuccagcugugcaccuucacgcgcuccaccaacagccggaucaaggccuccaugcccaccaccaucgccaagaacacggucaagagcgugggcaaguucugccuggaggccagcuucaacuaccucaagucccccaacuucagcaagcugaucaacaucaucaucugguuccugcuccuguccgugugccugggcagccucaucuacuccaccgccgcgcuggggguccugaugagcaaccucggcaugccguccuacugcaccggguaccgcgagggcuaccugaacagcaccaacgugacgaucgccaccuacugcaccggcuccauccccugcagcgugugccuguccgggcucgacagccuggacaccuaccccucccuggagacgauccagaucaccaucagcuccuucaagugggaccucaccgccuucggccuggucgccgagugguuccuggccuacauccucuucacccgguucuucuacgugcuggggcuggcggccaucaugcagcucuucuucagcuacuucgccgugcacuucaucuccaacagcuggcugauguggcugaucaucaaccugguccagauggcccccaucuccgcgauggugcgcauguacaucuucuucgccagcuucuacuacguguggaagagcuacguccacgugguggacggcugcaacuccagcacgugcaugaugugcuacaagcggaaccgcgccacccgggucgagugcaccaccaucgugaacgggguccgccgguccuucuacguguacgccaacggcggcaagggguucugcaagcuccacaacuggaacugcgugaacugcgacacguucugcgccggcagcaccuucaucuccgacgaggucgcgcgcgaccugagccugcaguucaagcggccgaucaaccccaccgaccaguccagcuacaucguggacuccgugaccgucaagaacgggagcauccaccucuacuucgacaaggccggccagaagacguacgagcgccacucccugagccacuucgugaaccuggacaaccuccgggccaacaacaccaaggggucccugcccaucaacgugaucgucuucgacggcaagagcaagugcgaggaguccagcgccaaguccgccagcguguacuacucccagcugaugugccagcccauccuccugcuggaccaggcgcucgugagcgacgucggcgacagcgccgagguggccgugaagauguucgacgccuacgucaacaccuucuccagcaccuucaacgugccgauggagaagcugaagacgcugguggccaccgcggaggccgagcucgccaagaacgucucccuggacaacgugcugagcaccuucaucuccgccgcgcgccagggguucguggacagcgacgucgagaccaaggacgugguggagugccucaagcugucccaccagagcgacaucgaggucacgggcgacuccugcaacaacuacaugcugaccuacaacaagguggagaacaugaccccccgggaccucggggccugcaucgacugcagcgcccgccacaucaacgcccagguggccaagucccacaacaucgcgcugaucuggaacgucaaggacuucaugagccuguccgagcagcuccggaagcagauccgcagcgccgccaagaagaacaaccugcccuucaagcugaccugcgccacgacccgccagguggugaacgucgugaccaccaagaucgcccucaagggcgggugaggacuagucccuguucccagagcccacuuuuuuuucuuuuuuugaaauaaaauagccugucuuucagaucucaaaggcucuuuucagagccaccaaaaaaaaaaaaaaaaaaaaaaaaaaaaaaaaaaaaaaaaaaaaaaaaaaaaaaaaaaaaaaaaaaaaaaaaaaaaaaaaaaaaaaaaaaaaaaaaaaaaa

SEQ ID NO: 19539 - RNA, 6113 nt, Artificial Sequence
  SARS-CoV-2__MT890295.1__non-structural protein 3 (NSP3) mRNA gc
aggagagucccgcagucggcguccagcggcucugcuuguucgugugugugucguugcaggccuuauucaagcuuaccauggcccccaccaaggugaccuucggcgacgacacggucaucgaggugcagggguacaagagcgugaacaucaccuucgagcuggacgagcgcaucgacaagguccucaacgagaagugcuccgccuacaccguggagcugggcaccgaggugaacgaguucgcgugcgucguggccgacgccgugaucaagacgcugcagccggucagcgagcuccugaccccccuggggaucgaccucgacgagugguccauggccaccuacuaccuguucgacgagagcggcgaguucaagcuggccucccacauguacugcagcuucuacccccccgacgaggacgaggaggagggggacugcgaggaggaggaguucgagccguccacccaguacgaguacggcacggaggacgacuaccagggcaagccccucgaguucggggcgaccagcgccgcccugcagcccgaggaggagcaggaggaggacuggcuggacgacgacucccagcagaccgugggccagcaggacgggagcgaggacaaccacaccacgaccauccagaccaucguggagguccagccccagcucgagauggagcugaccccgguggugcagacgaucgaggucaacuccuucagcggcuaccugaagcucaccgacaacguguacaucaagaacgccgacaucguggaggaggcgaagaaggucaagcccaccgugguggucaacgccgccaacguguaccugaagcacgggggcggcguggccggggcccugaacaaggcgaccaacaacgccaugcaggucgaguccgacgacuacaucgccacgaacggcccccucaagguggggggcagcugcguccuguccggccacaaccuggccaagcacugccuccacgugguggggcccaacgucaacaagggcgaggacauccagcugcugaagagcgccuacgagaacuucaaccagcacgaggugcuccuggcgccgcugcucuccgccgggaucuucggcgccgaccccauccacagccugcgggugugcgucgacaccgugcgcaccaacguguaccuggccgucuucgacaagaaccucuacgacaagcugguguccagcuuccuggagaugaagagcgagaagcagguggagcagaagaucgccgagauccccaaggaggaggucaagcccuucaucaccgaguccaagccgagcguggagcagcggaagcaggacgacaagaagaucaaggcgugcguggaggaggucacgaccacccucgaggagaccaaguuccugacggagaaccugcuccuguacaucgacaucaacgggaaccugcaccccgacuccgccacccucgugagcgacaucgacaucaccuuccugaagaaggacgcccccuacaucgugggcgacgucgugcaggagggcgugcugaccgccgucgugauccccacgaagaaggccgggggcaccaccgagaugcucgcgaaggcccugcgcaaggugccgaccgacaacuacaucacgaccuaccccgggcagggccugaacggguacaccgucgaggaggccaagaccgugcucaagaagugcaaguccgccuucuacauccugcccagcaucaucuccaacgagaagcaggagauccugggcaccgugagcuggaaccuccgggagaugcuggcgcacgccgaggagacgcgcaagcugaugcccgucugcguggagaccaaggccaucguguccaccauccagcggaaguacaagggcaucaagauccaggagggggucguggacuacggcgcccgcuucuacuucuacaccagcaagacgaccguggccucccugaucaacacccucaacgaccugaacgagacccuggucacgaugccgcucggguacgugacccacggccugaaccuggaggaggcggcccgguacaugcgcagccucaaggugcccgccaccgucuccgugagcucccccgacgccgugaccgccuacaacggguaccugacgagcuccagcaagacccccgaggagcacuucaucgagaccaucucccuggcgggcagcuacaaggacuggagcuacuccggccagagcacccagcucgggaucgaguuccugaagcggggcgacaaguccgucuacuacacgagcaacccgaccaccuuccaccuggacggggaggugaucaccuucgacaaccucaagacgcugcugucccuccgcgaggugcggaccaucaaggucuucaccaccguggacaacaucaaccugcacacgcagguggucgacaugagcaugaccuacggccagcaguucggccccaccuaccuggacggggccgacgugaccaagaucaagccccacaacucccacgagggcaagacguucuacgugcucccgaacgacgacacccugcgcgucgaggccuucgaguacuaccacaccaccgaccccagcuuccuggggcgguacauguccgcccucaaccacacgaagaaguggaaguacccccaggugaacggccugaccagcaucaagugggccgacaacaacugcuaccuggcgaccgcccuccugacccugcagcagaucgagcucaaguucaaccccccggcccugcaggacgccuacuaccgcgcgcgggccggggaggccgccaacuucugcgcccugauccucgcguacugcaacaagacggugggcgagcugggcgacguccgcgagaccauguccuaccuguuccagcacgccaaccucgacagcugcaagcgggugcugaacgucgugugcaagaccugcgggcagcagcagaccacccugaagggcguggaggccgucauguacauggggacgcucuccuacgagcaguucaagaagggcgugcagauccccugcaccugcgggaagcaggccaccaaguaccuggugcagcaggagagccccuucgucaugauguccgcccccccggcgcaguacgagcugaagcacggcaccuucacgugcgccagcgaguacaccggcaacuaccagugcgggcacuacaagcacaucaccuccaaggagacccucuacugcaucgacggcgcccugcugacgaagagcagcgaguacaaggggcccaucaccgacguguucuacaaggagaacuccuacaccaccacgaucaagcccgugaccuacaagcucgacggcgucgugugcaccgagaucgaccccaagcuggacaacuacuacaagaaggacaacagcuacuucaccgagcagccgaucgaccuggugcccaaccagcccuaccccaacgccuccuucgacaacuucaaguucgucugcgacaacaucaaguucgccgacgaccucaaccagcugacgggguacaagaagccggcgagccgcgagcugaaggugaccuucuuccccgaccucaacggcgacguggucgccaucgacuacaagcacuacacccccuccuucaagaagggcgccaagcugcugcacaagcccaucguguggcacgugaacaacgccaccaacaaggcgacguacaagccgaacaccuggugcauccggugccucuggagcaccaagcccgucgagaccuccaacagcuucgacgugcugaaguccgaggacgcccaggggauggacaaccuggccugcgaggaccucaagcccgugagcgaggaggucguggagaaccccacgauccagaaggacgugcuggagugcaacgucaagaccaccgagguggugggcgacaucauccugaagccggccaacaacucccucaagaucaccgaggaggucgggcacacggaccugauggccgcguacguggacaacagcucccugaccaucaagaagcccaacgagcucagccgcgugcugggccugaagacccucgccacccacgggcuggccgccgucaacuccgugcccugggacacgaucgccaacuacgcgaagccguuccugaacaagguggucagcaccaccaccaacaucgugacgcgcugccucaaccgggugugcaccaacuacaugcccuacuucuucacccugcugcuccagcugugcaccuucacccgcuccacgaacagccggaucaaggccuccaugcccaccaccaucgccaagaacaccgucaagagcgugggcaaguucugccuggaggccagcuucaacuaccucaagucccccaacuucagcaagcugaucaacaucaucaucugguuccugcuccuguccgugugccugggcagccucaucuacuccacggccgcgcuggggguccugaugagcaaccucggcaugccguccuacugcaccggguaccgcgagggcuaccugaacagcaccaacgugaccaucgccacguacugcaccggcuccauccccugcagcgugugccuguccgggcucgacagccuggacaccuaccccucccuggagaccauccagaucacgaucagcuccuucaagugggaccucaccgccuucggccuggucgccgagugguuccuggccuacauccucuucacccgguucuucuacgugcuggggcuggcggccaucaugcagcucuucuucagcuacuucgccgugcacuucaucuccaacagcuggcugauguggcugaucaucaaccugguccagauggcccccaucuccgcgauggugcgcauguacaucuucuucgccagcuucuacuacguguggaagagcuacguccacgugguggacggcugcaacuccagcaccugcaugaugugcuacaagcggaaccgcgccacgcgggucgagugcaccaccaucgugaacgggguccgccgguccuucuacguguacgccaacggcggcaagggguucugcaagcuccacaacuggaacugcgugaacugcgacaccuucugcgccggcagcacguucaucuccgacgaggucgcgcgcgaccugagccugcaguucaagcggccgaucaaccccaccgaccaguccagcuacaucguggacuccgugaccgucaagaacgggagcauccaccucuacuucgacaaggccggccagaagaccuacgagcgccacucccugagccacuucgugaaccuggacaaccuccgggccaacaacacgaaggggucccugcccaucaacgugaucgucuucgacggcaagagcaagugcgaggaguccagcgccaaguccgccagcguguacuacucccagcugaugugccagcccauccuccugcuggaccaggcgcucgugagcgacgucggcgacagcgccgagguggccgugaagauguucgacgccuacgucaacaccuucuccagcaccuucaacgugccgauggagaagcugaagacccugguggccacggcggaggccgagcucgccaagaacgucucccuggacaacgugcugagcaccuucaucuccgccgcgcgccagggguucguggacagcgacgucgagaccaaggacgugguggagugccucaagcugucccaccagagcgacaucgaggucaccggcgacuccugcaacaacuacaugcugacguacaacaagguggagaacaugaccccccgggaccucggggccugcaucgacugcagcgcccgccacaucaacgcccagguggccaagucccacaacaucgcgcugaucuggaacgucaaggacuucaugagccuguccgagcagcuccggaagcagauccgcagcgccgccaagaagaacaaccugcccuucaagcugaccugcgccaccacgcgccagguggugaacgucgugaccaccaagaucgcccucaagggcgggugaggacuagucccuguucccagagcccacuuuuuuuucuuuuuuugaaauaaaauagccugucuuucagaucucaaaggcucuuuucagagccaccaaaaaaaaaaaaaaaaaaaaaaaaaaaaaaaaaaaaaaaaaaaaaaaaaaaaaaaaaaaaaaaaaaaaaaaaaaaaaaaaaaaaaaaaaaaaaaaaaaaaa

SEQ ID NO: 19540 - RNA, 6113 nt, Artificial Sequence
  SARS-CoV-2__MT890338.1__non-structural protein 3 (NSP3) mRNA gc
aggagagucccgcagucggcguccagcggcucugcuuguucgugugugugucguugcaggccuuauucaagcuuaccauggcccccaccaaggugaccuucggcgacgacacggucaucgaggugcagggguacaagagcgugaacaucaccuucgagcuggacgagcgcaucgacaagguccucaacgagaagugcuccgccuacaccguggagcugggcaccgaggugaacgaguucgcgugcgucguggccgacgccgugaucaagacgcugcagccggucagcgagcuccugaccccccuggggaucgaccucgacgagugguccauggccaccuacuaccuguucgacgagagcggcgaguucaagcuggccucccacauguacugcagcuucuacccccccgacgaggacgaggaggagggggacugcgaggaggaggaguucgagccguccacccaguacgaguacggcacggaggacgacuaccagggcaagccccucgaguucggggcgaccagcgccgcccugcagcccgaggaggagcaggaggaggacuggcuggacgacgacucccagcagaccgugggccagcaggacgggagcgaggacaaccagaccacgaccauccagaccaucguggagguccagccccagcucgagauggagcugaccccgguggugcagacgaucgaggucaacuccuucagcggcuaccugaagcucaccgacaacguguacaucaagaacgccgacaucguggaggaggcgaagaaggucaagcccaccgugguggucaacgccgccaacguguaccugaagcacgggggcggcguggccggggcccugaacaaggcgaccaacaacgccaugcaggucgaguccgacgacuacaucgccacgaacggcccccucaagguggggggcagcugcguccuguccggccacaaccuggccaagcacugccuccacgugguggggcccaacgucaacaagggcgaggacauccagcugcugaagagcgccuacgagaacuucaaccagcacgaggugcuccuggcgccgcugcucuccgccgggaucuucggcgccgaccccauccacagccugcgggugugcgucgacaccgugcgcaccaacguguaccuggccgucuucgacaagaaccucuacgacaagcugguguccagcuuccuggagaugaagagcgagaagcagguggagcagaagaucgccgagauccccaaggaggaggucaagcccuucaucaccgaguccaagccgagcguggagcagcggaagcaggacgacaagaagaucaaggcgugcguggaggaggucacgaccacccucgaggagaccaaguuccugacggagaaccugcuccuguacaucgacaucaacgggaaccugcaccccgacuccgccacccucgugagcgacaucgacaucaccuuccugaagaaggacgcccccuacaucgugggcgacgucgugcaggagggcgugcugaccgccgucgugauccccacgaagaaggccgggggcaccaccgagaugcucgcgaaggcccugcgcaaggugccgaccgacaacuacaucacgaccuaccccgggcagggccugaacggguacaccgucgaggaggccaagaccgugcucaagaagugcaaguccgccuucuacauccugcccagcaucaucuccaacgagaagcaggagauccugggcaccgugagcuggaaccuccgggagaugcuggcgcacgccgaggagacgcgcaagcugaugcccgucugcguggagaccaaggccaucguguccaccauccagcggaaguacaagggcaucaagauccaggagggggucguggacuacggcgcccgcuucuacuucuacaccagcaagacgaccguggccucccugaucaacacccucaacgaccugaacgagacccuggucacgaugccgcucggguacgugacccacggccugaaccuggaggaggcggcccgguacaugcgcagccucaaggugcccgccaccgucuccgugagcucccccgacgccgugaccgccuacaacggguaccugacgagcuccagcaagacccccgaggagcacuucaucgagaccaucucccuggcgggcagcuacaaggacuggagcuacuccggccagagcacccagcucgggaucgaguuccugaagcggggcgacaaguccgucuacuacacgagcaacccgaccaccuuccaccuggacggggaggugaucaccuucgacaaccucaagacgcugcugucccuccgcgaggugcggaccaucaaggucuucaccaccguggacaacaucaaccugcacacgcagguggucgacaugagcaugaccuacggccagcaguucggccccaccuaccuggacggggccgacgugaccaagaucaagccccacaacucccacgagggcaagacguucuacgugcucccgaacgacgacacccugcgcgucgaggccuucgaguacuaccacaccaccgaccccagcuuccuggggcgguacauguccgcccucaaccacacgaagaaguggaaguacccccaggugaacggccugaccagcaucaagugggccgacaacaacugcuaccuggcgaccgcccuccugacccugcagcagaucgagcucaaguucaaccccccggcccugcaggacgccuacuaccgcgcgcgggccggggaggccgccaacuucugcgcccugauccucgcguacugcaacaagacggugggcgagcugggcgacguccgcgagaccauguccuaccuguuccagcacgccaaccucgacagcugcaagcgggugcugaacgucgugugcaagaccugcgggcagcagcagaccacccugaagggcguggaggccgucauguacauggggacgcucuccuacgagcaguucaagaagggcgugcagauccccugcaccugcgggaagcaggccaccaaguaccuggugcagcaggagagccccuucgucaugauguccgcccccccggcgcaguacgagcugaagcacggcaccuucacgugcgccagcgaguacaccggcaacuaccagugcgggcacuacaagcacaucaccuccaaggagacccucuacugcaucgacggcgcccugcugacgaagagcagcgaguacaaggggcccaucaccgacguguucuacaaggagaacuccuacaccaccacgaucaagcccgugaccuacaagcucgacggcgucgugugcaccgagaucgaccccaagcuggacaacuacuacaagaaggacaacagcuacuucaccgagcagccgaucgaccuggugcccaaccagcccuaccccaacgccggguucgacaacuucaaguucgucugcgacaacaucaaguucgccgacgaccucaaccagcugacgggcuacaagaagccggcgucccgcgagcugaaggugaccuucuuccccgaccucaacggcgacguggucgccaucgacuacaagcacuacacccccagcuucaagaagggggccaagcugcugcacaagcccaucguguggcacgugaacaacgccaccaacaaggcgacguacaagccgaacaccuggugcauccggugccucugguccaccaagcccgucgagaccagcaacuccuucgacgugcugaagagcgaggacgcccagggcauggacaaccuggccugcgaggaccucaagcccguguccgaggaggucguggagaaccccacgacccagaaggacgugcuggagugcaacgucaagaccaccgagguggugggggacaucauccugaagccggccaacaacagccucaagaucacggaggaggucggccacaccgaccugauggccgcguacguggacaacuccagccugaccaucaagaagcccaacgagcucucccgcgugcuggggcugaagacccucgccacgcacggccuggccgccgucaacagcgugcccugggacaccaucgccaacuacgcgaagccguuccugaacaagguggucuccaccaccacgaacaucgugacccgcugccucaaccgggugugcaccaacuacaugcccuacuucuucacccugcugcuccagcugugcaccuucacgcgcagcaccaacucccggaucaaggccagcaugcccaccaccaucgccaagaacacggucaaguccgugggcaaguucugccuggaggccagcuucaacuaccucaagagccccaacuucuccaagcugaucaacaucaucaucugguuccugcuccugagcgugugccuggggucccucaucuacagcaccgccgcgcugggcguccugauguccaaccucgggaugccgagcuacugcaccggcuaccgcgagggcuaccugaacuccaccaacgugacgaucgccaccuacugcaccgggagcauccccugcuccgugugccugagcggccucgacucccuggacaccuaccccagccuggagacgauccagaucaccaucuccagcuucaagugggaccucaccgccuucgggcuggucgccgagugguuccuggccuacauccucuucacccgguucuucuacgugcugggccuggcggccaucaugcagcucuucuucuccuacuucgccgugcacuucaucagcaacuccuggcugauguggcugaucaucaaccugguccagauggcccccaucagcgcgauggugcgcauguacaucuucuucgccuccuucuacuacguguggaagagcuacguccacgugguggacgggugcaacagcuccacgugcaugaugugcuacaagcggaaccgcgccacccgggucgagugcaccaccaucgugaacggcguccgccggagcuucuacguguacgccaacggcgggaagggcuucugcaagcuccacaacuggaacugcgugaacugcgacacguucugcgccggguccaccuucaucagcgacgaggucgcgcgcgaccugucccugcaguucaagcggccgaucaaccccaccgaccagagcuccuacaucguggacagcgugaccgucaagaacggcuccauccaccucuacuucgacaaggccgggcagaagacguacgagcgccacagccugucccacuucgugaaccuggacaaccuccgggccaacaacaccaagggcagccugcccaucaacgugaucgucuucgacggcaaguccaagugcgaggagagcuccgccaagagcgccuccguguacuacagccagcugaugugccagcccauccuccugcuggaccaggcgcucguguccgacgucggggacagcgccgagguggccgugaagauguucgacgccuacgucaacaccuucagcuccaccuucaacgugccgauggagaagcugaagacgcugguggccaccgcggaggccgagcucgccaagaacgucagccuggacaacgugcuguccaccuucaucagcgccgcgcgccagggcuucguggacuccgacgucgagaccaaggacgugguggagugccucaagcugagccaccaguccgacaucgaggucacgggggacagcugcaacaacuacaugcugaccuacaacaagguggagaacaugaccccccgggaccucggcgccugcaucgacugcuccgcccgccacaucaacgcccagguggccaagagccacaacaucgcgcugaucuggaacgucaaggacuucaugucccugagcgagcagcuccggaagcagauccgcuccgccgccaagaagaacaaccugcccuucaagcugaccugcgccacgacccgccagguggugaacgucgugaccaccaagaucgcccucaaggggggcugaggacuagucccuguucccagagcccacuuuuuuuucuuuuuuugaaauaaaauagccugucuuucagaucucaaaggcucuuuucagagccaccaaaaaaaaaaaaaaaaaaaaaaaaaaaaaaaaaaaaaaaaaaaaaaaaaaaaaaaaaaaaaaaaaaaaaaaaaaaaaaaaaaaaaaaaaaaaaaaaaaaaa

SEQ ID NO: 19541 - RNA, 6113 nt, Artificial Sequence
  SARS-CoV-2__MT890340.1__non-structural protein 3 (NSP3) mRNA gc
aggagagucccgcagucggcguccagcggcucugcuuguucgugugugugucguugcaggccuuauucaagcuuaccauggcccccaccaaggugaccuucggcgacgacacggucaucgaggugcagggguacaagagcgugaacaucaccuucgagcuggacgagcgcaucgacaagguccucaacgagaagugcuccgccuacaccguggagcugggcaccgaggugaacgaguucgcgugcgucguggccgacgccgugaucaagacgcugcagccggucagcgagcuccugaccccccuggggaucgaccucgacgagugguccauggccaccuacuaccuguucgacgagagcggcgaguucaagcuggccucccacauguacugcagcuucuacccccccgacgaggacgaggaggagggggacugcgaggaggaggaguucgagccguccacccaguacgaguacggcacggaggacgacuaccagggcaagccccucgaguucggggcgaccagcgccgcccugcagcccgaggaggagcaggaggaggacuggcuggacgacgacucccagcagaccgugggccagcaggacgggagcgaggacaaccagaccacgaccauccagaccaucguggagguccagccccagcucgagauggagcugaccccgguggugcagacgaucgaggucaacuccuucagcggcuaccugaagcucaccgacaacguguacaucaagaacgccgacaucguggaggaggcgaagaaggucaagcccaccgugguggucaacgccgccaacguguaccugaagcacgggggcggcguggccggggcccugaacaaggcgaccaacaacgccaugcaggucgaguccgacgacuacaucgccacgaacggcccccucaagguggggggcagcugcguccuguccggccacaaccuggccaagcacugccuccacgugguggggcccaacgucaacaagggcgaggacauccagcugcugaagagcgccuacgagaacuucaaccagcacgaguuccuccuggcgccgcugcucuccgccgggaucuucggcgccgaccccauccacagccugcgggugugcguggacaccguccgcaccaacguguaccuggccguguucgacaagaaccucuacgacaagcuggucuccagcuuccuggagaugaagagcgagaagcagguggagcagaagaucgccgagauccccaaggaggaggugaagcccuucaucaccgaguccaagccgagcgucgagcagcggaagcaggacgacaagaagaucaaggcgugcguggaggaggugacgaccacccucgaggagaccaaguuccugacggagaaccugcuccuguacaucgacaucaacgggaaccugcaccccgacuccgccacccucgucagcgacaucgacaucaccuuccugaagaaggacgcccccuacaucgugggcgacgugguccaggagggcgugcugaccgccguggucauccccacgaagaaggccgggggcaccaccgagaugcucgcgaaggcccugcgcaaggugccgaccgacaacuacaucacgaccuaccccgggcagggccugaacggguacaccguggaggaggccaagaccguccucaagaagugcaaguccgccuucuacauccugcccagcaucaucuccaacgagaagcaggagauccugggcaccgugagcuggaaccuccgggagaugcuggcgcacgccgaggagacgcgcaagcugaugcccgugugcgucgagaccaaggccaucguguccaccauccagcggaaguacaagggcaucaagauccaggaggggguggucgacuacggcgcccgcuucuacuucuacaccagcaagacgaccguggccucccugaucaacacccucaacgaccugaacgagacccuggugacgaugccgcucggguacgucacccacggccugaaccuggaggaggcggcccgguacaugcgcagccucaaggugcccgccaccguguccgucagcucccccgacgccgugaccgccuacaacggguaccugacgagcuccagcaagacccccgaggagcacuucaucgagaccaucucccuggcgggcagcuacaaggacuggagcuacuccggccagagcacccagcucgggaucgaguuccugaagcggggcgacaaguccguguacuacacgagcaacccgaccaccuuccaccuggacggggaggucaucaccuucgacaaccucaagacgcugcugucccuccgcgaggugcggaccaucaagguguucaccaccgucgacaacaucaaccugcacacgcaggugguggacaugagcaugaccuacggccagcaguucggccccaccuaccuggacggggccgacgucaccaagaucaagccccacaacucccacgagggcaagacguucuacgugcucccgaacgacgacacccugcgcguggaggccuucgaguacuaccacaccaccgaccccagcuuccuggggcgguacauguccgcccucaaccacacgaagaaguggaaguacccccaggucaacggccugaccagcaucaagugggccgacaacaacugcuaccuggcgaccgcccuccugacccugcagcagaucgagcucaaguucaaccccccggcccugcaggacgccuacuaccgcgcgcgggccggggaggccgccaacuucugcgcccugauccucgcguacugcaacaagacggugggcgagcugggcgacgugcgcgagaccauguccuaccuguuccagcacgccaaccucgacagcugcaagcggguccugaacguggucugcaagaccugcgggcagcagcagaccacccugaagggcguggaggccgugauguacauggggacgcucuccuacgagcaguucaagaagggcguccagauccccugcaccugcgggaagcaggccaccaaguaccuggugcagcaggagagccccuucgugaugauguccgcccccccggcgcaguacgagcugaagcacggcaccuucacgugcgccagcgaguacaccggcaacuaccagugcgggcacuacaagcacaucaccuccaaggagacccucuacugcaucgacggcgcccugcugacgaagagcagcgaguacaaggggcccaucaccgacgucuucuacaaggagaacuccuacaccaccacgaucaagcccgugaccuacaagcucgacggcguggucugcaccgagaucgaccccaagcuggacaacuacuacaagaaggacaacagcuacuucaccgagcagccgaucgaccuggugcccaaccagcccuaccccaacgccuccuucgacaacuucaaguucgugugcgacaacaucaaguucgccgacgaccucaaccagcugacgggguacaagaagccggcgagccgcgagcugaaggucaccuucuuccccgaccucaacggcgacgugguggccaucgacuacaagcacuacacccccuccuucaagaagggcgccaagcugcugcacaagcccaucgucuggcacgugaacaacgccaccaacaaggcgacguacaagccgaacaccuggugcauccggugccucuggagcaccaagcccguggagaccuccaacagcuucgacguccugaaguccgaggacgcccaggggauggacaaccuggccugcgaggaccucaagcccgugagcgaggagguggucgagaaccccacgauccagaaggacgugcuggagugcaacgugaagaccaccgaggucgugggcgacaucauccugaagccggccaacaacucccucaagaucaccgaggagguggggcacacggaccugauggccgcguacgucgacaacagcucccugaccaucaagaagcccaacgagcucagccgcgugcugggccugaagacccucgccacccacgggcuggccgccgugaacuccguccccugggacacgaucgccaacuacgcgaagccguuccugaacaagguggugagcaccaccaccaacaucgucacgcgcugccucaaccgggugugcaccaacuacaugcccuacuucuucacccugcugcuccagcugugcaccuucacccgcuccacgaacagccggaucaaggccuccaugcccaccaccaucgccaagaacaccgugaagagcgucggcaaguucugccuggaggccagcuucaacuaccucaagucccccaacuucagcaagcugaucaacaucaucaucugguuccugcuccuguccgugugccugggcagccucaucuacuccacggccgcgcugggggugcugaugagcaaccucggcaugccguccuacugcaccggguaccgcgagggcuaccugaacagcaccaacgucaccaucgccacguacugcaccggcuccauccccugcagcgugugccuguccgggcucgacagccuggacaccuaccccucccuggagaccauccagaucacgaucagcuccuucaagugggaccucaccgccuucggccugguggccgagugguuccuggccuacauccucuucacccgguucuucuacguccuggggcuggcggccaucaugcagcucuucuucagcuacuucgccgugcacuucaucuccaacagcuggcugauguggcugaucaucaaccuggugcagauggcccccaucuccgcgaugguccgcauguacaucuucuucgccagcuucuacuacguguggaagagcuacgugcacgucguggacggcugcaacuccagcaccugcaugaugugcuacaagcggaaccgcgccacgcggguggagugcaccaccaucgucaacggggugcgccgguccuucuacgucuacgccaacggcggcaagggguucugcaagcuccacaacuggaacugcgugaacugcgacaccuucugcgccggcagcacguucaucuccgacgagguggcgcgcgaccugagccugcaguucaagcggccgaucaaccccaccgaccaguccagcuacaucgucgacuccgugaccgugaagaacgggagcauccaccucuacuucgacaaggccggccagaagaccuacgagcgccacucccugagccacuucgucaaccuggacaaccuccgggccaacaacacgaaggggucccugcccaucaacgugaucguguucgacggcaagagcaagugcgaggaguccagcgccaaguccgccagcgucuacuacucccagcugaugugccagcccauccuccugcuggaccaggcgcucgugagcgacgugggcgacagcgccgaggucgccgugaagauguucgacgccuacgugaacaccuucuccagcaccuucaacgucccgauggagaagcugaagacccugguggccacggcggaggccgagcucgccaagaacgugucccuggacaacguccugagcaccuucaucuccgccgcgcgccagggguucguggacagcgacguggagaccaaggacgucguggagugccucaagcugucccaccagagcgacaucgaggugaccggcgacuccugcaacaacuacaugcugacguacaacaaggucgagaacaugaccccccgggaccucggggccugcaucgacugcagcgcccgccacaucaacgcccagguggccaagucccacaacaucgcgcugaucuggaacgugaaggacuucaugagccuguccgagcagcuccggaagcagauccgcagcgccgccaagaagaacaaccugcccuucaagcugaccugcgccaccacgcgccaggucgugaacguggucaccaccaagaucgcccucaagggcgggugaggacuagucccuguucccagagcccacuuuuuuuucuuuuuuugaaauaaaauagccugucuuucagaucucaaaggcucuuuucagagccaccaaaaaaaaaaaaaaaaaaaaaaaaaaaaaaaaaaaaaaaaaaaaaaaaaaaaaaaaaaaaaaaaaaaaaaaaaaaaaaaaaaaaaaaaaaaaaaaaaaaaa

SEQ ID NO: 19542 - RNA, 6113 nt, Artificial Sequence
  SARS-CoV-2__MT890346.1__non-structural protein 3 (NSP3) mRNA gc
aggagagucccgcagucggcguccagcggcucugcuuguucgugugugugucguugcaggccuuauucaagcuuaccauggcccccaccaaggugaccuucggcgacgacacggucaucgaggugcagggguacaagagcgugaacaucaccuucgagcuggacgagcgcaucgacaagguccucaacgagaagugcuccgccuacaccguggagcugggcaccgaggugaacgaguucgcgugcgucguggccgacgccgugaucaagacgcugcagccggucagcgagcuccugaccccccuggggaucgaccucgacgagugguccauggccaccuacuaccuguucgacgagagcggcgaguucaagcuggccucccacauguacugcagcuucuacccccccgacgaggacgaggaggagggggacugcgaggaggaggaguucgagccguccacccaguacgaguacggcacggaggacgacuaccagggcaagccccucgaguucggggcgaccagcgccgcccugcagcccgaggaggagcaggaggaggacuggcuggacgacgacucccagcagaccgugggccagcaggacgggagcgaggacaaccagaccacgaccauccagaccaucguggagguccagccccagcucgagauggagcugaccccgguggugcagacgaucgaggucaacuccuucagcggcuaccugaagcucaccgacaacguguacaucaagaacgccgacaucguggaggaggcgaagaaggucaagcccaccgugguggucaacgccgccaacguguaccugaagcacgggggcggcguggccggggcccugaacaaggcgaccaacaacgccaugcaggucgaguccgacgacuacaucgccacgaacggcccccucaagguggggggcagcugcguccuguccggccacaaccuggccaagcacugccuccacgugguggggcccaacgucaacaagggcgaggacauccagcugcugaagagcgccuacgagaacuucaaccagcacgaggugcuccuggcgccgcugcucuccguggggaucuucggcgccgaccccauccacagccugcgggucugcguggacaccgugcgcaccaacgucuaccuggccguguucgacaagaaccucuacgacaagcugguguccagcuuccuggagaugaagagcgagaagcaggucgagcagaagaucgccgagauccccaaggaggaggugaagcccuucaucaccgaguccaagccgagcguggagcagcggaagcaggacgacaagaagaucaaggccugcgucgaggaggugacgaccacccucgaggagaccaaguuccugacggagaaccugcuccuguacaucgacaucaacgggaaccugcaccccgacuccgcgacccucgugagcgacaucgacaucaccuuccugaagaaggacgcccccuacaucgucggcgacguggugcaggagggcguccugaccgccguggugauccccacgaagaaggccgggggcaccaccgagaugcucgccaaggcgcugcgcaaggucccgaccgacaacuacaucacgaccuaccccgggcagggccugaacggguacaccguggaggaggccaagaccgugcucaagaagugcaaguccgccuucuacauccugcccagcaucaucuccaacgagaagcaggagauccugggcaccgucagcuggaaccuccgggagaugcuggcccacgcggaggagacgcgcaagcugaugcccgugugcguggagaccaaggccaucgucuccaccauccagcggaaguacaagggcaucaagauccaggagggggugguggacuacggcgcccgcuucuacuucuacaccagcaagacgaccgucgccucccugaucaacacccucaacgaccugaacgagacccuggugacgaugccgcucggguacgugacccacggccugaaccuggaggaggccgcgcgguacaugcgcagccucaagguccccgccaccguguccgugagcucccccgacgccgucaccgccuacaacggguaccugacgagcuccagcaagacccccgaggagcacuucaucgagaccaucucccuggccggcagcuacaaggacuggagcuacuccggccagagcacccagcucgggaucgaguuccugaagcggggcgacaaguccguguacuacacgagcaacccgaccaccuuccaccuggacggggaggugaucaccuucgacaaccucaagacgcugcugucccuccgcgagguccggaccaucaagguguucaccaccguggacaacaucaaccugcacacgcaggucguggacaugagcaugaccuacggccagcaguucggccccaccuaccuggacggggcggacgugaccaagaucaagccccacaacucccacgagggcaagacguucuacguccucccgaacgacgacacccugcgcguggaggccuucgaguacuaccacaccaccgaccccagcuuccuggggcgguacauguccgcccucaaccacacgaagaaguggaaguacccccaggugaacggccugaccagcaucaagugggccgacaacaacugcuaccuggccaccgcgcuccugacccugcagcagaucgagcucaaguucaaccccccggcccugcaggacgccuacuaccgcgcccgggcgggggaggccgccaacuucugcgcccugauccucgccuacugcaacaagacggucggcgagcugggcgacgugcgcgagaccauguccuaccuguuccagcacgcgaaccucgacagcugcaagcggguccugaacguggugugcaagaccugcgggcagcagcagaccacccugaagggcgucgaggccgugauguacauggggacgcucuccuacgagcaguucaagaagggcgugcagauccccugcaccugcgggaagcaggccaccaaguaccugguccagcaggagagccccuucgugaugauguccgcccccccggcccaguacgagcugaagcacggcaccuucacgugcgcgagcgaguacaccggcaacuaccagugcgggcacuacaagcacaucaccuccaaggagacccucuacugcaucgacggcgcccugcugacgaagagcagcgaguacaaggggcccaucaccgacguguucuacaaggagaacuccuacaccaccacgaucaagcccgucaccuacaagcucgacggcguggugugcaccgagaucgaccccaagcuggacaacuacuacaagaaggacaacagcuacuucaccgagcagccgaucgaccugguccccaaccagcccuaccccaacgccuccuucgacaacuucaaguucgugugcgacaacaucaaguucgccgacgaccucaaccagcugacgggguacaagaagccggccagccgcgagcugaaggugaccuucuuccccgaccucaacggcgacgucguggcgaucgacuacaagcacuacacccccuccuucaagaagggcgccaagcugcugcacaagcccaucguguggcacgucaacaacgccaccaacaaggccacguacaagccgaacaccuggugcauccggugccucuggagcaccaagcccguggagaccuccaacagcuucgacgugcugaaguccgaggacgcgcaggggauggacaaccuggccugcgaggaccucaagcccgucagcgaggaggugguggagaaccccacgauccagaaggacguccuggagugcaacgugaagaccaccgagguggucggcgacaucauccugaagccggccaacaacucccucaagaucaccgaggagguggggcacacggaccugauggccgccuacguggacaacagcucccugaccaucaagaagcccaacgagcucagccgcguccugggccugaagacccucgcgacccacgggcuggccgccgugaacuccgugcccugggacacgaucgccaacuacgccaagccguuccugaacaaggucgugagcaccaccaccaacaucgugacgcgcugccucaaccgggucugcaccaacuacaugcccuacuucuucacccugcugcuccagcugugcaccuucacccgcuccacgaacagccggaucaaggcguccaugcccaccaccaucgccaagaacaccgugaagagcgugggcaaguucugccuggaggccagcuucaacuaccucaagucccccaacuucagcaagcugaucaacaucaucaucugguuccugcuccuguccgucugccugggcagccucaucuacuccacggccgcccugggggugcugaugagcaaccucggcaugccguccuacugcaccggguaccgcgagggcuaccugaacagcaccaacgugaccaucgcgacguacugcaccggcuccauccccugcagcgucugccuguccgggcucgacagccuggacaccuaccccucccuggagaccauccagaucacgaucagcuccuucaagugggaccucaccgccuucggccugguggccgagugguuccuggccuacauccucuucacccgguucuucuacgugcuggggcuggccgcgaucaugcagcucuucuucagcuacuucgccguccacuucaucuccaacagcuggcugauguggcugaucaucaaccuggugcagauggcccccaucuccgccauggugcgcauguacaucuucuucgcgagcuucuacuacgucuggaagagcuacgugcacguggucgacggcugcaacuccagcaccugcaugaugugcuacaagcggaaccgcgccacgcggguggagugcaccaccaucgucaacggggugcgccgguccuucuacguguacgccaacggcggcaagggguucugcaagcuccacaacuggaacugcgucaacugcgacaccuucugcgccggcagcacguucaucuccgacgagguggcccgcgaccugagccugcaguucaagcggccgaucaaccccaccgaccaguccagcuacaucguggacuccgucaccgugaagaacgggagcauccaccucuacuucgacaaggcgggccagaagaccuacgagcgccacucccugagccacuucgugaaccuggacaaccuccgggccaacaacacgaaggggucccugcccaucaacgucaucguguucgacggcaagagcaagugcgaggaguccagcgccaaguccgccagcguguacuacucccagcugaugugccagcccauccuccugcuggaccaggcccucgucagcgacgugggcgacagcgcggagguggccgucaagauguucgacgccuacgugaacaccuucuccagcaccuucaacgugccgauggagaagcugaagacccuggucgccacggccgaggcggagcucgccaagaacgugucccuggacaacgugcugagcaccuucaucuccgccgcccgccagggguucgucgacagcgacguggagaccaaggacguggucgagugccucaagcugucccaccagagcgacaucgaggugaccggcgacuccugcaacaacuacaugcugacguacaacaagguggagaacaugaccccccgggaccucggggcgugcaucgacugcagcgcccgccacaucaacgcccaggucgccaagucccacaacaucgcccugaucuggaacgugaaggacuucaugagccuguccgagcagcuccggaagcagauccgcagcgcggccaagaagaacaaccugcccuucaagcugaccugcgccaccacgcgccagguggucaacguggugaccaccaagaucgcccucaagggcgggugaggacuagucccuguucccagagcccacuuuuuuuucuuuuuuugaaauaaaauagccugucuuucagaucucaaaggcucuuuucagagccaccaaaaaaaaaaaaaaaaaaaaaaaaaaaaaaaaaaaaaaaaaaaaaaaaaaaaaaaaaaaaaaaaaaaaaaaaaaaaaaaaaaaaaaaaaaaaaaaaaaaaa

SEQ ID NO: 19543 - RNA, 6113 nt, Artificial Sequence
  SARS-CoV-2__MT890353.1__non-structural protein 3 (NSP3) mRNA gc
aggagagucccgcagucggcguccagcggcucugcuuguucgugugugugucguugcaggccuuauucaagcuuaccauggcccccaccaaggugaccuucggcgacgacacggucaucgaggugcagggguacaagagcgugaacaucaccuucgagcuggacgagcgcaucgacaagguccucaacgagaagugcuccgccuacaccguggagcugggcaccgaggugaacgaguucgcgugcgucguggccgacgccgugaucaagacgcugcagccggucagcgagcuccugaccccccuggggaucgaccucgacgagugguccauggccaccuacuaccuguucgacgagagcggcgaguucaagcuggccucccacauguacugcagcuucuacccccccgacgaggacgaggaggagggggacugcgaggaggaggaguucgagccguccacccaguacgaguacggcacggaggacgacuaccagggcaagccccucgaguucggggcgaccagcgccgcccugcagcccgaggaggagcaggaggaggacuggcuggacgacgacucccagcagaccgugggccagcaggacgggagcgaggacaaccagaccacgaccauccagaccaucguggagguccagccccagcucgagauggagcugaccccgguggugcagacgaucgaggucaacuccuucagcggcuaccugaagcucaccgacaacguguacaucaagaacgccgacaucguggaggaggucaagaaggugaagcccaccguggucgugaacgcggccaacguguaccugaagcacgggggcggcgucgccggggcccugaacaaggccaccaacaacgcgaugcagguggaguccgacgacuacaucgccacgaacggcccccucaaggucgggggcagcugcgugcuguccggccacaaccuggccaagcacugccuccacguggucgggcccaacgugaacaagggcgaggacauccagcugcugaagagcgccuacgagaacuucaaccagcacgaggugcuccuggccccgcugcucuccgcggggaucuucggcgccgaccccauccacagccugcgggucugcguggacaccgugcgcaccaacgucuaccuggccguguucgacaagaaccucuacgacaagcugguguccagcuuccuggagaugaagagcgagaagcaggucgagcagaagaucgccgagauccccaaggaggaggugaagcccuucaucaccgaguccaagccgagcguggagcagcggaagcaggacgacaagaagaucaaggccugcgucgaggaggugacgaccacccucgaggagaccaaguuccugacggagaaccugcuccuguacaucgacaucaacgggaaccugcaccccgacuccgcgacccucgugagcgacaucgacaucaccuuccugaagaaggacgcccccuacaucgucggcgacguggugcaggagggcguccugaccgccguggugauccccacgaagaaggccgggggcaccaccgagaugcucgccaaggcgcugcgcaaggucccgaccgacaacuacaucacgaccuaccccgggcagggccugaacggguacaccguggaggaggccaagaccgugcucaagaagugcaaguccgccuucuacauccugcccagcaucaucuccaacgagaagcaggagauccugggcaccgucagcuggaaccuccgggagaugcuggcccacgcggaggagacgcgcaagcugaugcccgugugcguggagaccaaggccaucgucuccaccauccagcggaaguacaagggcaucaagauccaggagggggugguggacuacggcgcccgcuucuacuucuacaccagcaagacgaccgucgccucccugaucaacacccucaacgaccugaacgagacccuggugacgaugccgcucggguacgugacccacggccugaaccuggaggaggccgcgcgguacaugcgcagccucaagguccccgccaccguguccgugagcucccccgacgccgucaccgccuacaacggguaccugacgagcuccagcaagacccccgaggagcacuucaucgagaccaucucccuggccggcagcuacaaggacuggagcuacuccggccagagcacccagcucgggaucgaguuccugaagcggggcgacaaguccguguacuacacgagcaacccgaccaccuuccaccuggacggggaggugaucaccuucgacaaccucaagacgcugcugucccuccgcgagguccggaccaucaagguguucaccaccguggacaacaucaaccugcacacgcaggucguggacaugagcaugaccuacggccagcaguucggccccaccuaccuggacggggcggacgugaccaagaucaagccccacaacucccacgagggcaagacguucuacguccucccgaacgacgacacccugcgcguggaggccuucgaguacuaccacaccaccgaccccagcuuccuggggcgguacauguccgcccucaaccacacgaagaaguggaaguacccccaggugaacggccugaccagcaucaagugggccgacaacaacugcuaccuggccaccgcgcuccugacccugcagcagaucgagcucaaguucaaccccccggcccugcaggacgccuacuaccgcgcccgggcgggggaggccgccaacuucugcgcccugauccucgccuacugcaacaagacggucggcgagcugggcgacgugcgcgagaccauguccuaccuguuccagcacgcgaaccucgacagcugcaagcggguccugaacguggugugcaagaccugcgggcagcagcagaccacccugaagggcgucgaggccgugauguacauggggacgcucuccuacgagcaguucaagaagggcgugcagauccccugcaccugcgggaagcaggccaccaaguaccugguccagcaggagagccccuucgugaugauguccgcccccccggcccaguacgagcugaagcacggcaccuucacgugcgcgagcgaguacaccggcaacuaccagugcgggcacuacaagcacaucaccuccaaggagacccucuacugcaucgacggcgcccugcugacgaagagcagcgaguacaaggggcccaucaccgacguguucuacaaggagaacuccuacaccaccacgaucaagcccgucaccuacaagcucgacggcguggugugcaccgagaucgaccccaagcuggacaacuacuacaagaaggacaacagcuacuucaccgagcagccgaucgaccugguccccaaccagcccuaccccaacgccuccuucgacaacuucaaguucgugugcgacaacaucaaguucgccgacgaccucaaccagcugacgggguacaagaagccggccagccgcgagcugaaggugaccuucuuccccgaccucaacggcgacgucguggcgaucgacuacaagcacuacacccccuccuucaagaagggcgccaagcugcugcacaagcccaucguguggcacgucaacaacgccaccaacaaggccacguacaagccgaacaccuggugcauccggugccucuggagcaccaagcccguggagaccuccaacagcuucgacgugcugaaguccgaggacgcgcaggggauggacaaccuggccugcgaggaccucaagcccgucagcgaggaggugguggagaaccccacgauccagaaggacguccuggagugcaacgugaagaccaccgagguggucggcgacaucauccugaagccggccaacaacucccucaagaucaccgaggagguggggcacacggaccugauggccgccuacguggacaacagcucccugaccaucaagaagcccaacgagcucagccgcguccugggccugaagacccucgcgacccacgggcuggccgccgugaacuccgugcccugggacacgaucgccaacuacgccaagccguuccugaacaaggucgugagcaccaccaccaacaucgugacgcgcugccucaaccgggucugcaccaacuacaugcccuacuucuucacccugcugcuccagcugugcaccuucacccgcuccacgaacagccggaucaaggcguccaugcccaccaccaucgccaagaacaccgugaagagcgugggcaaguucugccuggaggccagcuucaacuaccucaagucccccaacuucagcaagcugaucaacaucaucaucugguuccugcuccuguccgucugccugggcagccucaucuacuccacggccgcccugggggugcugaugagcaaccucggcaugccguccuacugcaccggguaccgcgagggcuaccugaacagcaucaacgugaccaucgcgaccuacugcacgggcuccauccccugcagcgucugccuguccgggcucgacagccuggacaccuaccccucccuggagaccauccagaucaccaucagcuccuucaagugggaccucacggccuucggccugguggccgagugguuccuggccuacauccucuucacccgguucuucuacgugcuggggcuggccgcgaucaugcagcucuucuucagcuacuucgccguccacuucaucuccaacagcuggcugauguggcugaucaucaaccuggugcagauggcccccaucuccgccauggugcgcauguacaucuucuucgcgagcuucuacuacgucuggaagagcuacgugcacguggucgacggcugcaacuccagcaccugcaugaugugcuacaagcggaaccgcgccacccggguggagugcacgaccaucgucaacggggugcgccgguccuucuacguguacgccaacggcggcaagggguucugcaagcuccacaacuggaacugcgucaacugcgacaccuucugcgccggcagcaccuucaucuccgacgagguggcccgcgaccugagccugcaguucaagcggccgaucaaccccacggaccaguccagcuacaucguggacuccgucaccgugaagaacgggagcauccaccucuacuucgacaaggcgggccagaagaccuacgagcgccacucccugagccacuucgugaaccuggacaaccuccgggccaacaacaccaaggggucccugcccaucaacgucaucguguucgacggcaagagcaagugcgaggaguccagcgccaaguccgccagcguguacuacucccagcugaugugccagcccauccuccugcuggaccaggcccucgucagcgacgugggcgacagcgcggagguggccgucaagauguucgacgccuacgugaacacguucuccagcaccuucaacgugccgauggagaagcugaagacccuggucgccaccgccgaggcggagcucgccaagaacgugucccuggacaacgugcugagcacguucaucuccgccgcccgccagggguucgucgacagcgacguggagaccaaggacguggucgagugccucaagcugucccaccagagcgacaucgaggugaccggcgacuccugcaacaacuacaugcugaccuacaacaagguggagaacaugacgccccgggaccucggggcgugcaucgacugcagcgcccgccacaucaacgcccaggucgccaagucccacaacaucgcccugaucuggaacgugaaggacuucaugagccuguccgagcagcuccggaagcagauccgcagcgcggccaagaagaacaaccugcccuucaagcugaccugcgccaccacccgccagguggucaacguggugacgaccaagaucgcccucaagggcgggugaggacuagucccuguucccagagcccacuuuuuuuucuuuuuuugaaauaaaauagccugucuuucagaucucaaaggcucuuuucagagccaccaaaaaaaaaaaaaaaaaaaaaaaaaaaaaaaaaaaaaaaaaaaaaaaaaaaaaaaaaaaaaaaaaaaaaaaaaaaaaaaaaaaaaaaaaaaaaaaaaaaaa

SEQ ID NO: 19544 - RNA, 6113 nt, Artificial Sequence
  SARS-CoV-2__MT890355.1__non-structural protein 3 (NSP3) mRNA gc
aggagagucccgcagucggcguccagcggcucugcuuguucgugugugugucguugcaggccuuauucaagcuuaccauggcccccaccaaggugaccuucggcgacgacacggucaucgaggugcagggguacaagagcgugaacaucaccuucgagcuggacgagcgcaucgacaagguccucaacgagaagugcuccgccuacaccguggagcugggcaccgaggugaacgaguucgcgugcgucguggccgacgccgugaucaagacgcugcagccggucagcgagcuccugaccccccuggggaucgaccucgacgagugguccauggccaccuacuaccuguucgacgagagcggcgaguucaagcuggccucccacauguacugcagcuucuacccccccgacgaggacgaggaggagggggacugcgaggaggaggaguucgagccguccacccaguacgaguacggcacggaggacgacuaccagggcaagccccucgaguucggggcgaccagcgccgcccugcagcccgaggaggagcaggaggaggacuggcuggacgacgacucccagcagaccgugggccagcaggacgggagcgaggacaaccagaccacgaccauccagaccaucguggagguccagccccagcucgagauggagcugaccccgguggugcagacgaucgaggucaacuccuucagcggcuaccugaagcucaccgacaacguguacaucaagaacgccgacaucguggaggaggcgaagaaggucaagcccaccgugguggucaacgccgccaacguguaccugaagcacgggggcggcguggccggggcccugaacaaggcgaccaacaacgccaugcaggucgaguccgacgacuacaucgccacgaacggcccccucaagguggggggcagcugcguccuguccggccacaaccuggccaagcacugccuccacgugguggggcccaacgucaacaagggcgaggacauccagcugcugaagagcgccuacgagaacuucaaccagcacgaggugcuccuggcgccgcugcucuccgccgggaucuucggcgccgaccccauccacagccugcgggugugcgucgacaccgugcgcaccaacguguaccuggccgucuucgacaagaaccucuacgacaagcugguguccagcuuccuggagaugaagagcgagaagcagguggagcagaagaucgccgagauccccaaggaggaggucaagcccuucaucaccgaguccaagccgagcguggagcagcggaagcaggacgacaagaagaucaaggcgugcguggaggaggucacgaccacccucgaggagaccaaguuccugacggagaaccugcuccuguacaucgacaucaacgggaaccugcaccccgacuccgccacccucgugagcgacaucgacaucaccuuccugaagaaggacgcccccuacaucgugggcgacgucgugcaggagggcgugcugaccgccgucgugauccccacgaagaaggccgggggcaccaccgagaugcucgcgaaggcccugcgcaaggugccgaccgacaacuacaucacgaccuaccccgggcagggccugaacggguacaccgucgaggaggccaagaccgugcucaagaagugcaaguccgccuucuacauccugcccagcaucaucuccaacgagaagcaggagauccugggcaccgugagcuggaaccuccgggagaugcuggcgcacgccgaggagacgcgcaagcugaugcccgucugcguggagaccaaggccaucguguccaccauccagcggaaguacaagggcaucaagauccaggagggggucguggacuacggcgcccgcuucuacuucuacaccagcaagacgaccguggccucccugaucaacacccucaacgaccugaacgagacccuggucacgaugccgcucggguacgugacccacggccugaaccuggaggaggcggcccgguacaugcgcagccucaaggugcccgccaccgucuccgugagcucccccgacgccgugaccgccuacaacggguaccugacgagcuccagcaagacccccgaggagcacuucaucgagaccaucucccuggcgggcagcuacaaggacuggagcuacuccggccagagcacccagcucgggaucgaguuccugaagcggggcgacaaguccgucuacuacacgagcaacccgaccaccuuccaccuggacggggaggugaucaccuucgacaaccucaagacgcugcugucccuccgcgaggugcggaccaucaaggucuucaccaccguggacaacaucaaccugcacacgcagguggucgacaugagcaugaccuacggccagcaguucggccccaccuaccuggacggggccgacgugaccaagaucaagccccacaacucccacgagggcaagacguucuacgugcucccgaacgacgacacccugcgcgucgaggccuucgaguacuaccacaccaccgaccccagcuuccuggggcgguacauguccgcccucaaccacacgaagaaguggaaguacccccaggugaacggccugaccagcaucaagugggccgacaacaacugcuaccuggcgaccgcccuccugacccugcagcagaucgagcucaaguucaaccccccggcccugcaggacgccuacuaccgcgcgcgggccggggaggccgccaacuucugcgcccugauccucgcguacugcaacaagacggugggcgagcugggcgacguccgcgagaccauguccuaccuguuccagcacgccaaccucgacagcugcaagcgggugcugaacgucgugugcaagaccugcgggcagcagcagaccacccugaagggcguggaggccgucauguacauggggacgcucuccuacgagcaguucaagaagggcgugcagauccccugcaccugcgggaagcaggccaccaaguaccuggugcagcaggagagccccuucgucaugauguccgcccccccggcgcaguacgagcugaagcacggcaccuucacgugcgccagcgaguacaccggcaacuaccagugcgggcacuacaagcacaucaccuccaaggagacccucuacugcaucgacggcgcccugcugacgaagagcagcgaguacaaggggcccaucaccgacguguucuacaaggagaacuccuacaccaccacgaucaagcccgugaccuacaagcucgacggcgucgugugcaccgagaucgaccccaagcuggacaacuacuacaagaaggacaacagcuacuucaccgagcagccgaucgaccuggugcccaaccagcccuaccccaacgccuccuucgacaacuucaaguucgucugcgacaacaucaaguucgccgacgaccucaaccagcugacgggguacaagaagccggcgagccgcgagcugaaggugaccuucuuccccgaccucaacggcgacguggucgccaucgacuacaagcacuacacccccuccuucaagaagggcgccaagcugcugcacaagcccaucguguggcacgugaacaacgccaccaacaaggcgacguacaagccgaacaccuggugcauccggugccucuggagcaccaagcccgucgagaccuccaacagcuucgacgugcugaaguccgaggacgcccaggggauggacaaccuggccugcgaggaccucaagcccgugagcgaggaggucguggagaaccccacgauccagaaggacgugcuggagugcaacgucaagaccaccgagguggugggcgacaucauccugaagccggccaacaacucccucaagaucaccgaggaggucgggcacacggaccugauggccgcguacguggacaacagcucccugaccaucaagaagcccaacgagcucagccgcgugcugggccugaagacccucgccacccacgggcuggccgccgucaacuccgugcccugggacacgaucgccaacuacgcgaagccguuccugaacaagguggucagcaccaccaccaacaucgugacgcgcugccucaaccgggugugcaccaacuacaugcccuacuucuucacccugcugcuccagcugugcaccuucacccgcuccacgaacagccggaucaaggccuccaugcccaccaccaucgccaagaacaccgucaagagcgugggcaaguucugccuggaggccagcuucaacuaccucaagucccccaacuucagcaagcugaucaacaucaucaucugguuccugcuccuguccgugugccugggcagccucaucuacuccacggccgcgcuggggguccugaugagcaaccucggcaugccguccuacugcaccggguaccgcgagggcuaccugaacagcaccaacgugaccaucgccacguacugcaccggcuccauccccugcagcgugugccuguccgggcucgacagccuggacaccuaccccuuccuggagaccauccagaucacgaucuccagcuucaagugggaccucaccgccuucggccuggucgccgagugguuccuggccuacauccucuucacccgguucuucuacgugcuggggcuggcggccaucaugcagcucuucuucuccuacuucgccgugcacuucaucagcaacuccuggcugauguggcugaucaucaaccugguccagauggcccccaucagcgcgauggugcgcauguacaucuucuucgccuccuucuacuacguguggaagagcuacguccacgugguggacggcugcaacagcuccaccugcaugaugugcuacaagcggaaccgcgccacgcgggucgagugcaccaccaucgugaacgggguccgccggagcuucuacguguacgccaacggcggcaagggguucugcaagcuccacaacuggaacugcgugaacugcgacaccuucugcgccggcuccacguucaucagcgacgaggucgcgcgcgaccugucccugcaguucaagcggccgaucaaccccaccgaccagagcuccuacaucguggacagcgugaccgucaagaacggguccauccaccucuacuucgacaaggccggccagaagaccuacgagcgccacagccugucccacuucgugaaccuggacaaccuccgggccaacaacacgaaggggagccugcccaucaacgugaucgucuucgacggcaaguccaagugcgaggagagcuccgccaagagcgccuccguguacuacagccagcugaugugccagcccauccuccugcuggaccaggcgcucguguccgacgucggcgacagcgccgagguggccgugaagauguucgacgccuacgucaacaccuucagcuccaccuucaacgugccgauggagaagcugaagacccugguggccacggcggaggccgagcucgccaagaacgucagccuggacaacgugcuguccaccuucaucagcgccgcgcgccagggguucguggacuccgacgucgagaccaaggacgugguggagugccucaagcugagccaccaguccgacaucgaggucaccggcgacagcugcaacaacuacaugcugacguacaacaagguggagaacaugaccccccgggaccucggggccugcaucgacugcuccgcccgccacaucaacgcccagguggccaagagccacaacaucgcgcugaucuggaacgucaaggacuucaugucccugagcgagcagcuccggaagcagauccgcuccgccgccaagaagaacaaccugcccuucaagcugaccugcgccaccacgcgccagguggugaacgucgugaccaccaagaucgcccucaagggcgggugaggacuagucccuguucccagagcccacuuuuuuuucuuuuuuugaaauaaaauagccugucuuucagaucucaaaggcucuuuucagagccaccaaaaaaaaaaaaaaaaaaaaaaaaaaaaaaaaaaaaaaaaaaaaaaaaaaaaaaaaaaaaaaaaaaaaaaaaaaaaaaaaaaaaaaaaaaaaaaaaaaaaa

SEQ ID NO: 19545 - RNA, 6113 nt, Artificial Sequence
  SARS-CoV-2__MT890669.1__non-structural protein 3 (NSP3) mRNA gc
aggagagucccgcagucggcguccagcggcucugcuuguucgugugugugucguugcaggccuuauucaagcuuaccauggcccccaccaaggugaccuucggcgacgacacggucaucgaggugcagggguacaagagcgugaacaucaccuucgagcuggacgagcgcaucgacaagguccucaacgagaagugcuccgccuacaccguggagcugggcaccgaggugaacgaguucgcgugcgucguggccgacgccgugaucaagacgcugcagccggucagcgagcuccugaccccccuggggaucgaccucgacgagugguccauggccaccuacuaccuguucgacgagagcggcgaguucaagcuggccucccacauguacugcagcuucuacccccccgacgaggacgaggaggagggggacugcgaggaggaggaguucgagccguccacccaguacgaguacggcacggaggacgacuaccagggcaagccccucgaguucggggcgaccagcgccgcccugcagcccgaggaggagcaggaggaggacuggcuggacgacgacucccagcagaccgugggccagcaggacgggagcgaggacaaccagaccacgaccauccagaccaucguggagguccagccccagcucgagauggagcugaccccgguggugcagacgaucgaggucaacuccuucagcggcuaccugaagcucaccgacaacguguacaucaagaacgccgacaucguggaggaggcgaagaaggucaagcccaccgugguggucaacgccgccaacguguaccugaagcacgggggcggcguggccggggcccugaacaaggcgaccaacaacgccaugcaggucgaguccgacgacuacaucgccacgaacggcccccucaagguggggggcagcugcguccuguccggccacaaccuggccaagcacugccuccacgugguggggcccaacgucaacaagggcgaggacauccagcugcugaagagcgccuacgagaacuucaaccagcacgaggugcuccuggcgccgcugcucuccgccgggaucuucggcgccgaccccauccacagccugcgggugugcgucgacaccgugcgcaccaacguguaccuggccgucuucgacaagaaccucuacgacaagcugguguccagcuuccuggagaugaagagcgagaagcagguggagcagaagaucgccgagauccccaaggaggaggucaagcccuucaucaccgaguccaagccgcucguggagcagcggaagcaggacgacaagaagaucaaggcgugcguggaggaggucacgaccacccuggaggagaccaaguuccugacggagaaccuccugcuguacaucgacaucaacgggaaccuccaccccgacagcgccacccugguguccgacaucgacaucaccuuccugaagaaggacgcccccuacaucgugggcgacgucgugcaggagggcgugcucaccgccgucgugauccccacgaagaaggccgggggcaccaccgagaugcuggcgaaggcccugcgcaaggugccgaccgacaacuacaucacgaccuaccccgggcagggccucaacggguacaccgucgaggaggccaagaccgugcugaagaagugcaagagcgccuucuacauccugcccuccaucaucagcaacgagaagcaggagauccucggcaccguguccuggaaccugcgggagaugcuggcgcacgccgaggagacgcgcaagcugaugcccgucugcguggagaccaaggccaucgugagcaccauccagcggaaguacaagggcaucaagauccaggagggggucguggacuacggcgcccgcuucuacuucuacaccuccaagacgaccguggccagccucaucaacacccugaacgaccugaacgagacccucgucacgaugccgcugggguacgugacccacggccugaaccucgaggaggcggcccgguacaugcgcucccugaaggugcccgccaccgucagcguguccagccccgacgccgugaccgccuacaacggguaccugacguccagcuccaagacccccgaggagcacuucaucgagaccaucagccucgcgggcuccuacaaggacuggagcuacagcggccaguccacccagcuggggaucgaguuccugaagcggggcgacaagagcgucuacuacacguccaacccgaccaccuuccaccucgacggggaggugaucaccuucgacaaccugaagacgcugcucagccugcgcgaggugcggaccaucaaggucuucaccaccguggacaacaucaaccugcacacgcagguggucgacauguccaugaccuacggccagcaguucggccccaccuaccucgacggggccgacgugaccaagaucaagccccacaacagccacgagggcaagacguucuacgugcugccgaacgacgacacccugcgcgucgaggccuucgaguacuaccacaccaccgaccccuccuuccucgggcgguacaugagcgcccugaaccacacgaagaaguggaaguacccccaggugaacggccugaccuccaucaagugggccgacaacaacugcuaccucgcgaccgcccugcugacccuccagcagaucgagcugaaguucaaccccccggcccugcaggacgccuacuaccgcgcgcgggccggggaggccgccaacuucugcgcccucauccuggcguacugcaacaagacggugggcgagcugggcgacguccgcgagaccaugagcuaccucuuccagcacgccaaccuggacuccugcaagcgggugcugaacgucgugugcaagaccugcgggcagcagcagaccacccucaagggcguggaggccgucauguacauggggacgcugagcuacgagcaguucaagaagggcgugcagauccccugcaccugcgggaagcaggccaccaaguaccuggugcagcaggagucccccuucgucaugaugagcgcccccccggcgcaguacgagcucaagcacggcaccuucacgugcgccuccgaguacaccggcaacuaccagugcgggcacuacaagcacaucaccagcaaggagacccuguacugcaucgacggcgcccugcucacgaaguccagcgaguacaaggggcccaucaccgacguguucuacaaggagaacagcuacaccaccacgaucaagcccgugaccuacaagcuggacggcgucgugugcaccgagaucgaccccaagcuggacaacuacuacaagaaggacaacuccuacuucaccgagcagccgaucgaccucgugcccaaccagcccuaccccaacgccagcuucgacaacuucaaguucgucugcgacaacaucaaguucgccgacgaccugaaccagcugacgggguacaagaagccggcgucccgcgagcucaaggugaccuucuuccccgaccugaacggcgacguggucgccaucgacuacaagcacuacacccccagcuucaagaagggcgccaagcugcuccacaagcccaucguguggcacgugaacaacgccaccaacaaggcgacguacaagccgaacaccuggugcauccggugccugugguccaccaagcccgucgagaccagcaacuccuucgacgugcugaagagcgaggacgcccaggggauggacaaccucgccugcgaggaccugaagcccguguccgaggaggucguggagaaccccacgauccagaaggacgugcuggagugcaacgucaagaccaccgagguggugggcgacaucauccucaagccggccaacaacagccugaagaucaccgaggaggucgggcacacggaccugauggccgcguacguggacaacuccagccucaccaucaagaagcccaacgagcugucccgcgugcugggccucaagacccuggccacccacgggcuggccgccgucaacagcgugcccugggacacgaucgccaacuacgcgaagccguuccucaacaagguggucuccaccaccaccaacaucgugacgcgcugccugaaccgggugugcaccaacuacaugcccuacuucuucacccugcuccugcagcugugcaccuucacccgcagcacgaacucccggaucaaggccagcaugcccaccaccaucgccaagaacaccgucaaguccgugggcaaguucugccucgaggccagcuucaacuaccugaagagccccaacuucuccaagcugaucaacaucaucaucugguuccuccugcugagcgugugccucggcucccugaucuacagcacggccgcgcuggggguccucauguccaaccugggcaugccgagcuacugcaccggguaccgcgagggcuaccugaacuccaccaacgugaccaucgccacguacugcaccggcagcauccccugcuccgugugccucagcgggcuggacucccuggacaccuaccccagccucgagaccauccagaucacgaucuccagcuucaagugggaccugaccgccuucggccuggucgccgagugguuccucgccuacauccuguucacccgguucuucuacgugcuggggcucgcggccaucaugcagcuguucuucuccuacuucgccgugcacuucaucagcaacuccuggcugauguggcugaucaucaaccucguccagauggcccccaucagcgcgauggugcgcauguacaucuucuucgccuccuucuacuacguguggaagagcuacguccacgugguggacggcugcaacagcuccaccugcaugaugugcuacaagcggaaccgcgccacgcgggucgagugcaccaccaucgugaacgggguccgccggagcuucuacguguacgccaacggcggcaagggguucugcaagcugcacaacuggaacugcgugaacugcgacaccuucugcgccggcuccacguucaucagcgacgaggucgcgcgcgaccugucccuccaguucaagcggccgaucaaccccaccgaccagagcuccuacaucguggacagcgugaccgucaagaacggguccauccaccuguacuucgacaaggccggccagaagaccuacgagcgccacagccugucccacuucgugaaccucgacaaccugcgggccaacaacacgaaggggagccugcccaucaacgugaucgucuucgacggcaaguccaagugcgaggagagcuccgccaagagcgccuccguguacuacagccagcucaugugccagcccauccugcugcucgaccaggcgcugguguccgacgucggcgacagcgccgagguggccgugaagauguucgacgccuacgucaacaccuucagcuccaccuucaacgugccgauggagaagcugaagacccucguggccacggcggaggccgagcuggccaagaacgucagccuggacaacgugcucuccaccuucaucagcgccgcgcgccagggguucguggacuccgacgucgagaccaaggacgugguggagugccugaagcugagccaccaguccgacaucgaggucaccggcgacagcugcaacaacuacaugcucacguacaacaagguggagaacaugaccccccgggaccugggggccugcaucgacugcuccgcccgccacaucaacgcccagguggccaagagccacaacaucgcgcugaucuggaacgucaaggacuucaugucccucagcgagcagcugcggaagcagauccgcuccgccgccaagaagaacaaccugcccuucaagcucaccugcgccaccacgcgccagguggugaacgucgugaccaccaagaucgcccugaagggcgggugaggacuagucccuguucccagagcccacuuuuuuuucuuuuuuugaaauaaaauagccugucuuucagaucucaaaggcucuuuucagagccaccaaaaaaaaaaaaaaaaaaaaaaaaaaaaaaaaaaaaaaaaaaaaaaaaaaaaaaaaaaaaaaaaaaaaaaaaaaaaaaaaaaaaaaaaaaaaaaaaaaaaa

SEQ ID NO: 19546 - RNA, 6113 nt, Artificial Sequence
  SARS-CoV-2__MT892964.1__non-structural protein 3 (NSP3) mRNA gc
aggagagucccgcagucggcguccagcggcucugcuuguucgugugugugucguugcaggccuuauucaagcuuaccauggcccccaccaaggugaccuucggcgacgacacggucaucgaggugcagggguacaagagcgugaacaucaccuucgagcuggacgagcgcaucgacaagguccucaacgagaagugcuccgccuacaccguggagcugggcaccgaggugaacgaguucgcgugcgucguggccgacgccgugaucaagacgcugcagccggucagcgagcuccugaccccccuggggaucgaccucgacgagugguccauggccaccuacuaccuguucgacgagagcggcgaguucaagcuggccucccacauguacugcagcuucuacccccccgacgaggacgaggaggagggggacugcgaggaggaggaguucgagccguccacccaguacgaguacggcacggaggacgacuaccagggcaagccccucgaguucggggcgaccagcgccgcccugcagcccgaggaggagcaggaggaggacuggcuggacgacgacucccagcagaccgugggccagcaggacgggagcgaggacaaccagaccacgaccauccagaccaucguggagguccagccccagcucgagauggagcugaccccgguggugcagacgaucgaggucaacuccuucagcggcuaccugaagcucaccgacaacguguacaucaagaacgccgacaucguggaggaggcgaagaaggucaagcccaccgugguggucaacgccgccaacguguaccugaagcacgggggcggcguggccggggcccugaacaaggcgaccaacaacgccaugcaggucgaguccgacgacuacaucgccacgaacggcccccucaagguggggggcagcugcguccuguccggccacaaccuggccaagcacugccuccacgugguggggcccaacgucaacaagggcgaggacauccagcugcugaagagcgccuacgagaacuucaaccagcacgaggugcuccuggcgccgcugcucuccgccgggaucuucggcgccgaccccauccacagccugcgggugugcgucgacaccgugcgcaccaacguguaccuggccgucuucgacaagaaccucuacgacaagcugguguccagcuuccuggagaugaagagcgagaagcagguggagcagaagaucgccgagauccccaaggaggaggucaagcccuucaucaccgaguccaagccgagcguggagcagcggaagcaggacgacaagaagaucaaggcgugcguggaggaggucacgaccacccucgaggagaccaaguuccugacggagaaccugcuccuguacaucgacaucaacgggaaccugcaccccgacuccgccacccucgugagcgacaucgacaucaccuuccugaagaaggacgcccccuacaucgugggcgacgucgugcaggagggcgugcugaccgccgucgugauccccacgaagaaggccgggggcaccaccgagaugcucgcgaaggcccugcgcaaggugccgaccgacaacuacaucacgaccuaccccgggcagggccugaacggguacaccgucgaggaggccaagaccgugcucaagaagugcaaguccgccuucuacauccugcccagcaucaucuccaacgagaagcaggagauccugggcaccgugagcuggaaccuccgggagaugcuggcgcacgccgaggagacgcgcaagcugaugcccgucugcguggagaccaaggccaucguguccaccauccagcggaaguacaagggcaucaagauccaggagggggucguggacuacggcgcccgcuucuacuucuacaccagcaagacgaccguggccucccugaucaacacccucaacgaccugaacgagacccuggucacgaugccgcucggguacgugacccacggccugaaccuggaggaggcggcccgguacaugcgcagccucaaggugcccgccaccgucuccgugagcucccccgacgccgugaccgccuacaacggguaccugacgagcuccagcaagacccccgaggagcacuucaucgagaccaucucccuggcgggcagcuacaaggacuggagcuacuccggccagagcacccagcucgggaucgaguuccugaagcggggcgacaaguccgucuacuacacgagcaacccgaccaccuuccaccuggacggggaggugaucaccuucgacaaccucaagacgcugcugucccuccgcgaggugcggaccaucaaggucuucaccaccguggacaacaucaaccugcacacgcagguggucgacaugagcaugaccuacggccagcaguucggccccaccuaccuggacggggccgacgugaccaagaucaagccccacaacucccacgagggcaagacguucuacgugcucccgaacgacgacacccugcgcgucgaggccuucgaguacuaccacaccaccgaccccagcuuccuggggcgguacauguccgcccucaaccacacgaagaaguggaaguacccccaggugaacggccugaccagcaucaagugggccgacaacaacugcuaccuggcgaccgcccuccugacccugcagcagaucgagcucaaguucaaccccccggcccugcaggacgccuacuaccgcgcgcgggccggggaggccgccaacuucugcgcccugauccucgcguacugcaacaagacggugggcgagcugggcgacguccgcgagaccauguccuaccuguuccagcacgccaaccucgacagcugcaagcgggugcugaacgucgugugcaagaccugcgggcagcagcagaccacccugaagggcguggaggccgucauguacauggggacgcucuccuacgagcaguucaagaagggcgugcagauccccugcaccugcgggaagcaggccaccaaguaccuggugcagcaggagagccccuucgucaugauguccgcccccccggcgcaguacgagcugaagcacggcaccuucacgugcgccagcgaguacaccggcaacuaccagugcgggcacuacaagcacaucaccuccaaggagacccucuacugcaucgacggcgcccugcugacgaagagcagcgaguacaaggggcccaucaccgacguguucuacaaggagaacuccuacaccaccacgaucaagcccgugaccuacaagcucgacggcgucgugugcaccgagaucgaccccaagcuggacaacuacuacaagaaggacaacagcuacuucaccgagcagccgaucgaccuggugcccaaccagcccuaccccaacgccuccuucgacaacuucaaguucgucugcgacaacaucaaguucgccgacgaccucaaccagcugacgggguacaagaagccggcgagccgcgagcugaaggugaccuucuuccccgaccucaacggcgacguggucgccaucgacuacaagcacuacacccccuccuucaagaagggcgccaagcugcugcacaagcccaucguguggcacgugaacaacgccaccaacaaggcgacguacaagccgaacaccuggugcauccggugccucuggagcaccaagcccgucgagaccuccaacagcuucgacgugcugaaguccgaggacgcccaggggauggacaaccuggccugcgaggaccucaagcccgugagcgaggaggucguggagaaccccacgauccagaaggacgugcuggagugcaacgucaagaccaccgagguggugggcgacaucauccugaagccggccaacaacucccucaagaucaccgaggaggucgggcacacggaccugauggccgcguacguggacaacagcucccugaccaucaagaagcccaacgagcucagccgcgugcugggccugaagacccucgccacccacgggcuggccgccgucaacuccgugcccugggacacgaucgccaacuacgcgaagccguuccugaacaagguggucagcaccaccaccaacaucgugacgcgcugccucaaccgggugugcaccaacuacaugcccuacuucuucacccugcugcuccagcugugcaccuucacccgcuccacgaacagccggaucaaggccuccaugcccaccaccaucgccaagaacaccgucaagagcgugggcaaguucugccuggaggccagcuucaacuaccucaagucccccaacuucagcaagcugaucaacaucaucaucugguuccugcuccuguccgugugccugggcagccucaucuacuccacggccgcgcuggggguccugaugagcaaccucggcaugccguccuacugcaccggguaccgcgagggcuaccugaacagcaccaacgugaccaucgccacguacugcaccggcuccauccccugcagcgugugccuguccgggcucgacagccuggacaccuaccccucccuggagaccauccagaucacgaucagcuccuucaagugggaccucaccgccuucggccuggucgccgagugguuccuggccuacauccucuucacccgguucuucuacgugcuggggcuggcggccaucaugcagcucuucuucagcuacuucgccgugcacuucaucuccaacagcuggcugauguggcugaucaucaaccugguccagauggcccccaucuccgcgauggugcgcauguacaucuucuucgccagcuucuacuacguguggaagagcuacguccacgugguggacggcugcaacuccagcaccugcaugaugugcuacaagcggaaccgcgccacgcgggucgagugcaccaccaucgugaacgggguccgccgguccuucuacguguacgccaacggcggcaagggguucugcaagcuccacaacuggaacugcgugaacugcgacaccuucugcgccggcagcacguucaucuccgacgaggucgcgcgcgaccugagccugcaguucaagcggccgaucaaccccaccgaccaguccagcuacaucguggacuccgugaccgucaagaacgggagcauccaccucuacuucgacaaggccggccagaagaccuacgagcgccacucccugagccacuucgugaaccuggacaaccuccgggccaacaacacgaaggggucccugcccaucaacgugaucgucuucgacggcaagagcaagugcgaggaguccagcgccaaguccgccagcguguacuacucccagcugaugugccagcccauccuccugcuggaccaggcgcucgugagcgacgucggcgacagcgccgagguggccgugaagauguucgacgccuacgucaacaccuucuccagcaccuucaacgugccgauggagaagcugaagacccugguggccacggcggaggccgagcucgccaagaacgucucccuggacaacgugcugagcacccucaucuccgccgcgcgccagggguucguggacagcgacgucgagaccaaggacgugguggagugccugaagcugucccaccagagcgacaucgaggucaccggcgacuccugcaacaacuacaugcucacguacaacaagguggagaacaugaccccccgggaccugggggccugcaucgacugcagcgcccgccacaucaacgcccagguggccaagucccacaacaucgcgcugaucuggaacgucaaggacuucaugagccucuccgagcagcugcggaagcagauccgcagcgccgccaagaagaacaaccugcccuucaagcucaccugcgccaccacgcgccagguggugaacgucgugaccaccaagaucgcccugaagggcgggugaggacuagucccuguucccagagcccacuuuuuuuucuuuuuuugaaauaaaauagccugucuuucagaucucaaaggcucuuuucagagccaccaaaaaaaaaaaaaaaaaaaaaaaaaaaaaaaaaaaaaaaaaaaaaaaaaaaaaaaaaaaaaaaaaaaaaaaaaaaaaaaaaaaaaaaaaaaaaaaaaaaaa

SEQ ID NO: 19547 - RNA, 6113 nt, Artificial Sequence
  SARS-CoV-2__MT892973.1__non-structural protein 3 (NSP3) mRNA gc
aggagagucccgcagucggcguccagcggcucugcuuguucgugugugugucguugcaggccuuauucaagcuuaccauggcccccaccaaggugaccuucggcgacgacacggucaucgaggugcagggguacaagagcgugaacaucaccuucgagcuggacgagcgcaucgacaagguccucaacgagaagugcuccgccuacaccguggagcugggcaccgaggugaacgaguucgcgugcgucguggccgacgccgugaucaagacgcugcagccggucagcgagcuccugaccccccuggggaucgaccucgacgagugguccauggccaccuacuaccuguucgacgagagcggcgaguucaagcuggccucccacauguacugcagcuucuacccccccgacgaggacgaggaggagggggacugcgaggaggaggaguucgagccguccacccaguacgaguacggcacggaggacgacuaccagggcaagccccucgaguucggggcgaccagcgccgcccugcagcccgaggaggagcaggaggaggacuggcuggacgacgacucccagcagaccgugggccagcaggacgggagcgaggacaaccagaccacgaccauccagaccaucguggagguccagccccagcucgagauggagcugaccccgguggugcagacgaucgaggucaacuccuucagcggcuaccugaagcucaccgacaacguguacaucaagaacgccgacaucguggaggaggcgaagaaggucaagcccaccgugguggucaacgccgccaacguguaccugaagcacgggggcggcguggccggggcccugaacaaggcgaccaacaacgccaugcaggucgaguccgacgacuacaucgccacgaacggcccccucaagguggggggcagcugcguccuguccggccacaaccuggccaagcacugccuccacgugguggggcccaacgucaacaagggcgaggacauccagcugcugaagagcgccuacgagaacuucaaccagcacgaggugcuccuggcgccgcugcucuccgccgggaucuucggcgccgaccccauccacagccugcgggugugcgucgacaccgugcgcaccaacguguaccuggccgucuucgacaagaaccucuacgacaagcugguguccagcuuccuggagaugaagagcgagaagcagguggagcagaacaucgccgagauccccaaggaggaggucaagcccuucaucaccgaguccaagccgagcguggagcagcggaagcaggacgacaagaagaucaaggcgugcguggaggaggucacgaccacccucgaggagaccaaguuccugacggagaaccugcuccuguacaucgacaucaacgggaaccugcaccccgacuccgccacccucgugagcgacaucgacaucaccuuccugaagaaggacgcccccuacaucgugggcgacgucgugcaggagggcgugcugaccgccgucgugauccccacgaagaaggccgggggcaccaccgagaugcucgcgaaggcccugcgcaaggugccgaccgacaacuacaucacgaccuaccccgggcagggccugaacggguacaccgucgaggaggccaagaccgugcucaagaagugcaaguccgccuucuacauccugcccagcaucaucuccaacgagaagcaggagauccugggcaccgugagcuggaaccuccgggagaugcuggcgcacgccgaggagacgcgcaagcugaugcccgucugcguggagaccaaggccaucguguccaccauccagcggaaguacaagggcaucaagauccaggagggggucguggacuacggcgcccgcuucuacuucuacaccagcaagacgaccguggccucccugaucaacacccucaacgaccugaacgagacccuggucacgaugccgcucggguacgugacccacggccugaaccuggaggaggcggcccgguacaugcgcagccucaaggugcccgccaccgucuccgugagcucccccgacgccgugaccgccuacaacggguaccugacgagcuccagcaagacccccgaggagcacuucaucgagaccaucucccuggcgggcagcuacaaggacuggagcuacuccggccagagcacccagcucgggaucgaguuccugaagcggggcgacaaguccgucuacuacacgagcaacccgaccaccuuccaccuggacggggaggugaucaccuucgacaaccucaagacgcugcugucccuccgcgaggugcggaccaucaaggucuucaccaccguggacaacaucaaccugcacacgcagguggucgacaugagcaugaccuacggccagcaguucggccccaccuaccuggacggggccgacgugaccaagaucaagccccacaacucccacgagggcaagacguucuacgugcucccgaacgacgacacccugcgcgucgaggccuucgaguacuaccacaccaccgaccccagcuuccuggggcgguacauguccgcccucaaccacacgaagaaguggaaguacccccaggugaacggccugaccagcaucaagugggccgacaacaacugcuaccuggcgaccgcccuccugacccugcagcagaucgagcucaaguucaaccccccggcccugcaggacgccuacuaccgcgcgcgggccggggaggccgccaacuucugcgcccugauccucgcguacugcaacaagacggugggcgagcugggcgacguccgcgagaccauguccuaccuguuccagcacgccaaccucgacagcugcaagcgggugcugaacgucgugugcaagaccugcgggcagcagcagaccacccugaagggcguggaggccgucauguacauggggacgcucuccuacgagcaguucaagaagggcgugcagauccccugcaccugcgggaagcaggccaccaaguaccuggugcagcaggagagccccuucgucaugauguccgcccccccggcgcaguacgagcugaagcacggcaccuucacgugcgccagcgaguacaccggcaacuaccagugcgggcacuacaagcacaucaccuccaaggagacccucuacugcaucgacggcgcccugcugacgaagagcagcgaguacaaggggcccaucaccgacguguucuacaaggagaacuccuacaccaccacgaucaagcccgugaccuacaagcucgacggcgucgugugcaccgagaucgaccccaagcuggacaacuacuacaagaaggacaacagcuacuucaccgagcagccgaucgaccuggugcccaaccagcccuaccccaacgccuccuucgacaacuucaaguucgucugcgacaacaucaaguucgccgacgaccucaaccagcugacgggguacaagaagccggcgagccgcgagcugaaggugaccuucuuccccgaccucaacggcgacguggucgccaucgacuacaagcacuacacccccuccuucaagaagggcgccaagcugcugcacaagcccaucguguggcacgugaacaacgccaccaacaaggcgacguacaagccgaacaucuggugcauccggugccucuggagcaccaagcccgucgagaccuccaacagcuucgacgugcugaaguccgaggacgcccaggggauggacaaccuggccugcgaggaccucaagcccgugagcgaggaggucguggagaaccccaccauccagaaggacgugcuggagugcaacgucaagacgaccgagguggugggcgacaucauccugaagccggccaacaacucccucaagaucaccgaggaggucgggcacaccgaccugauggccgcguacguggacaacagcucccugacgaucaagaagcccaacgagcucagccgcgugcugggccugaagacccucgccacccacgggcuggccgccgucaacuccgugcccugggacaccaucgccaacuacgcgaagccguuccugaacaagguggucagcacgaccaccaacaucgugacccgcugccucaaccgggugugcacgaacuacaugcccuacuucuucacccugcugcuccagcugugcaccuucacccgcuccaccaacagccggaucaaggccuccaugcccacgaccaucgccaagaacaccgucaagagcgugggcaaguucugccuggaggccagcuucaacuaccucaagucccccaacuucagcaagcugaucaacaucaucaucugguuccugcuccuguccgugugccugggcagccucaucuacuccaccgccgcgcuggggguccugaugagcaaccucggcaugccguccuacugcacgggguaccgcgagggcuaccugaacagcaccaacgugaccaucgccaccuacugcacgggcuccauccccugcagcgugugccuguccgggcucgacagccuggacaccuaccccucccuggagaccauccagaucaccaucagcuccuucaagugggaccucacggccuucggccuggucgccgagugguuccuggccuacauccucuucacccgguucuucuacgugcuggggcuggcggccaucaugcagcucuucuucagcuacuucgccgugcacuucaucuccaacagcuggcugauguggcugaucaucaaccugguccagauggcccccaucuccgcgauggugcgcauguacaucuucuucgccagcuucuacuacguguggaagagcuacguccacgugguggacggcugcaacuccagcaccugcaugaugugcuacaagcggaaccgcgccacccgggucgagugcacgaccaucgugaacgggguccgccgguccuucuacguguacgccaacggcggcaagggguucugcaagcuccacaacuggaacugcgugaacugcgacaccuucugcgccggcagcaccuucaucuccgacgaggucgcgcgcgaccugagccugcaguucaagcggccgaucaaccccacggaccaguccagcuacaucguggacuccgugaccgucaagaacgggagcauccaccucuacuucgacaaggccggccagaagaccuacgagcgccacucccugagccacuucgugaaccuggacaaccuccgggccaacaacaccaaggggucccugcccaucaacgugaucgucuucgacggcaagagcaagugcgaggaguccagcgccaaguccgccagcguguacuacucccagcugaugugccagcccauccuccugcuggaccaggcgcucgugagcgacgucggcgacagcgccgagguggccgugaagauguucgacgccuacgucaacacguucuccagcaccuucaacgugccgauggagaagcugaagacccugguggccaccgcggaggccgagcucgccaagaacgucucccuggacaacgugcugagcacguucaucuccgccgcgcgccagggguucguggacagcgacgucgagaccaaggacgugguggagugccucaagcugucccaccagagcgacaucgaggucaccggcgacuccugcaacaacuacaugcugaccuacaacaagguggagaacaugacgccccgggaccucggggccugcaucgacugcagcgcccgccacaucaacgcccagguggccaagucccacaacaucgcgcugaucuggaacgucaaggacuucaugagccuguccgagcagcuccggaagcagauccgcagcgccgccaagaagaacaaccugcccuucaagcugaccugcgccaccacccgccagguggugaacgucgugacgaccaagaucgcccucaagggcgggugaggacuagucccuguucccagagcccacuuuuuuuucuuuuuuugaaauaaaauagccugucuuucagaucucaaaggcucuuuucagagccaccaaaaaaaaaaaaaaaaaaaaaaaaaaaaaaaaaaaaaaaaaaaaaaaaaaaaaaaaaaaaaaaaaaaaaaaaaaaaaaaaaaaaaaaaaaaaaaaaaaaaa

SEQ ID NO: 19548 - RNA, 6113 nt, Artificial Sequence
  SARS-CoV-2__MT892977.1__non-structural protein 3 (NSP3) mRNA gc
aggagagucccgcagucggcguccagcggcucugcuuguucgugugugugucguugcaggccuuauucaagcuuaccauggcccccaccaaggugaccuucggcgacgacacggucaucgaggugcagggguacaagagcgugaacaucaccuucgagcuggacgagcgcaucgacaagguccucaacgagaagugcuccgccuacaccguggagcugggcaccgaggugaacgaguucgcgugcgucguggccgacgccgugaucaagacgcugcagccggucagcgagcuccugaccccccuggggaucgaccucgacgagugguccauggccaccuacuaccuguucgacgagagcggcgaguucaagcuggccucccacauguacugcagcuucuacccccccgacgaggacgaggaggagggggacugcgaggaggaggaguucgagccguccacccaguacgaguacggcacggaggacgacuaccagggcaagccccucgaguucggggcgaccagcgccgcccugcagcccgaggaggagcaggaggaggacuggcuggacgacgacucccagcagaccgugggccagcaggacgggagcgaggacaaccagaccacgaccauccagaccaucguggagguccagccccagcucgagauggagcugaccccgguggugcagacgaucgaggucaacuccuucagcggcuaccugaagcucaccgacaacguguacaucaagaacgccgacaucguggaggaggcgaagaaggucaagcccaccgugguggucaacgccgccaacguguaccugaagcacgggggcggcguggccggggcccugaacaaggcgaccaacaacgccaugcaggucgaguccgacgacuacaucgccacgaacggcccccucaagguggggggcagcugcguccuguccggccacaaccuggccaagcacugccuccacgugguggggcccaacgucaacaagggcgaggacauccagcugcugaagagcgccuacgagaacuucaaccagcacgaggugcuccuggcgccgcugcucuccgccgggaucuucggcgccgaccccauccacagccugcgggugugcgucgacaccgugcgcaccaacguguaccuggccgucuucgacaagaaccucuacgacaagcugguguccagcuuccuggagaugaagagcgagaagcagguggagcagaagaucgccgagauccccaaggaggaggucaagcccuucaucaccgaguccaagccgagcguggagcagcggaagcaggacgacaagaagaucaaggcgugcguggaggaggucacgaccacccucgaggagaccaaguuccugacggagaaccugcuccuguacaucgacaucaacgggaaccugcaccccgacuccgccacccucgugagcgacaucgacaucaccuuccugaagaaggacgcccccuacaucgugggcgacgucgugcaggagggcgugcugaccgccgucgugauccccacgaagaaggccgggggcaccaccgagaugcucgcgaaggcccugcgcaaggugccgaccgacaacuacaucacgaccuaccccgggcagggccugaacggguacaccgucgaggaggccaagaccgugcucaagaagugcaaguccgccuucuacauccugcccagcaucaucuccaacgagaagcaggagauccugggcaccgugagcuggaaccuccgggagaugcuggcgcacgccgaggagacgcgcaagcugaugcccgucugcguggagaccaaggccaucguguccaccauccagcggaaguacaagggcaucaagauccaggagggggucguggacuacggcgcccgcuucuacuucuacaccagcaagacgaccguggccucccugaucaacacccucaacgaccugaacgagacccuggucacgaugccgcucggguacgugacccacggccugaaccuggaggaggcggcccgguacaugcgcagccucaaggugcccgccaccgucuccgugagcucccccgacgccgugaccgccuacaacggguaccugacgagcuccagcaagacccccgaggagcacuucaucgagaccaucucccuggcgggcagcuacaaggacuggagcuacuccggccagagcacccagcucgggaucgaguuccugaagcggggcgacaaguccgucuacuacacgagcaacccgaccaccuuccaccuggacggggaggugaucaccuucgacaaccucaagacgcugcugucccuccgcgaggugcggaccaucaaggucuucaccaccguggacaacaucaaccugcacacgcagguggucgacaugagcaugaccuacggccagcaguucggccccaccuaccuggacggggccgacgugaccaagaucaagccccacaacucccacgagggcaagacguucuacgugcucccgaacgacgacacccugcgcgucgaggccuucgaguacuaccacaccaccgacagcuccuuccuggggcgguacaugagcgcccucaaccacacgaagaaguggaaguacccccaggugaacggccugaccuccaucaagugggccgacaacaacugcuaccuggcgaccgcccuccugacccugcagcagaucgagcucaaguucaacccccccgcccugcaggacgccuacuaccgcgcgcgggccggggaggccgccaacuucugcgcccugauccucgcguacugcaacaagacggugggcgagcugggcgacguccgcgagaccaugagcuaccuguuccagcacgccaaccucgacuccugcaagcgggugcugaacgucgugugcaagaccugcgggcagcagcagaccacccugaagggcguggaggccgucauguacauggggacgcucagcuacgagcaguucaagaagggcgugcagaucccgugcaccugcgggaagcaggccaccaaguaccuggugcagcaggagucccccuucgucaugaugagcgccccccccgcgcaguacgagcugaagcacggcaccuucacgugcgccuccgaguacaccggcaacuaccagugcgggcacuacaagcacaucaccagcaaggagacccucuacugcaucgacggcgcccugcugacgaagagcuccgaguacaaggggccgaucaccgacguguucuacaaggagaacagcuacaccaccacgaucaagcccgugaccuacaagcucgacggcgucgugugcaccgagaucgaccccaagcuggacaacuacuacaagaaggacaacuccuacuucaccgagcagcccaucgaccuggugccgaaccagcccuaccccaacgccagcuucgacaacuucaaguucgucugcgacaacaucaaguucgccgacgaccucaaccagcugacgggguacaagaagcccgcgucccgcgagcugaaggugaccuucuucccggaccucaacggcgacguggucgccaucgacuacaagcacuacacccccagcuucaagaagggcgccaagcugcugcacaagcccaucguguggcacgugaacaacgccaccaacaaggcgacguacaagcccaacaccuggugcauccggugccucugguccaccaagccggucgagaccagcaacuccuucgacgugcugaagagcgaggacgcccaggggauggacaaccuggccugcgaggaccucaagcccguguccgaggaggucguggagaaccccacgauccagaaggacgugcuggagugcaacgucaagaccaccgagguggugggcgacaucauccugaagcccgccaacaacagccucaagaucaccgaggaggucgggcacacggaccugauggccgcguacguggacaacuccagccugaccaucaagaagccgaacgagcucucccgcgugcugggccugaagacccucgccacccacgggcuggccgccgucaacagcgugcccugggacacgaucgccaacuacgcgaagcccuucuucaacaagguggucuccaccaccaccaacaucgugacgcgcugccugaaccgggugugcaccaacuacaugccguacuucuucacccuccugcugcagcucugcaccuucacccgcagcacgaacucccggaucaaggccagcaugcccaccaccaucgccaagaacaccgucaagagcgugggcaaguucugccuggaggccuccuucaacuaccugaagagccccaacuucuccaagcucaucaacaucaucaucugguuccugcugcucagcgugugccugggcucccugaucuacagcacggccgcgcucgggguccugauguccaaccugggcaugcccagcuacugcaccggguaccgcgagggcuaccucaacuccaccaacgugaccaucgccacguacugcaccggcagcaucccgugcuccgugugccugagcgggcuggacucccucgacaccuaccccagccuggagaccauccagaucacgaucuccagcuucaagugggaccugaccgccuucggccucgucgccgagugguuccuggccuacauccuguucacccgguucuucuacgugcucgggcuggcggccaucaugcagcuguucuucuccuacuucgccgugcacuucaucagcaacuccuggcucauguggcugaucaucaaccugguccagauggcccccaucagcgcgauggugcgcauguacaucuucuucgccagcuucuacuacguguggaaguccuacguccacgugguggacggcugcaacagcuccaccugcaugaugugcuacaagcggaaccgcgccacgcgggucgagugcaccaccaucgugaacgggguccgccggagcuucuacguguacgccaacggcggcaagggguucugcaagcugcacaacuggaacugcgugaacugcgacaccuucugcgccggcuccacguucaucagcgacgaggucgcgcgcgaccucucccugcaguucaagcggcccaucaacccgaccgaccagagcuccuacaucguggacagcgugaccgucaagaacggguccauccaccuguacuucgacaaggccggccagaagaccuacgagcgccacagccucucccacuucgugaaccuggacaaccugcgggccaacaacacgaaggggagccuccccaucaacgugaucgucuucgacggcaaguccaagugcgaggagagcuccgccaagagcgccuccguguacuacagccagcugaugugccagcccauccugcuccuggaccaggcgcuggugagcgacgucggcgacuccgccgagguggccgugaagauguucgacgccuacgucaacaccuucagcuccaccuucaacgugcccauggagaagcucaagacccugguggccacggcggaggccgagcuggccaagaacgucagccucgacaacgugcuguccaccuucaucagcgccgcgcgccagggguucguggacuccgacgucgagaccaaggacgugguggagugccugaagcucagccaccaguccgacaucgaggucaccggcgacagcugcaacaacuacaugcugacguacaacaagguggagaacaugaccccgcgggaccugggggccugcaucgacugcuccgcccgccacaucaacgcccagguggccaagagccacaacaucgcgcucaucuggaacgucaaggacuucaugucccugagcgagcagcugcggaagcagauccgcuccgccgccaagaagaacaaccuccccuucaagcugaccugcgccaccacgcgccagguggugaacgucgugaccaccaagaucgcccugaagggcgggugaggacuagucccuguucccagagcccacuuuuuuuucuuuuuuugaaauaaaauagccugucuuucagaucucaaaggcucuuuucagagccaccaaaaaaaaaaaaaaaaaaaaaaaaaaaaaaaaaaaaaaaaaaaaaaaaaaaaaaaaaaaaaaaaaaaaaaaaaaaaaaaaaaaaaaaaaaaaaaaaaaaaa

SEQ ID NO: 19549 - RNA, 6113 nt, Artificial Sequence
  SARS-CoV-2__MT892981.1__non-structural protein 3 (NSP3) mRNA gc
aggagagucccgcagucggcguccagcggcucugcuuguucgugugugugucguugcaggccuuauucaagcuuaccauggcccccaccaaggugaccuucggcgacgacacggucaucgaggugcagggguacaagagcgugaacaucaccuucgagcuggacgagcgcaucgacaagguccucaacgagaagugcuccgccuacaccguggagcugggcaccgaggugaacgaguucgcgugcgucguggccgacgccgugaucaagacgcugcagccggucagcgagcuccugaccccccuggggaucgaccucgacgagugguccauggccaccuacuaccuguucgacgagagcggcgaguucaagcuggccucccacauguacugcagcuucuacccccccgacgaggacgaggaggagggggacugcgaggaggaggaguucgagccguccacccaguacgaguacggcacggaggacgacuaccagggcaagccccucgaguucggggcgaccagcgccgcccugcagcccgaggaggagcaggaggaggacuggcuggacgacgacucccagcagaccgugggccagcaggacgggagcgaggacaaccagaccacgaccauccagaccaucguggagguccagccccagcucgagauggagcugaccccgguggugcagacgaucgaggucaacuccuucagcggcuaccugaagcucaccgacaacguguacaucaagaacgccgacaucguggaggaggcgaagaaggucaagcccaccgugguggucaacgccgccaacguguaccugaagcacgggggcggcguggccggggcccugaacaaggcgaccaacaacgccaugcaggucgaguccgacgacuacaucgccacgaacggcccccucaagguggggggcagcugcguccuguccggccacaaccuggccaagcacugccuccacgugguggggcccaacgucaacaagggcgaggacauccagcugcugaagagcgccuacgagaacuucaaccagcacgaggugcuccuggcgccgcugcucuccgccgggaucuucggcgccgaccccauccacagccugcgggugugcgucgacaccgugcgcaccaacguguaccuggccgucuucgacaagaaccucuacgacaagcugguguccagcuuccuggagaugaagagcgagaagcagguggagcagaagaucgccgagauccccaaggaggaggucaagcccuucaucaccgaguccaagccgagcguggagcagcggaagcaggacgacaagaagaucaaggcgugcguggaggaggucacgaccacccucgaggagaccaaguuccugacggagaaccugcuccuguacaucgacaucaacgggaaccugcaccccgacuccgccacccucgugagcgacaucgacaucaccuuccugaagaaggacgcccccuacaucgugggcgacgucgugcaggagggcgugcugaccgccgucgugauccccacgaagaaggccgggggcaccaccgagaugcucgcgaaggcccugcgcaaggugccgaccgacaacuacaucacgaccuaccccgggcagggccugaacggguacaccgucgaggaggccaagaccgugcucaagaagugcaaguccgccuucuacauccugcccagcaucaucuccaacgagaagcaggagauccugggcaccgugagcuggaaccuccgggagaugcuggcgcacgccgaggagacgcgcaagcugaugcccgucugcguggagaccaaggccaucguguccaccauccagcggaaguacaagggcaucaagauccaggagggggucguggacuacggcgcccgcuucuacuucuacaccagcaagacgaccguggccucccugaucaacacccucaacgaccugaacgagacccuggucacgaugccgcucggguacgugacccacggccugaaccuggaggaggcggcccgguacaugcgcagccucaaggugcccgccaccgucuccgugagcucccccgacgccgugaccgccuacaacggguaccugacgagcuccagcaagacccccgaggagcacuucaucgagaccaucucccuggcgggcagcuacaaggacuggagcuacuccggccagagcacccagcucgggaucgaguuccugaagcggggcgacaaguccgucuacuacacgagcaacccgaccaccuuccaccuggacggggaggugaucaccuucgacaaccucaagacgcugcugucccuccgcgaggugcggaccaucaaggucuucaccaccguggacaacaucaaccugcacacgcagguggucgacaugagcaugaccuacggccagcaguucggccccaccuaccuggacggggccgacgugaccaagaucaagccccacaacucccacgagggcaagacguucuacgugcucccgaacgacgacacccugcgcgucgaggccuucgaguacuaccacaccaccgaccccagcuuccuggggcgguacauguccgcccucaaccacacgaagaaguggaaguacccccaggugaacggccugaccagcaucaagugggccgacaacaacugcuaccuggcgaccgcccuccugauccugcagcagaucgagcucaaguucaaccccccggcccugcaggacgccuacuaccgcgcgcgggccggggaggccgccaacuucugcgcccugauccucgcguacugcaacaagaccgugggcgagcugggcgacguccgcgagacgauguccuaccuguuccagcacgccaaccucgacagcugcaagcgggugcugaacgucgugugcaagaccugcgggcagcagcagaccacccugaagggcguggaggccgucauguacauggggacccucuccuacgagcaguucaagaagggcgugcagauccccugcacgugcgggaagcaggccaccaaguaccuggugcagcaggagagccccuucgucaugauguccgcccccccggcgcaguacgagcugaagcacggcaccuucaccugcgccagcgaguacacgggcaacuaccagugcgggcacuacaagcacaucaccuccaaggagacccucuacugcaucgacggcgcccugcugaccaagagcagcgaguacaaggggcccaucacggacguguucuacaaggagaacuccuacaccaccaccaucaagcccgugacguacaagcucgacggcgucgugugcaccgagaucgaccccaagcuggacaacuacuacaagaaggacaacagcuacuucaccgagcagccgaucgaccuggugcccaaccagcccuaccccaacgccuccuucgacaacuucaaguucgucugcgacaacaucaaguucgccgacgaccucaaccagcugaccggguacaagaagccggcgagccgcgagcugaaggugacguucuuccccgaccucaacggcgacguggucgccaucgacuacaagcacuacacccccuccuucaagaagggcgccaagcugcugcacaagcccaucguguggcacgugaacaacgccaccaacaaggcgaccuacaagccgaacacguggugcauccggugccucuggagcaccaagcccgucgagaccuccaacagcuucgacgugcugaaguccgaggacgcccaggggauggacaaccuggccugcgaggaccucaagcccgugagcgaggaggucguggagaaccccaccauccagaaggacgugcuggagugcaacgucaagacgaccgagguggugggcgacaucauccugaagccggccaacaacucccucaagaucaccgaggaggucgggcacaccgaccugauggccgcguacguggacaacagcucccugacgaucaagaagcccaacgagcucagccgcgugcugggccugaagacccucgccacccacgggcuggccgccgucaacuccgugcccugggacaccaucgccaacuacgcgaagccguuccugaacaagguggucagcacgaccaccaacaucgugacccgcugccucaaccgggugugcacgaacuacaugcccuacuucuucacccugcugcuccagcugugcaccuucacccgcuccaccaacagccggaucaaggccuccaugcccacgaccaucgccaagaacaccgucaagagcgugggcaaguucugccuggaggccagcuucaacuaccucaagucccccaacuucagcaagcugaucaacaucaucaucugguuccugcuccuguccgugugccugggcagccucaucuacuccaccgccgcgcuggggguccugaugagcaaccucggcaugccguccuacugcacgggguaccgcgagggcuaccugaacagcaccaacgugaccaucgccaccuacugcacgggcuccauccccugcagcgugugccuguccgggcucgacagccuggacaccuaccccucccuggagaccauccagaucaccaucagcuccuucaagugggaccucacggccuucggccuggucgccgagugguuccuggccuacauccucuucacccgguucuucuacgugcuggggcuggcggccaucaugcagcucuucuucagcuacuucgccgugcacuucaucuccaacagcuggcugauguggcugaucaucaaccugguccagauggcccccaucuccgcgauggugcgcauguacaucuucuucgccagcuucuacuacguguggaagagcuacguccacgugguggacggcugcaacuccagcaccugcaugaugugcuacaagcggaaccgcgccacccgggucgagugcacgaccaucgugaacgggguccgccgguccuucuacguguacgccaacggcggcaagggguucugcaagcuccacaacuggaacugcgugaacugcgacaccuucugcgccggcagcaccuucaucuccgacgaggucgcgcgcgaccugagccugcaguucaagcggccgaucaaccccacggaccaguccagcuacaucguggacuccgugaccgucaagaacgggagcauccaccucuacuucgacaaggccggccagaagaccuacgagcgccacucccugagccacuucgugaaccuggacaaccuccgggccaacaacaccaaggggucccugcccaucaacgugaucgucuucgacggcaagagcaagugcgaggaguccagcgccaaguccgccagcguguacuacucccagcugaugugccagcccauccuccugcuggaccaggcgcucgugagcgacgucggcgacagcgccgagguggccgugaagauguucgacgccuacgucaacacguucuccagcaccuucaacgugccgauggagaagcugaagacccugguggccaccgcggaggccgagcucgccaagaacgucucccuggacaacgugcugagcacguucaucuccgccgcgcgccagggguucguggacagcgacgucgagaccaaggacgugguggagugccucaagcugucccaccagagcgacaucgaggucaccggcgacuccugcaacaacuacaugcugaccuacaacaagguggagaacaugacgccccgggaccucggggccugcaucgacugcagcgcccgccacaucaacgcccagguggccaagucccacaacaucgcgcugaucuggaacgucaaggacuucaugagccuguccgagcagcuccggaagcagauccgcagcgccgccaagaagaacaaccugcccuucaagcugaccugcgccaccacccgccagguggugaacgucgugacgaccaagaucgcccucaagggcgggugaggacuagucccuguucccagagcccacuuuuuuuucuuuuuuugaaauaaaauagccugucuuucagaucucaaaggcucuuuucagagccaccaaaaaaaaaaaaaaaaaaaaaaaaaaaaaaaaaaaaaaaaaaaaaaaaaaaaaaaaaaaaaaaaaaaaaaaaaaaaaaaaaaaaaaaaaaaaaaaaaaaaa

SEQ ID NO: 19550 - RNA, 6113 nt, Artificial Sequence
  SARS-CoV-2__MT892982.1__non-structural protein 3 (NSP3) mRNA gc
aggagagucccgcagucggcguccagcggcucugcuuguucgugugugugucguugcaggccuuauucaagcuuaccauggcccccaccaaggugaccuucggcgacgacacggucaucgaggugcagggguacaagagcgugaacaucaccuucgagcuggacgagcgcaucgacaagguccucaacgagaagugcuccgccuacaccguggagcugggcaccgaggugaacgaguucgcgugcgucguggccgacgccgugaucaagacgcugcagccggucagcgagcuccugaccccccuggggaucgaccucgacgagugguccauggccaccuacuaccuguucgacgagagcggcgaguucaagcuggccucccacauguacugcagcuucuacccccccgacgaggacgaggaggagggggacugcgaggaggaggaguucgagccguccacccaguacgaguacggcacggaggacgacuaccagggcaagccccucgaguucggggcgaccagcgccgcccugcagcccgaggaggagcaggaggaggacuggcuggacgacgacucccagcagaccgugggccagcaggacgggagcgaggacaaccagaccacgaccauccagaccaucguggagguccagccccagcucgagauggagcugaccccgguggugcagacgaucgaggucaacuccuucagcggcuaccugaagcucaccgacaacguguacaucaagaacgccgacaucguggaggaggcgaagaaggucaagcccaccgugguggucaacgccgccaacguguaccugaagcacgggggcggcguggccggggcccugaacaaggcgaccaacaacgccaugcaggucgaguccgacgacuacaucgccacgaacggcccccucaagguggggggcagcugcguccuguccggccacaaccuggccaagcacugccuccacgugguggggcccaacgucaacaagggcgaggacauccagcugcugaagagcgccuacgagaacuucaaccagcacgaggugcuccuggcgccgcugcucuccgccgggaucuucggcgccgaccccauccacagccugcgggugugcgucgacaccgugcgcaccaacguguaccuggccgucuucgacaagaaccucuacgacaagcugguguccagcuuccuggagaugaagagcgagaagcagguggagcagaagaucgccgagauccccaaggaggaggucaagcccuucaucaccgaguccaagccgagcguggagcagcggaagcaggacgacaagaagaucaaggcgugcguggaggaggucacgaccacccucgaggagaccaaguuccugacggagaaccugcuccuguacaucgacaucaacgggaaccugcaccccgacuccgccacccucgugagcgacaucgacaucaccuuccugaagaaggacgcccccuacaucgugggcgacgucgugcaggagggcgugcugaccgccgucgugauccccacgaagaaggccgggggcaccaccgagaugcucgcgaaggcccugcgcaaggugccgaccgacaacuacaucacgaccuaccccgggcagggccugaacggguacaccgucgaggaggccaagaccgugcucaagaagugcaaguccgccuucuacauccugcccagcaucaucuccaacgagaagcaggagauccugggcaccgugagcuggaaccuccgggagaugcuggcgcacgccgaggagacgcgcaagcugaugcccgucugcguggagaccaaggccaucguguccaccauccagcggaaguacaagggcaucaagauccaggagggggucguggacuacggcgcccgcuucuacuucuacaccagcaagacgaccguggccucccugaucaacacccucaacgaccugaacgagacccuggucacgaugccgcucggguacgugacccacggccugaaccuggaggaggcggcccgguacaugcgcagccucaaggugcccgccaccgucuccgugagcucccccgacgccgugaccgccuacaacggguaccugacgagcuccagcaagacccccgaggagcacuucaucgagaccaucucccuggcgggcagcuacaaggacuggagcuacuccggccagagcacccagcucgggaucgaguuccugaagcggggcgacaaguccgucuacuacacgagcaacccgaccaccuuccaccuggacggggaggugaucaccuucgacaaccucaagacgcugcugucccuccgcgaggugcggaccaucaaggucuucaccaccguggacaacaucaaccugcacacgcagguggucgacaugagcaugaccuacggccagcaguucggccccaccuaccuggacggggccgacgugaccaagaucaagccccacaacucccacgagggcaagacguucuacgugcucccgaacgacgacacccugcgcgucgaggccuucgaguacuaccacaccaccgaccccagcuuccuggggcgguacauguccgcccucaaccacacgaagaaguggaaguacccccaggugaacggccugaccagcaucaagugggccgacaacaacugcuaccuggcgaccgcccuccugacccugcagcagaucgagcucaaguucaaccccccggcccugcaggacgccuacuaccgcgcgcgggccggggaggccgugaacuucugcgcccugauccucgccuacugcaacaagacggucggcgagcugggcgacgugcgcgagaccauguccuaccuguuccagcacgcgaaccucgacagcugcaagcggguccugaacguggugugcaagaccugcgggcagcagcagaccacccugaagggcgucgaggccgugauguacauggggacgcucuccuacgagcaguucaagaagggcgugcagauccccugcaccugcgggaagcaggccaccaaguaccugguccagcaggagagccccuucgugaugauguccgcccccccggcccaguacgagcugaagcacggcaccuucacgugcgcgagcgaguacaccggcaacuaccagugcgggcacuacaagcacaucaccuccaaggagacccucuacugcaucgacggcgcccugcugacgaagagcagcgaguacaaggggcccaucaccgacguguucuacaaggagaacuccuacaccaccacgaucaagcccgucaccuacaagcucgacggcguggugugcaccgagaucgaccccaagcuggacaacuacuacaagaaggacaacagcuacuucaccgagcagccgaucgaccugguccccaaccagcccuaccccaacgccuccuucgacaacuucaaguucgugugcgacaacaucaaguucgccgacgaccucaaccagcugacgggguacaagaagccggccagccgcgagcugaaggugaccuucuuccccgaccucaacggcgacgucguggcgaucgacuacaagcacuacacccccuccuucaagaagggcgccaagcugcugcacaagcccaucguguggcacgucaacaacgccaccaacaaggccacguacaagccgaacaccuggugcauccggugccucuggagcaccaagcccguggagaccuccaacagcuucgacgugcugaaguccgaggacgcgcaggggauggacaaccuggccugcgaggaccucaagcccgucagcgaggaggugguggagaaccccacgauccagaaggacguccuggagugcaacgugaagaccaccgagguggucggcgacaucauccugaagccggccaacaacucccucaagaucaccgaggagguggggcacacggaccugauggccgccuacguggacaacagcucccugaccaucaagaagcccaacgagcucagccgcguccugggccugaagacccucgcgacccacgggcuggccgccgugaacuccgugcccugggacacgaucgccaacuacgccaagccguuccugaacaaggucgugagcaccaccaccaacaucgugacgcgcugccucaaccgggucugcaccaacuacaugcccuacuucuucacccugcugcuccagcugugcaccuucacccgcuccacgaacagccggaucaaggcguccaugcccaccaccaucgccaagaacaccgugaagagcgugggcaaguucugccuggaggccagcuucaacuaccucaagucccccaacuucagcaagcugaucaacaucaucaucugguuccugcuccuguccgucugccugggcagccucaucuacuccacggccgcccugggggugcugaugagcaaccucggcaugccguccuacugcaccggguaccgcgagggcuaccugaacagcaccaacgugaccaucgcgacguacugcaccggcuccauccccugcagcgucugccuguccgggcucgacagccuggacaccuaccccucccuggagaccauccagaucacgaucagcuccuucaagugggaccucaccgccuucggccugguggccgagugguuccuggccuacauccucuucacccgguucuucuacgugcuggggcuggccgcgaucaugcagcucuucuucagcuacuucgccguccacuucaucuccaacagcuggcugauguggcugaucaucaaccuggugcagauggcccccaucuccgccauggugcgcauguacaucuucuucgcgagcuucuacuacgucuggaagagcuacgugcacguggucgacggcugcaacuccagcaccugcaugaugugcuacaagcggaaccgcgccacgcggguggagugcaccaccaucgucaacggggugcgccgguccuucuacguguacgccaacggcggcaagggguucugcaagcuccacaacuggaacugcgucaacugcgacaccuucugcgccggcagcacguucaucuccgacgagguggcccgcgaccugagccugcaguucaagcggccgaucaaccccaccgaccaguccagcuacaucguggacuccgucaccgugaagaacgggagcauccaccucuacuucgacaaggcgggccagaagaccuacgagcgccacucccugagccacuucgugaaccuggacaaccuccgggccaacaacacgaaggggucccugcccaucaacgucaucguguucgacggcaagagcaagugcgaggaguccagcgccaaguccgccagcguguacuacucccagcugaugugccagcccauccuccugcuggaccaggcccucgucagcgacgugggcgacagcgcggagguggccgucaagauguucgacgccuacgugaacaccuucuccagcaccuucaacgugccgauggagaagcugaagacccuggucgccacggccgaggcggagcucgccaagaacgugucccuggacaacgugcugagcaccuucaucuccgccgcccgccagggguucgucgacagcgacguggagaccaaggacguggucgagugccucaagcugucccaccagagcgacaucgaggugaccggcgacuccugcaacaacuacaugcugacguacaacaagguggagaacaugaccccccgggaccucggggcgugcaucgacugcagcgcccgccacaucaacgcccaggucgccaagucccacaacaucgcccugaucuggaacgugaaggacuucaugagccuguccgagcagcuccggaagcagauccgcagcgcggccaagaagaacaaccugcccuucaagcugaccugcgccaccacgcgccagguggucaacguggugaccaccaagaucgcccucaagggcgggugaggacuagucccuguucccagagcccacuuuuuuuucuuuuuuugaaauaaaauagccugucuuucagaucucaaaggcucuuuucagagccaccaaaaaaaaaaaaaaaaaaaaaaaaaaaaaaaaaaaaaaaaaaaaaaaaaaaaaaaaaaaaaaaaaaaaaaaaaaaaaaaaaaaaaaaaaaaaaaaaaaaaa

SEQ ID NO: 19551 - RNA, 6113 nt, Artificial Sequence
  SARS-CoV-2__MT892985.1__non-structural protein 3 (NSP3) mRNA gc
aggagagucccgcagucggcguccagcggcucugcuuguucgugugugugucguugcaggccuuauucaagcuuaccauggcccccaccaaggugaccuucggcgacgacacggucaucgaggugcagggguacaagagcgugaacaucaccuucgagcuggacgagcgcaucgacaagguccucaacgagaagugcuccgccuacaccguggagcugggcaccgaggugaacgaguucgcgugcgucguggccgacgccgugaucaagacgcugcagccggucagcgagcuccugaccccccuggggaucgaccucgacgagugguccauggccaccuacuaccuguucgacgagagcggcgaguucaagcuggccucccacauguacugcagcuucuacccccccgacgaggacgaggaggagggggacugcgaggaggaggaguucgagccguccacccaguacgaguacggcacggaguacgacuaccagggcaagccccucgaguucggggcgaccagcgccgcccugcagcccgaggaggagcaggaggaggacuggcuggacgacgacucccagcagaccgugggccagcaggacgggagcgaggacaaccagaccacgaccauccagaccaucguggagguccagccccagcucgagauggagcugaccccgguggugcagacgaucgaggucaacuccuucagcggcuaccugaagcucaccgacaacguguacaucaagaacgccgacaucguggaggaggcgaagaaggucaagcccaccgugguggucaacgccgccaacguguaccugaagcacgggggcggcguggccggggcccugaacaaggcgaccaacaacgccaugcaggucgaguccgacgacuacaucgccacgaacggcccccucaagguggggggcagcugcguccuguccggccacaaccuggccaagcacugccuccacgugguggggcccaacgucaacaagggcgaggacauccagcugcugaagagcgccuacgagaacuucaaccagcacgaggugcuccuggcgccgcugcucuccgccgggaucuucggcgccgaccccauccacagccugcgggugugcgucgacaccgugcgcaccaacguguaccuggccgucuucgacaagaaccucuacgacaagcugguguccagcuuccuggagaugaagagcgagaagcagguggagcagaagaucgccgagauccccaaggaggaggucaagcccuucaucaccgaguccaagccgagcguggagcagcggaagcaggacgacaagaagaucaaggcgugcguggaggaggucacgaccacccucgaggagaccaaguuccugacggagaaccugcuccuguacaucgacaucaacgggaaccugcaccccgacuccgccacccucgugagcgacaucgacaucaccuuccugaagaaggacgcccccuacaucgugggcgacgucgugcaggagggcgugcugaccgccgucgugauccccacgaagaaggccgggggcaccaccgagaugcucgcgaaggcccugcgcaaggugccgaccgacaacuacaucacgaccuaccccgggcagggccugaacggguacaccgucgaggaggccaagaccgugcucaagaagugcaaguccgccuucuacauccugcccagcaucaucuccaacgagaagcaggagauccugggcaccgugagcuggaaccuccgggagaugcuggcgcacgccgaggagacgcgcaagcugaugcccgucugcguggagaccaaggccaucguguccaccauccagcggaaguacaagggcaucaagauccaggagggggucguggacuacggcgcccgcuucuacuucuacaccagcaagacgaccguggccucccugaucaacacccucaacgaccugaacgagacccuggucacgaugccgcucggguacgugacccacggccugaaccuggaggaggcggcccgguacaugcgcagccucaaggugcccgccaccgucuccgugagcucccccgacgccgugaccgccuacaacggguaccugacgagcuccagcaagacccccgaggagcacuucaucgagaccaucucccuggcgggcagcuacaaggacuggagcuacuccggccagagcacccagcucgggaucgaguuccugaagcggggcgacaaguccgucuacuacacgagcaacccgaccaccuuccaccuggacggggaggugaucaccuucgacaaccucaagacgcugcugucccuccgcgaggugcggaccaucaaggucuucaccaccguggacaacaucaaccugcacacgcagguggucgacaugagcaugaccuacggccagcaguucggccccaccuaccuggacggggccgacgugaccaagaucaagccccacaacucccacgagggcaagacguucuacgugcucccgaacgacgacacccugcgcgucgaggccuucgaguacuaccacaccaccgaccccagcuuccuggggcgguacauguccgcccucaaccacacgaagaaguggaaguacccccaggugaacggccugaccagcaucaagugggccgacaacaacugcuaccuggcgaccgcccuccugacccugcagcagaucgagcucaaguucaaccccccggcccugcaggacgccuacuaccgcgcgcgggccggggaggccgccaacuucugcgcccugauccucgcguacugcaacaagacggugggcgagcugggcgacguccgcgagaccauguccuaccuguuccagcacgccaaccucgacagcugcaagcgggugcugaacgucgugugcaagaccugcgggcagcagcagaccacccugaagggcguggaggccgucauguacauggggacgcucuccuacgagcaguucaagaagggcgugcagauccccugcaccugcgggaagcaggccaccaaguaccuggugcagcaggagagccccuucgucaugauguccgcccccccggcgcaguacgagcugaagcacggcaccuucacgugcgccagcgaguacaccggcaacuaccagugcgggcacuacaagcacaucaccuccaaggagacccucuacugcaucgacggcgcccugcugacgaagagcagcgaguacaaggggcccaucaccgacguguucuacaaggagaacuccuacaccaccacgaucaagcccgugaccuacaagcucgacggcgucgugugcaccgagaucgaccccaagcuggacaacuacuacaagaaggacaacagcuacuucaccgagcagccgaucgaccuggugcccaaccagcccuaccccaacgccuccuucgacaacuucaaguucgucugcgacaacaucaaguucgccgacgaccucaaccagcugacgggguacaagaagccggcgagccgcgagcugaaggugaccuucuuccccgaccucaacggcgacguggucgccaucgacuacaagcacuacacccccuccuucaagaagggcgccaagcugcugcacaagcccaucguguggcacgugaacaacgccaccaacaaggcgacguacaagccgaacaccuggugcauccggugccucuggagcaccaagcccgucgagaccuccaacagcuucgacgugcugaaguccgaggacgcccaggggauggacaaccuggccugcgaggaccucaagcccgugagcgaggaggucguggagaaccccacgauccagaaggacgugcuggagugcaacgucaagaccaccgagguggugggcgacaucauccugaagccggccaacaacucccucaagaucaccgaggaggucgggcacacggaccugauggccgcguacguggacaacagcucccugaccaucaagaagcccaacgagcucagccgcgugcugggccugaagacccucgccacccacgggcuggccgccgucaacuccgugcccugggacacgaucgccaacuacgcgaagccguuccugaacaagguggucagcaccaccaccaacaucgugacgcgcugccucaaccgggugugcaccaacuacaugcccuacuucuucacccugcugcuccagcugugcaccuucacccgcuccacgaacagccggaucaaggccuccaugcccaccaccaucgccaagaacaccgucaagagcgugggcaaguucugccuggaggccagcuucaacuaccucaagucccccaacuucagcaagcugaucaacaucaucaucugguuccugcuccuguccgugugccugggcagccucaucuacuccacggccgcgcuggggguccugaugagcaaccucggcaugccguccuacugcaccggguaccgcgagggcuaccugaacagcaccaacgugaccaucgccacguacugcaccggcuccauccccugcagcgugugccuguccgggcucgacagccuggacaccuaccccucccuggagaccauccagaucacgaucagcuccuucaagugggaccucaccgccuucggccuggucgccgagugguuccuggccuacauccucuucacccgguucuucuacgugcuggggcuggcggccaucaugcagcucuucuucagcuacuucgccgugcacuucaucuccaacagcuggcugauguggcugaucaucaaccugguccagauggcccccaucuccgcgauggugcgcauguacaucuucuucgccagcuucuacuacguguggaagagcuacguccacgugguggacggcugcaacuccagcaccugcaugaugugcuacaagcggaaccgcgccacgcgggucgagugcaccaccaucgugaacgggguccgccgguccuucuacguguacgccaacggcggcaagggguucugcaagcuccacaacuggaacugcgugaacugcgacaccuucugcgccggcagcacguucaucuccgacgaggucgcgcgcgaccugagccugcaguucaagcggccgaucaaccccaccgaccaguccagcuacaucguggacuccgugaccgucaagaacgggagcauccaccucuacuucgacaaggccggccagaagaccuacgagcgccacucccugagccacuucgugaaccuggacaaccuccgggccaacaacacgaaggggucccugcccaucaacgugaucgucuucgacggcaagagcaagugcgaggaguccagcgccaaguccgccagcguguacuacucccagcugaugugccagcccauccuccugcuggaccaggcgcucgugagcgacgucggcgacagcgccgagguggccgugaagauguucgacgccuacgucaacaccuucuccagcaccuucaacgugccgauggagaagcugaagacccugguggccacggcggaggccgagcucgccaagaacgucucccuggacaacgugcugagcaccuucaucuccgccgcgcgccagggguucguggacagcgacgucgagaccaaggacgugguggagugccucaagcugucccaccagagcgacaucgaggucaccggcgacuccugcaacaacuacaugcugacguacaacaagguggagaacaugaccccccgggaccucggggccugcaucgacugcagcgcccgccacaucaacgcccagguggccaagucccacaacaucgcgcugaucuggaacgucaaggacuucaugagccuguccgagcagcuccggaagcagauccgcagcgccgccaagaagaacaaccugcccuucaagcugaccugcgccaccacgcgccagguggugaacgucgugaccaccaagaucgcccucaagggcgggugaggacuagucccuguucccagagcccacuuuuuuuucuuuuuuugaaauaaaauagccugucuuucagaucucaaaggcucuuuucagagccaccaaaaaaaaaaaaaaaaaaaaaaaaaaaaaaaaaaaaaaaaaaaaaaaaaaaaaaaaaaaaaaaaaaaaaaaaaaaaaaaaaaaaaaaaaaaaaaaaaaaaa

SEQ ID NO: 19552 - RNA, 6113 nt, Artificial Sequence
  SARS-CoV-2__MT893006.1__non-structural protein 3 (NSP3) mRNA gc
aggagagucccgcagucggcguccagcggcucugcuuguucgugugugugucguugcaggccuuauucaagcuuaccauggcccccaccaaggugaccuucggcgacgacacggucaucgaggugcagggguacaagagcgugaacaucaccuucgagcuggacgagcgcaucgacaagguccucaacgagaagugcuccgccuacaccguggagcugggcaccgaggugaacgaguucgcgugcgucguggccgacgccgugaucaagacgcugcagccggucagcgagcuccugaccccccuggggaucgaccucgacgagugguccauggccaccuacuaccuguucgacgagagcggcgaguucaagcuggccucccacauguacugcagcuucuacccccccgacgaggacgaggaggagggggacugcgaggaggaggaguucgagccguccacccaguacgaguacggcacggaggacgacuaccagggcaagccccucgaguucggggcgaccagcgccgcccugcagcccgaggaggagcaggaggaggacuggcuggacgacgacucccagcagaccgugggccagcaggacgggagcgaggacaaccagaccacgaccauccagaccaucguggagguccagccccagcucgagauggagcugaccccgguggugcagacgaucgaggucaacuccuucagcggcuaccugaagcucaccgacaacguguacaucaagaacgccgacaucguggaggaggcgaagaaggucaagcccaccgugguggucaacgccgccaacguguaccugaagcacgggggcggcguggccggggcccugaacaaggcgaccaacaacgccaugcaggucgaguccgacgacuacaucgccacgaacggcccccucaagguggggggcagcugcguccuguccggccacaaccuggccaagcacugccuccacgugguggggcccaacgucaacaagggcgaggacauccagcugcugaagagcgccuacgagaacuucaaccagcacgaggugcuccuggcgccgcugcucuccgccgggaucuucggcgccgaccccauccacagccugcgggugugcgucgacaccgugcgcaccaacguguaccuggccgucuucgacaagaaccucuacgacaagcugguguccagcuuccuggagaugaagagcgagaagcagguggagcagaagaucgccgagauccccaaggaggaggucaagcccuucaucaccgaguccaagccgagcguggagcagcggaagcaggacgacaagaagaucaaggcgugcguggaggaggucacgaccacccucgaggagaccaaguuccugacggagaaccugcuccuguacaucgacaucaacgggaaccugcaccccgacuccgccacccucgugagcgacaucgacaucaccuuccugaagaaggacgcccccuacaucgugggcgacgucgugcaggagggcgugcugaccgccgucgugauccccacgaagaaggccgggggcaccaccgagaugcucgcgaaggcccugcgcaaggugccgaccgacaacuacaucacgaccuaccccgggcagggccugaacggguacaccgucgaggaggccaagaccgugcucaagaagugcaaguccgccuucuacauccugcccagcaucaucuccaacgagaagcaggagauccugggcaccgugagcuggaaccuccgggagaugcuggcgcacgccgaggagacgcgcaagcugaugcccgucugcguggagaccaaggccaucguguccaccauccagcggaaguacaagggcaucaagauccaggagggggucguggacuacggcgcccgcuucuacuucuacaccagcaagacgaccguggccucccugaucaacacccucaacgaccugaacgagacccuggucacgaugccgcucggguacgugacccacggccugaaccuggaggaggcggcccgguacaugcgcagccucaaggugcccgccaccgucuccgugagcucccccgacgccgugaccgccuacaacggguaccugacgagcuccagcaagacccccgaggagcacuucaucgagaccaucucccuggcgggcagcuacaaggacuggagcuacuccggccagagcacccagcucgggaucgaguuccugaagcggggcgacaaguccgucuacuacacgagcaacccgaccaccuuccaccuggacggggaggugaucaccuucgacaaccucaagacgcugcugucccuccgcgaggugcggaccaucaaggucuucaccaccguggacaacaucaaccugcacacgcagguggucgacaugagcaugaccuacggccagcaguucggccccaccuaccuggacggggccgacgugaccaagaucaagccccacaacucccacgagggcaagacguucuacgugcucccgaacgacgacacccugcgcgucgaggccuucgaguacuaccacaccaccgaccccagcuuccuggggcgguacauguccgcccucaaccacacgaagaaguggaaguacccccaggugaacggccugaccagcaucaagugggccgacaacaacugcuaccuggcgaccgcccuccugacccugcagcagaucgagcucaaguucaaccccccggcccugcaggacgccuacuaccgcgcgcgggccggggaggccgccaacuucugcgcccugauccucgcguacugcaacaagacggugggcgagcugggcgacguccgcgagaccauguccuaccuguuccagcacgccaaccucgacagcugcaagcgggugcugaacgucgugugcaagaccugcgggcagcagcagaccacccugaagggcguggaggccgucauguacauggggacgcucuccuacgagcaguucaagaagggcgugcagauccccugcaccugcgggaagcaggccaccaaguaccuggugcagcaggagagccccuucgucaugauguccgcccccccggcgcaguacgagcugaagcacggcaccuucacgugcgccagcgaguacaccggcaacuaccagugcgggcacuacaagcacaucaccuccaaggagacccucuacugcaucgacggcgcccugcugacgaagagcagcgaguacaaggggcccaucaccgacguguucuacaaggagaacuccuacaccaccacgaucaagcccgugaucuacaagcucgacggcgucgugugcaccgagaucgaccccaagcuggacaacuacuacaagaaggacaacagcuacuucaccgagcagccgaucgaccuggugcccaaccagcccuaccccaacgccuccuucgacaacuucaaguucgucugcgacaacaucaaguucgccgacgaccucaaccagcugaccggguacaagaagccggcgagccgcgagcugaaggugacguucuuccccgaccucaacggcgacguggucgccaucgacuacaagcacuacacccccuccuucaagaagggcgccaagcugcugcacaagcccaucguguggcacgugaacaacgccaccaacaaggcgaccuacaagccgaacacguggugcauccggugccucuggagcaccaagcccgucgagaccuccaacagcuucgacgugcugaaguccgaggacgcccaggggauggacaaccuggccugcgaggaccucaagcccgugagcgaggaggucguggagaaccccaccauccagaaggacgugcuggagugcaacgucaagacgaccgagguggugggcgacaucauccugaagccggccaacaacucccucaagaucaccgaggaggucgggcacaccgaccugauggccgcguacguggacaacagcucccugacgaucaagaagcccaacgagcucagccgcgugcugggccugaagacccucgccacccacgggcuggccgccgucaacuccgugcccugggacaccaucgccaacuacgcgaagccguuccugaacaagguggucagcacgaccaccaacaucgugacccgcugccucaaccgggugugcacgaacuacaugcccuacuucuucacccugcugcuccagcugugcaccuucacccgcuccaccaacagccggaucaaggccuccaugcccacgaccaucgccaagaacaccgucaagagcgugggcaaguucugccuggaggccagcuucaacuaccucaagucccccaacuucagcaagcugaucaacaucaucaucugguuccugcuccuguccgugugccugggcagccucaucuacuccaccgccgcgcuggggguccugaugagcaaccucggcaugccguccuacugcacgggguaccgcgagggcuaccugaacagcaccaacgugaccaucgccaccuacugcacgggcuccauccccugcagcgugugccuguccgggcucgacagccuggacaccuaccccucccuggagaccauccagaucaccaucagcuccuucaagugggaccucacggccuucggccuggucgccgagugguuccuggccuacauccucuucacccgguucuucuacgugcuggggcuggcggccaucaugcagcucuucuucagcuacuucgccgugcacuucaucuccaacagcuggcugauguggcugaucaucaaccugguccagauggcccccaucuccgcgauggugcgcauguacaucuucuucgccagcuucuacuacguguggaagagcuacguccacgugguggacggcugcaacuccagcaccugcaugaugugcuacaagcggaaccgcgccacccgggucgagugcacgaccaucgugaacgggguccgccgguccuucuacguguacgccaacggcggcaagggguucugcaagcuccacaacuggaacugcgugaacugcgacaccuucugcgccggcagcaccuucaucuccgacgaggucgcgcgcgaccugagccugcaguucaagcggccgaucaaccccacggaccaguccagcuacaucguggacuccgugaccgucaagaacgggagcauccaccucuacuucgacaaggccggccagaagaccuacgagcgccacucccugagccacuucgugaaccuggacaaccuccgggccaacaacaccaaggggucccugcccaucaacgugaucgucuucgacggcaagagcaagugcgaggaguccagcgccaaguccgccagcguguacuacucccagcugaugugccagcccauccuccugcuggaccaggcgcucgugagcgacgucggcgacagcgccgagguggccgugaagauguucgacgccuacgucaacacguucuccagcaccuucaacgugccgauggagaagcugaagacccugguggccaccgcggaggccgagcucgccaagaacgucucccuggacaacgugcugagcacguucaucuccgccgcgcgccagggguucguggacagcgacgucgagaccaaggacgugguggagugccucaagcugucccaccagagcgacaucgaggucaccggcgacuccugcaacaacuacaugcugaccuacaacaagguggagaacaugacgccccgggaccucggggccugcaucgacugcagcgcccgccacaucaacgcccagguggccaagucccacaacaucgcgcugaucuggaacgucaaggacuucaugagccuguccgagcagcuccggaagcagauccgcagcgccgccaagaagaacaaccugcccuucaagcugaccugcgccaccacccgccagguggugaacgucgugacgaccaagaucgcccucaagggcgggugaggacuagucccuguucccagagcccacuuuuuuuucuuuuuuugaaauaaaauagccugucuuucagaucucaaaggcucuuuucagagccaccaaaaaaaaaaaaaaaaaaaaaaaaaaaaaaaaaaaaaaaaaaaaaaaaaaaaaaaaaaaaaaaaaaaaaaaaaaaaaaaaaaaaaaaaaaaaaaaaaaaaa

SEQ ID NO: 19553 - RNA, 6113 nt, Artificial Sequence
  SARS-CoV-2__MT893010.1__non-structural protein 3 (NSP3) mRNA gc
aggagagucccgcagucggcguccagcggcucugcuuguucgugugugugucguugcaggccuuauucaagcuuaccauggcccccaccaaggugaccuucggcgacgacacggucaucgaggugcagggguacaagagcgugaacaucaccuucgagcuggacgaguccaucgacaagguccucaacgagaagugcagcgccuacaccguggagcugggcaccgaggugaacgaguucgcgugcgucguggccgacgccgugaucaagacgcugcagccggucuccgagcuccugaccccccuggggaucgaccucgacgaguggagcauggccaccuacuaccuguucgacgaguccggcgaguucaagcuggccagccacauguacugcuccuucuacccccccgacgaggacgaggaggagggggacugcgaggaggaggaguucgagccgagcacccaguacgaguacggcacggaggacgacuaccagggcaagccccucgaguucggggcgaccuccgccgcccugcagcccgaggaggagcaggaggaggacuggcuggacgacgacagccagcagaccgugggccagcaggacggguccgaggacaaccagaccacgaccauccagaccaucguggagguccagccccagcucgagauggagcugaccccgguggugcagacgaucgaggucaacagcuucuccggcuaccugaagcucaccgacaacguguacaucaagaacgccgacaucguggaggaggcgaagaaggucaagcccaccgugguggucaacgccgccaacguguaccugaagcacgggggcggcguggccggggcccugaacaaggcgaccaacaacgccaugcaggucgagagcgacgacuacaucgccacgaacggcccccucaagguggggggcuccugcguccugagcggccacaaccuggccaagcacugccuccacgugguggggcccaacgucaacaagggcgaggacauccagcugcugaaguccgccuacgagaacuucaaccagcacgaggugcuccuggcgccgcugcucagcgccgggaucuucggcgccgaccccauccacucccugcgcgugugcgucgacaccgugcggaccaacguguaccuggccgucuucgacaagaaccucuacgacaagcuggugagcagcuuccuggagaugaaguccgagaagcagguggagcagaagaucgccgagauccccaaggaggaggucaagcccuucaucaccgagagcaagccguccguggagcagcgcaagcaggacgacaagaagaucaaggcgugcguggaggaggucacgaccacccucgaggagaccaaguuccugacggagaaccugcuccuguacaucgacaucaacgggaaccugcaccccgacagcgccacccucguguccgacaucgacaucaccuuccugaagaaggacgcccccuacaucgugggcgacgucgugcaggagggcgugcugaccgccgucgugauccccacgaagaaggccgggggcaccaccgagaugcucgcgaaggcccugcggaaggugccgaccgacaacuacaucacgaccuaccccgggcagggccugaacggguacaccgucgaggaggccaagaccgugcucaagaagugcaagagcgccuucuacauccugcccuccaucaucagcaacgagaagcaggagauccugggcaccguguccuggaaccuccgcgagaugcuggcgcacgccgaggagacgcggaagcugaugcccgucugcguggagaccaaggccaucgugagcaccauccagcgcaaguacaagggcaucaagauccaggagggggucguggacuacggcgcccgguucuacuucuacaccuccaagacgaccguggccagccugaucaacacccucaacgaccugaacgagacccuggucacgaugccgcucggguacgugacccacggccugaaccuggaggaggcggcccgcuacaugcggucccucaaggugcccgccaccgucagcguguccagccccgacgccgugaccgccuacaacggguaccugacguccagcuccaagacccccgaggagcacuucaucgagaccaucagccuggcgggcagcuacaaggacugguccuacagcggccaguccacccagcucgggaucgaguuccugaagcgcggcgacaagagcgucuacuacacguccaacccgaccaccuuccaccuggacggggaggugaucaccuucgacaaccucaagacgcugcugagccuccgggaggugcgcaccaucaaggucuucaccaccguggacaacaucaaccugcacacgcagguggucgacauguccaugaccuacggccagcaguucggccccaccuaccuggacggggccgacgugaccaagaucaagccccacaacagccacgagggcaagacguucuacgugcucccgaacgacgacacccugcgggucgaggccuucgaguacuaccacaccaccgaccccuccuuccuggggcgcuacaugagcgcccucaaccacacgaagaaguggaaguacccccaggugaacggccugaccuccaucaagugggccgacaacaacugcuaccuggcgaccgcccuccugacccugcagcagaucgagcucaaguucaaccccccggcccugcaggacgccuacuaccgggcgcgcgccggggaggccgccaacuucugcgcccugauccucgcguacugcaacaagacggugggcgagcugggcgacguccgggagaccaugagcuaccuguuccagcacgccaaccucgacuccugcaagcgcgugcugaacgucgugugcaagaccugcgggcagcagcagaccacccugaagggcguggaggccgucauguacauggggacgcucagcuacgagcaguucaagaagggcgugcagauccccugcaccugcgggaagcaggccaccaaguaccuggugcagcaggagucccccuucgucaugaugagcgcccccccggcgcaguacgagcugaagcacggcaccuucacgugcgccuccgaguacaccggcaacuaccagugcgggcacuacaagcacaucaccagcaaggagacccucuacugcaucgacggcgcccugcugacgaagagcuccgaguacaaggggcccaucaccgacguguucuacaaggagaacagcuacaccaccacgaucaagcccgugaccuacaagcucgacggcgucgugugcaccgagaucgaccccaagcuggacaacuacuacaagaaggacaacuccuacuucaccgagcagccgaucgaccuggugcccaaccagcccuaccccaacgccagcuucgacaacuucaaguucgucugcgacaacaucaaguucgccgacgaccucaaccagcugacgggguacaagaagccggcgucccgggagcugaaggugaccuucuuccccgaccucaacggcgacguggucgccaucgacuacaagcacuacacccccagcuucaagaagggcgccaagcugcugcacaagcccaucguguggcacgugaacaacgccaccaacaaggcgacguacaagccgaacaccuggugcauccgcugccucugguccaccaagcccgucgagaccagcaacuccuucgacgugcugaagagcgaggacgcccaggggauggacaaccuggccugcgaggaccucaagcccguguccgaggaggucguggagaaccccacgauccagaaggacgugcuggagugcaacgucaagaccaccgagguggugggcgacaucauccugaagccggccaacaacagccucaagaucaccgaggaggucgggcacacggaccugauggccgcguacguggacaacuccagccugaccaucaagaagcccaacgagcucucccgggugcugggccugaagacccucgccacccacgggcuggccgccgucaacagcgugcccugggacacgaucgccaacuacgcgaagccguuccugaacaagguggucuccaccaccaccaacaucgugacgcgcugccucaaccgcgugugcaccaacuacaugcccuacuucuucacccugcugcuccagcugugcaccuucacccggagcacgaacucccgcaucaaggccagcaugcccaccaccaucgccaagaacaccgucaagagcgugggcaaguucugccuggaggccuccuucaacuaccucaagagccccaacuucuccaagcugaucaacaucaucaucugguuccugcuccugagcgugugccugggcucccucaucuacagcacggccgcgcuggggguccugauguccaaccucggcaugccgagcuacugcaccggguaccgggagggcuaccugaacuccaccaacgugaccaucgccacguacugcaccggcagcauccccugcuccgugugccugagcgggcucgacucccuggacaccuaccccagccuggagaccauccagaucacgaucuccagcuucaagugggaccucaccgccuucggccuggucgccgagugguuccuggccuacauccucuucacccgcuucuucuacgugcuggggcuggcggccaucaugcagcucuucuucuccuacuucgccgugcacuucaucagcaacuccuggcugauguggcugaucaucaaccugguccagauggcccccaucagcgcgauggugcggauguacaucuucuucgccagcuucuacuacguguggaaguccuacguccacgugguggacggcugcaacagcuccaccugcaugaugugcuacaagcgcaaccgggccacgcgcgucgagugcaccaccaucgugaacgggguccggcgcagcuucuacguguacgccaacggcggcaagggguucugcaagcuccacaacuggaacugcgugaacugcgacaccuucugcgccggcuccacguucaucagcgacgaggucgcgcgggaccugucccugcaguucaagcgcccgaucaaccccaccgaccagagcuccuacaucguggacagcgugaccgucaagaacggguccauccaccucuacuucgacaaggccggccagaagaccuacgagcggcacagccugucccacuucgugaaccuggacaaccuccgcgccaacaacacgaaggggagccugcccaucaacgugaucgucuucgacggcaaguccaagugcgaggagagcuccgccaagagcgccuccguguacuacagccagcugaugugccagcccauccuccugcuggaccaggcgcucgugagcgacgucggcgacuccgccgagguggccgugaagauguucgacgccuacgucaacaccuucagcuccaccuucaacgugccgauggagaagcugaagacccugguggccacggcggaggccgagcucgccaagaacgucagccuggacaacgugcuguccaccuucaucagcgccgcgcggcagggguucguggacuccgacgucgagaccaaggacgugguggagugccucaagcugagccaccaguccgacaucgaggucaccggcgacagcugcaacaacuacaugcugacguacaacaagguggagaacaugaccccccgcgaccucggggccugcaucgacugcuccgcccggcacaucaacgcccagguggccaagagccacaacaucgcgcugaucuggaacgucaaggacuucaugucccugagcgagcagcuccgcaagcagauccgguccgccgccaagaagaacaaccugcccuucaagcugaccugcgccaccacgcgccagguggugaacgucgugaccaccaagaucgcccucaagggcgggugaggacuagucccuguucccagagcccacuuuuuuuucuuuuuuugaaauaaaauagccugucuuucagaucucaaaggcucuuuucagagccaccaaaaaaaaaaaaaaaaaaaaaaaaaaaaaaaaaaaaaaaaaaaaaaaaaaaaaaaaaaaaaaaaaaaaaaaaaaaaaaaaaaaaaaaaaaaaaaaaaaaaa

SEQ ID NO: 19554 - RNA, 6113 nt, Artificial Sequence
  SARS-CoV-2__MT893018.1__non-structural protein 3 (NSP3) mRNA gc
aggagagucccgcagucggcguccagcggcucugcuuguucgugugugugucguugcaggccuuauucaagcuuaccauggcccccaccaaggugaccuucggcgacgacacggucaucgaggugcagggguacaagagcgugaacaucaccuucgagcuggacgagcgcaucgacaagguccucaacgagaagugcuccgccuacaccguggagcugggcaccgaggugaacgaguucgcgugcgucguggccgacgccgugaucaagacgcugcagccggucagcgagcuccugaccccccuggggaucgaccucgacgagugguccauggccaccuacuaccuguucgacgagagcggcgaguucaagcuggccucccacauguacugcagcuucuacccccccgacgaggacgaggaggagggggacugcgaggaggaggaguucgagccguccacccaguacgaguacggcacggaggacgacuaccagggcaagccccucgaguucggggcgaccagcgccgcccugcagcccgaggaggagcaggaggaggacuggcuggacgacgacucccagcagaccgugggccagcaggacgggagcgaggacaaccagaccacgaccauccagaccaucguggagguccagccccagcucgagauggagcugaccccgguggugcagacgaucgaggucaacuccuucagcggcuaccugaagcucaccgacaacguguacaucaagaacgccgacaucguggaggaggcgaagaaggucaagcccaccgugguggucaacgccgccaacguguaccugaagcacgggggcggcguggccggggcccugaacaaggcgaccaacaacgccaugcaggucgaguccgacgacuacaucgccacgaacggcccccucaagguggggggcagcugcguccuguccggccacaaccuggccaagcacugccuccacgugguggggcccaacgucaacaagggcgaggacauccagcugcugaagagcgccuacgagaacuucaaccagcacgaggugcuccuggcgccgcugcucuccgccgggaucuucggcgccgaccccauccacagccugcgggugugcgucgacaccgugcgcaccaacguguaccuggccgucuucgacaagaaccucuacgacaagcugguguccagcuuccuggagaugaagagcgagaagcagguggagcagaagaucgccgagauccccaaggaggaggucaagcccuucaucaccgaguccaagccgagcguggagcagcggaagcaggacgacaagaagaucaaggcgugcguggaggaggucacgaccacccucgaggagaccaaguuccugacggagaaccugcuccuguacaucgacaucaacgggaaccugcaccccgacuccgccacccucgugagcgacaucgacaucaccuuccugaagaaggacgcccccuacaucgugggcgacgucgugcaggagggcgugcugaccgccgucgugauccccacgaagaaggccgggggcaccaccgagaugcucgcgaaggcccugcgcaaggugccgaccgacaacuacaucacgaccuaccccgggcagggccugaacggguacaccgucgaggaggccaagaccgugcucaagaagugcaaguccgccuucuacauccugcccagcaucaucuccaacgagaagcaggagauccugggcaccgugagcuggaaccuccgggagaugcuggcgcacgccgaggagacgcgcaagcugaugcccgucugcguggagaccaaggccaucguguccaccauccagcggaaguacaagggcaucaagauccaggagggggucguggacuacggcgcccgcuucuacuucuacaccagcaagacgaccguggccucccugaucaacacccucaacgaccugaacgagacccuggucacgaugccgcucggguacgugacccacggccugaaccuggaggaggcggcccgguacaugcgcagccucaaggugcccgccaccgucuccgugagcucccccgacgccgugaccgccuacaacggguaccugacgagcuccagcaagacccccgaggagcacuucaucgagaccaucucccuggcgggcagcuacaaggacuggagcuacuccggccagagcacccagcucgggaucgaguuccugaagcggggcgacaaguccgucuacuacacgagcaacccgaccaccuuccaccuggacggggaggugaucaccuucgacaaccucaagacgcugcugucccuccgcgaggugcggaccaucaaggucuucaccaccguggacaacaucaaccugcacacgcagguggucgacaugagcaugaccuacggccagcaguucggccccaccuaccuggacggggccgacgugaccaagaucaagccccacaacucccacgagggcaagacguucuacgugcucccgaacgacgacauccugcgcgucgaggccuucgaguacuaccacaccaccgaccccagcuuccuggggcgguacauguccgcccucaaccacaccaagaaguggaaguacccccaggugaacggccugacgagcaucaagugggccgacaacaacugcuaccuggcgaccgcccuccugacccugcagcagaucgagcucaaguucaaccccccggcccugcaggacgccuacuaccgcgcgcgggccggggaggccgccaacuucugcgcccugauccucgcguacugcaacaagaccgugggcgagcugggcgacguccgcgagacgauguccuaccuguuccagcacgccaaccucgacagcugcaagcgggugcugaacgucgugugcaagaccugcgggcagcagcagaccacccugaagggcguggaggccgucauguacauggggacccucuccuacgagcaguucaagaagggcgugcagauccccugcacgugcgggaagcaggccaccaaguaccuggugcagcaggagagccccuucgucaugauguccgcccccccggcgcaguacgagcugaagcacggcaccuucaccugcgccagcgaguacacgggcaacuaccagugcgggcacuacaagcacaucaccuccaaggagacccucuacugcaucgacggcgcccugcugaccaagagcagcgaguacaaggggcccaucacggacguguucuacaaggagaacuccuacaccaccaccaucaagcccgugacguacaagcucgacggcgucgugugcaccgagaucgaccccaagcuggacaacuacuacaagaaggacaacagcuacuucaccgagcagccgaucgaccuggugcccaaccagcccuaccccaacgccuccuucgacaacuucaaguucgucugcgacaacaucaaguucgccgacgaccucaaccagcugaccggguacaagaagccggcgagccgcgagcugaaggugacguucuuccccgaccucaacggcgacguggucgccaucgacuacaagcacuacacccccuccuucaagaagggcgccaagcugcugcacaagcccaucguguggcacgugaacaacgccaccaacaaggcgaccuacaagccgaacacguggugcauccggugccucuggagcaccaagcccgucgagaccuccaacagcuucgacgugcugaaguccgaggacgcccaggggauggacaaccuggccugcgaggaccucaagcccgugagcgaggaggucguggagaaccccaccauccagaaggacgugcuggagugcaacgucaagacgaccgagguggugggcgacaucauccugaagccggccaacaacucccucaagaucaccgaggaggucgggcacaccgaccugauggccgcguacguggacaacagcucccugacgaucaagaagcccaacgagcucagccgcgugcugggccugaagacccucgccacccacgggcuggccgccgucaacuccgugcccugggacaccaucgccaacuacgcgaagccguuccugaacaagguggucagcacgaccaccaacaucgugacccgcugccucaaccgggugugcacgaacuacaugcccuacuucuucacccugcugcuccagcugugcaccuucacccgcuccaccaacagccggaucaaggccuccaugcccacgaccaucgccaagaacaccgucaagagcgugggcaaguucugccuggaggccagcuucaacuaccucaagucccccaacuucagcaagcugaucaacaucaucaucugguuccugcuccuguccgugugccugggcagccucaucuacuccaccgccgcgcuggggguccugaugagcaaccucggcaugccguccuacugcacgggguaccgcgagggcuaccugaacagcaccaacgugaccaucgccaccuacugcacgggcuccauccccugcagcgugugccuguccgggcucgacagccuggacaccuaccccucccuggagaccauccagaucaccaucagcuccuucaagugggaccucacggccuucggccuggucgccgagugguuccuggccuacauccucuucacccgguucuucuacgugcuggggcuggcggccaucaugcagcucuucuucagcuacuucgccgugcacuucaucuccaacagcuggcugauguggcugaucaucaaccugguccagauggcccccaucuccgcgauggugcgcauguacaucuucuucgccagcuucuacuacguguggaagagcuacguccacgugguggacggcugcaacuccagcaccugcaugaugugcuacaagcggaaccgcgccacccgggucgagugcacgaccaucgugaacgggguccgccgguccuucuacguguacgccaacggcggcaagggguucugcaagcuccacaacuggaacugcgugaacugcgacaccuucugcgccggcagcaccuucaucuccgacgaggucgcgcgcgaccugagccugcaguucaagcggccgaucaaccccacggaccaguccagcuacaucguggacuccgugaccgucaagaacgggagcauccaccucuacuucgacaaggccggccagaagaccuacgagcgccacucccugagccacuucgugaaccuggacaaccuccgggccaacaacaccaaggggucccugcccaucaacgugaucgucuucgacggcaagagcaagugcgaggaguccagcgccaaguccgccagcguguacuacucccagcugaugugccagcccauccuccugcuggaccaggcgcucgugagcgacgucggcgacagcgccgagguggccgugaagauguucgacgccuacgucaacacguucuccagcaccuucaacgugccgauggagaagcugaagacccugguggccaccgcggaggccgagcucgccaagaacgucucccuggacaacgugcugagcacguucaucuccgccgcgcgccagggguucguggacagcgacgucgagaccaaggacgugguggagugccucaagcugucccaccagagcgacaucgaggucaccggcgacuccugcaacaacuacaugcugaccuacaacaagguggagaacaugacgccccgggaccucggggccugcaucgacugcagcgcccgccacaucaacgcccagguggccaagucccacaacaucgcgcugaucuggaacgucaaggacuucaugagccuguccgagcagcuccggaagcagauccgcagcgccgccaagaagaacaaccugcccuucaagcugaccugcgccaccacccgccagguggugaacgucgugacgaccaagaucgcccucaagggcgggugaggacuagucccuguucccagagcccacuuuuuuuucuuuuuuugaaauaaaauagccugucuuucagaucucaaaggcucuuuucagagccaccaaaaaaaaaaaaaaaaaaaaaaaaaaaaaaaaaaaaaaaaaaaaaaaaaaaaaaaaaaaaaaaaaaaaaaaaaaaaaaaaaaaaaaaaaaaaaaaaaaaaa

SEQ ID NO: 19555 - RNA, 6113 nt, Artificial Sequence
  SARS-CoV-2__MT889692.1__non-structural protein 3 (NSP3) mRNA gc
aggagagucccgcagucggcguccagcggcucugcuuguucgugugugugucguugcaggccuuauucaagcuuaccauggcccccaccaaggugaccuucggcgacgacacggucaucgaggugcagggguacaagagcgugaacaucaccuucgagcuggacgagcgcaucgacaagguccucaacgagaagugcuccgccuacaccguggagcugggcaccgaggugaacgaguucgcgugcgucguggccgacgccgugaucaagacgcugcagccggucagcgagcuccugaccccccuggggaucgaccucgacgagugguccauggccaccuacuaccuguucgacgagagcggcgaguucaagcuggccucccacauguacugcagcuucuacccccccgacgaggacgaggaggagggggacugcgaggaggaggaguucgagccguccacccaguacgaguacggcacggaggacgacuaccagggcaagccccucgaguucggggcgaccagcgccgcccugcagcccgaggaggagcaggaggaggacuggcuggacgacgacucccagcagaccgugggccagcaggacgggagcgaggacaaccagaccacgaccauccagaccaucguggagguccagccccagcucgagauggagcugaccccgguggugcagacgaucgaggucaacuccuucagcggcuaccugaagcucaccgacaacguguacaucaagaacgccgacaucguggcggaggccaccaaggucaagcccaccgugguggucaacgccgccaacguguaccugaagcacgggggcggcguggccggggcgcugaacaaggccacgaacaacgccaugcaggucgaguccgacgacuacaucgccaccaacggcccccucaagguggggggcagcugcguccuguccggccacaaccuggccaagcaccggcuccacgugguggggcccaacgucaacaagggcgaggacauccagcugcugaagagcgcguacgagaacuucaaccagcacgaggugcuccuggccccgcugcucuccgccgggaucuucggcgccgaccccauccacagccugcgcgugugcgucgacaccgugcggaccaacguguaccuggccgucuucgacaagaaccucuacgacaagcugguguccagcuuccuggagaugaagagcgagaagcagguggagcagaagaucgcggagauccccaaggaggaggucaagcccuucaucacggaguccaagccgagcguggagcagcgcaagcaggacgacaagaagaucaaggccugcguggaggaggucaccaccacccucgaggagacgaaguuccugaccgagaaccugcuccuguacaucgacaucaacgggaaccugcaccccgacuccgccacccucgugagcgacaucgacaucaccuuccugaagaaggacgcccccuacaucgugggcgacgucgugcaggagggcgugcugacggccgucgugauccccaccaagaaggcggggggcaccaccgagaugcucgccaaggcccugcggaaggugccgacggacaacuacaucaccaccuaccccgggcagggccugaacggguacaccgucgaggaggccaagaccgugcucaagaagugcaaguccgcguucuacauccugcccagcaucaucuccaacgagaagcaggagauccugggcacggugagcuggaaccuccgcgagaugcuggcccacgccgaggagacccggaagcugaugcccgucugcguggagaccaaggccaucguguccaccauccagcgcaaguacaagggcaucaagauccaggagggggucguggacuacggcgcccgguucuacuucuacacgagcaagaccaccguggcgucccugaucaacacccucaacgaccugaacgagacgcuggucaccaugccgcucggguacgugacccacggccugaaccuggaggaggccgcccgcuacaugcggagccucaaggugcccgccaccgucuccgugagcucccccgacgccgugacggcguacaacggguaccugaccagcuccagcaagacccccgaggagcacuucaucgagaccaucucccuggccggcagcuacaaggacuggagcuacuccggccagagcacgcagcucgggaucgaguuccugaagcgcggcgacaaguccgucuacuacaccagcaacccgaccaccuuccaccuggacggggaggugaucacguucgacaaccucaagacccugcugucccuccgggaggugcgcaccaucaaggucuucaccacgguggacaacaucaaccugcacacccagguggucgacaugagcaugaccuacggccagcaguucggccccaccuaccuggacggggccgacgugacgaagaucaagccccacaacucccacgagggcaagaccuucuacgugcucccgaacgacgacacccugcgggucgaggccuucgaguacuaccacaccacggaccccagcuuccuggggcgcuacauguccgcccucaaccacaccaagaaguggaaguacccccaggugaacggccugaccagcaucaagugggcggacaacaacugcuaccuggccaccgcccuccugacgcugcagcagaucgagcucaaguucaaccccccggcccugcaggacgcguacuaccgggcccgcgccggggaggccgccaacuucugcgcgcugauccucgccuacugcaacaagaccgugggcgagcugggcgacguccgggagaccauguccuaccuguuccagcacgccaaccucgacagcugcaagcgcgugcugaacgucgugugcaagaccugcgggcagcagcagaccacgcugaagggcguggaggccgucauguacauggggacccucuccuacgagcaguucaagaagggcgugcagauccccugcaccugcgggaagcaggccaccaaguaccuggugcagcaggagagccccuucgucaugauguccgcgcccccggcccaguacgagcugaagcacggcacguucaccugcgccagcgaguacaccggcaacuaccagugcgggcacuacaagcacaucaccuccaaggagacgcucuacugcaucgacggcgcccugcugaccaagagcagcgaguacaaggggcccaucaccgacguguucuacaaggagaacuccuacaccacgaccaucaagcccgugaccuacaagcucgacggcgucgugugcaccgagaucgaccccaagcuggacaacuacuacaagaaggacaacagcuacuucacggagcagccgaucgaccuggugcccaaccagcccuaccccaacgccuccuucgacaacuucaaguucgucugcgacaacaucaaguucgcggacgaccucaaccagcugaccggguacaagaagccggccagccgggagcugaaggugaccuucuuccccgaccucaacggcgacguggucgccaucgacuacaagcacuacacccccuccuucaagaagggcgccaagcugcugcacaagcccaucguguggcacgugaacaacgcgacgaacaaggccaccuacaagccgaacaccuggugcauccgcugccucuggagcaccaagcccgucgagacguccaacagcuucgacgugcugaaguccgaggacgcccaggggauggacaaccuggccugcgaggaccucaagcccgugagcgaggaggucguggagaaccccaccauccagaaggacgugcuggagugcaacgucaagaccaccgagguggugggcgacaucauccugaagccggccaacaacucccucaagaucacggaggaggucgggcacaccgaccugauggcggccuacguggacaacagcucccugaccaucaagaagcccaacgagcucagccgcgugcugggccugaagacccucgccacgcacgggcuggccgccgucaacuccgugcccugggacaccaucgcgaacuacgccaagccguuccugaacaagguggucagcaccaccacgaacaucgugacccucugccugaaccgggugugcaccaacuacaugcccuacuucuucacccugcuccugcagcugugcaccuucacgcgcuccaccaacagccggaucaaggccuccaugcccaccaccaucgccaagaacacggucaagagcgugggcaaguucugccucgaggccagcuucaacuaccugaagucccccaacuucagcaagcugaucaacaucaucaucugguuccuccugcuguccgugugccucggcagccugaucuacuccaccgcggcccuggggguccucaugagcaaccugggcaugccguccuacugcaccggguaccgcgagggcuaccugaacagcaccaacgugacgaucgccaccuacugcaccggcuccauccccugcagcgugugccucuccgggcuggacagccuggacaccuaccccucccucgagacgauccagaucaccaucagcuccuucaagugggaccugaccgccuucggccuggucgccgagugguuccucgcguacauccuguucacccgguucuucuacgugcuggggcucgccgccaucaugcagcuguucuucagcuacuucgccgugcacuucaucuccaacagcuggcugauguggcugaucaucaaccucguccagauggcgcccaucuccgccauggugcgcauguacaucuucuucgccagcuucuacuacguguggaagagcuacguccacgugguggacggcugcaacuccagcacgugcaugaugugcuacaagcggaaccgcgccacccgggucgagugcaccaccaucgugaacgggguccgccgguccuucuacguguacgccaacggcggcaagggguucugcaagcugcacaacuggaacugcgugaacugcgacacguucugcgcgggcagcaccuucaucuccgacgaggucgcccgcgaccugagccuccaguucaagcggccgaucaaccccaccgaccaguccagcuacaucguggacuccgugaccgucaagaacgggagcauccaccuguacuucgacaaggccggccagaagacguacgagcgccacucccugagccacuucgugaaccucgacaaccugcgggccaacaacaccaaggggucccugcccaucaacgugaucgucuucgacggcaagagcaagugcgaggaguccagcgccaaguccgcgagcguguacuacucccagcucaugugccagcccauccugcugcucgaccaggcccuggugagcgacgucggcgacagcgccgagguggccgugaagauguucgacgccuacgucuccaccuucagcuccaccuucaacgugccgauggagaagcugaagacgcucguggcgaccgccgaggccgagcuggccaagaacgucagccuggacaacgugcucuccaccuucaucagcgcggcccgccagggguucguggacuccgacgucgagaccaaggacgugguggagugccugaagcugagccaccaguccgacaucgaggucacgggcgacagcugcaacaacuacaugcucaccuacaacaagguggagaacaugaccccccgggaccugggggccugcaucgacugcuccgcccgccacaucaacgcccagguggcgaagagccacaacaucgcccugaucuggaacgucaaggacuucaugucccucagcgagcagcugcggaagcagauccgcuccgccgccaagaagaacaaccugcccuucaagcucaccugcgccacgacccgccagguggugaacgucgugaccaccaagaucgcgcugaagggcgggugaggacuagucccuguucccagagcccacuuuuuuuucuuuuuuugaaauaaaauagccugucuuucagaucucaaaggcucuuuucagagccaccaaaaaaaaaaaaaaaaaaaaaaaaaaaaaaaaaaaaaaaaaaaaaaaaaaaaaaaaaaaaaaaaaaaaaaaaaaaaaaaaaaaaaaaaaaaaaaaaaaaaa

SEQ ID NO: 19556 - RNA, 6113 nt, Artificial Sequence
  SARS-CoV-2__MT883499.1__non-structural protein 3 (NSP3) mRNA gc
aggagagucccgcagucggcguccagcggcucugcuuguucgugugugugucguugcaggccuuauucaagcuuaccauggcccccaccaaggugaccuucggcgacgacacggucaucgaggugcagggguacaagagcgugaacaucaccuucgagcuggacgagcgcaucgacaagguccucaacgagaagugcuccgccuacaccguggagcugggcaccgaggugaacgaguucgcgugcgucguggccgacgccgugaucaagacgcugcagccggucagcgagcuccugaccccccuggggaucgaccucgacgagugguccauggccaccuacuaccuguucgacgagagcggcgaguucaagcuggccucccacauguacugcagcuucuacccccccgacgaggacgaggaggagggggacugcgaggaggaggaguucgagccguccacccaguacgaguacggcacggaggacgacuaccagggcaagccccucgaguucggggcgaccagcgccgcccugcagcccgaggaggagcaggaggaggacuggcuggacgacgacucccagcagaccgugggccagcaggacgggagcgaggacaaccagaccacgaccauccagaccaucguggagguccagccccagcucgagauggagcugaccccgguggugcagacgaucgaggucaacuccuucagcggcuaccugaagcucaccgacaacguguacaucaagaacgccgacaucguggaggaggcgaagaaggucaagcccaccgugguggucaacgccgccaacguguaccugaagcacgggggcggcguggccggggcccugaacaaggcgaccaacaacgccaugcaggucgaguccgacgacuacaucgccacgaacggcccccucaagguggggggcagcugcguccuguccggccacaaccuggccaagcacugccuccacgugguggggcccaacgucaacaagggcgaggacauccagcugcugaagagcgccuacgagaacuucaaccagcacgaggugcuccuggcgccgcugcucuccgccgggaucuucggcgccgaccccauccacagccugcgggugugcgucgacaccgugcgcaccaacguguaccuggccgucuucgacaagaaccucuacgacaagcugguguccagcuuccuggagaugaagagcgagaagcagguggagcagaagaucgccgagauccccaaggaggaggucaagcccuucaucaccgaguccaagccgagcguggagcagcggaagcaggacgacaagaagaucaaggcgugcguggaggaggucacgaccacccucgaggagaucaaguuccugaccgagaaccugcuccuguacaucgacaucaacgggaaccugcaccccgacuccgccacgcucgugagcgacaucgacaucaccuuccugaagaaggacgcccccuacaucgugggcgacgucgugcaggagggcgugcugaccgccgucgugauccccaccaagaaggccgggggcacgaccgagaugcucgcgaaggcccugcgcaaggugccgaccgacaacuacaucaccacguaccccgggcagggccugaacggguacaccgucgaggaggccaagaccgugcucaagaagugcaaguccgccuucuacauccugcccagcaucaucuccaacgagaagcaggagauccugggcaccgugagcuggaaccuccgggagaugcuggcgcacgccgaggagacccgcaagcugaugcccgucugcguggagacgaaggccaucguguccaccauccagcggaaguacaagggcaucaagauccaggagggggucguggacuacggcgcccgcuucuacuucuacaccagcaagaccacgguggccucccugaucaacacccucaacgaccugaacgagacccuggucaccaugccgcucggguacgugacgcacggccugaaccuggaggaggcggcccgguacaugcgcagccucaaggugcccgccaccgucuccgugagcucccccgacgccgugaccgccuacaacggguaccugaccagcuccagcaagacgcccgaggagcacuucaucgagaccaucucccuggcgggcagcuacaaggacuggagcuacuccggccagagcacccagcucgggaucgaguuccugaagcggggcgacaaguccgucuacuacaccagcaacccgacgaccuuccaccuggacggggaggugaucaccuucgacaaccucaagacccugcugucccuccgcgaggugcggacgaucaaggucuucaccaccguggacaacaucaaccugcacacccagguggucgacaugagcaugacguacggccagcaguucggccccaccuaccuggacggggccgacgugaccaagaucaagccccacaacucccacgagggcaagaccuucuacgugcucccgaacgacgacacgcugcgcgucgaggccuucgaguacuaccacaccaccgaccccagcuuccuggggcgguacauguccgcccucaaccacaccaagaaguggaaguacccccaggugaacggccugacgagcaucaagugggccgacaacaacugcuaccuggcgaccgcccuccugacccugcagcagaucgagcucaaguucaaccccccggcccugcaggacgccuacuaccgcgcgcgggccggggaggccgccaacuucugcgcccugauccucgcguacugcaacaagaccgugggcgagcugggcgacguccgcgagacgauguccuaccuguuccagcacgccaaccucgacagcugcaagcgggugcugaacgucgugugcaagaccugcgggcagcagcagaccacccugaagggcguggaggccgucauguacauggggacccucuccuacgagcaguucaagaagggcgugcagauccccugcacgugcgggaagcaggccaccaaguaccuggugcagcaggagagccccuucgucaugauguccgcccccccggcgcaguacgagcugaagcacggcaccuucaccugcgccagcgaguacacgggcaacuaccagugcgggcacuacaagcacaucaccuccaaggagacccucuacugcaucgacggcgcccugcugaccaagagcagcgaguacaaggggcccaucacggacguguucuacaaggagaacuccuacaccaccaccaucaagcccgugacguacaagcucgacggcgucgugugcaccgagaucgaccccaagcuggacaacuacuacaagaaggacaacagcuacuucaccgagcagccgaucgaccuggugcccaaccagcccuaccccaacgccuccuucgacaacuucaaguucgucugcgacaacaucaaguucgccgacgaccucaaccagcugaccggguacaagaagccggcgagccgcgagcugaaggugacguucuuccccgaccucaacggcgacguggucgccaucgacuacaagcacuacacccccuccuucaagaagggcgccaagcugcugcacaagcccaucguguggcacgugaacaacgccaccaacaaggcgaccuacaagccgaacacguggugcauccggugccucuggagcaccaagcccgucgagaccuccaacagcuucgacgugcugaaguccgaggacgcccaggggauggacaaccuggccugcgaggaccucaagcccgugagcgaggaggucguggagaaccccaccauccagaaggacgugcuggagugcaacgucaagacgaccgagguggugggcgacaucauccugaagccggccaacaacucccucaagaucaccgaggaggucgggcacaccgaccugauggccgcguacguggacaacagcucccugacgaucaagaagcccaacgagcucagccgcgugcugggccugaagacccucgccacccacgggcuggccgccgucaacuccgugcccugggacaccaucgccaacuacgcgaagccguuccugaacaagguggucagcacgaccaccaacaucgugacccgcugccucaaccgggugugcacgaacuacaugcccuacuucuucacccugcugcuccagcugugcaccuucacccgcuccaccaacagccggaucaaggccuccaugcccacgaccaucgccaagaacaccgucaagagcgugggcaaguucugccuggaggccagcuucaacuaccucaagucccccaacuucagcaagcugaucaacaucaucaucugguuccugcuccuguccgugugccugggcagccucaucuacuccaccgccgcgcuggggguccugaugagcaaccucggcaugccguccuacugcacgggguaccgcgagggcuaccugaacagcaccaacgugaccaucgccaccuacugcacgggcuccauccccugcagcgugugccuguccgggcucgacagccuggacaccuaccccucccuggagaccauccagaucaccaucagcuccuucaagugggaccucacggccuucggccuggucgccgagugguuccuggccuacauccucuucacccgguucuucuacgugcuggggcuggcggccaucaugcagcucuucuucagcuacuucgccgugcacuucaucuccaacagcuggcugauguggcugaucaucaaccugguccagauggcccccaucuccgcgauggugcgcauguacaucuucuucgccagcuucuacuacguguggaagagcuacguccacgugguggacggcugcaacuccagcaccugcaugaugugcuacaagcggaaccgcgccacccgggucgagugcacgaccaucgugaacgggguccgccgguccuucuacguguacgccaacggcggcaagggguucugcaagcuccacaacuggaacugcgugaacugcgacaccuucugcgccggcagcaccuucaucuccgacgaggucgcgcgcgaccugagccugcaguucaagcggccgaucaaccccacggaccaguccagcuacaucguggacuccgugaccgucaagaacgggagcauccaccucuacuucgacaaggccggccagaagaccuacgagcgccacucccugagccacuucgugaaccuggacaaccuccgggccaacaacaccaaggggucccugcccaucaacgugaucgucuucgacggcaagagcaagugcgaggaguccagcgccaaguccgccagcguguacuacucccagcugaugugccagcccauccuccugcuggaccaggcgcucgugagcgacgucggcgacagcgccgagguggccgugaagauguucgacgccuacgucaacacguucuccagcaccuucaacgugccgauggagaagcugaagacccugguggccaccgcggaggccgagcucgccaagaacgucucccuggacaacgugcugagcacguucaucuccgccgcgcgccagggguucguggacagcgacgucgagaccaaggacgugguggagugccucaagcugucccaccagagcgacaucgaggucaccggcgacuccugcaacaacuacaugcugaccuacaacaagguggagaacaugacgccccgggaccucggggccugcaucgacugcagcgcccgccacaucaacgcccagguggccaagucccacaacaucgcgcugaucuggaacgucaaggacuucaugagccuguccgagcagcuccggaagcagauccgcagcgccgccaagaagaacaaccugcccuucaagcugaccugcgccaccacccgccagguggugaacgucgugacgaccaagaucgcccucaagggcgggugaggacuagucccuguucccagagcccacuuuuuuuucuuuuuuugaaauaaaauagccugucuuucagaucucaaaggcucuuuucagagccaccaaaaaaaaaaaaaaaaaaaaaaaaaaaaaaaaaaaaaaaaaaaaaaaaaaaaaaaaaaaaaaaaaaaaaaaaaaaaaaaaaaaaaaaaaaaaaaaaaaaaa

SEQ ID NO: 19557 - RNA, 6113 nt, Artificial Sequence
  SARS-CoV-2__MT886301.1__non-structural protein 3 (NSP3) mRNA gc
aggagagucccgcagucggcguccagcggcucugcuuguucgugugugugucguugcaggccuuauucaagcuuaccauggcccccaccaaggugaccuucggcgacgacacggucaucgaggugcagggguacaagagcgugaacaucaccuucgagcuggacgagcgcaucgacaagguccucaacgagaagugcuccgccuacaccguggagcugggcaccgaggugaacgaguucgcgugcgucgugacggacgccgugaucaagacccugcagccggucagcgagcuccugaccccccuggggaucgaccucgacgagugguccauggccaccuacuaccuguucgacgagagcggcgaguucaagcuggccucccacauguacugcagcuucuacccccccgacgaggacgaggaggagggggacugcgaggaggaggaguucgagccguccacgcaguacgaguacggcaccgaggacgacuaccagggcaagccccucgaguucggggccaccagcgcggcccugcagcccgaggaggagcaggaggaggacuggcuggacgacgacucccagcagaccgugggccagcaggacgggagcgaggacaaccagacgaccaccauccagaccaucguggagguccagccccagcucgagauggagcugacgccgguggugcagaccaucgaggucaacuccuucagcggcuaccugaagcucaccgacaacguguacaucaagaacgccgacaucguggaggaggccaagaaggucaagcccaccgugguggucaacgcggccaacguguaccugaagcacgggggcggcguggccggggcccugaacaaggccacgaacaacgcgaugcaggucgaguccgacgacuacaucgccaccaacggcccccucaagguggggggcagcugcguccuguccggccacaaccuggccaagcacugccuccacgugguggggcccaacgucaacaagggcgaggacauccagcugcugaagagcgccuacgagaacuucaaccagcacgaggugcuccuggccccgcugcucuccgcggggaucuucggcgccgaccccauccacagccugcgggugugcgucgacaccgugcgcaccaacguguaccuggccgucuucgacaagaaccucuacgacaagcugguguccagcuuccuggagaugaagagcgagaagcagguggagcagaagaucgccgagauccccaaggaggaggucaagcccuucaucacggaguccaagccgagcguggagcagcggaagcaggacgacaagaagaucaaggccugcguggaggaggucaccaccacccucgaggagacgaaguuccugaccgagaaccugcuccuguacaucgacaucaacgggaaccugcaccccgacuccgcgacccucgugagcgacaucgacaucaccuuccugaagaaggacgcccccuacaucgugggcgacgucgugcaggagggcgugcugacggccgucgugauccccaccaagaaggccgggggcaccaccgagaugcucgccaaggcgcugcgcaaggugccgacggacaacuacaucaccaccuaccccgggcagggccugaacggguacaccgucgaggaggccaagaccgugcucaagaagugcaaguccgccuucuacauccugcccagcaucaucuccaacgagaagcaggagauccugggcacggugagcuggaaccuccgggagaugcuggcccacgcggaggagacccgcaagcugaugcccgucugcguggagaccaaggccaucguguccaccauccagcggaaguacaagggcaucaagauccaggagggggucguggacuacggcgcccgcuucuacuucuacacgagcaagaccaccguggccucccugaucaacacccucaacgaccugaacgagacgcuggucaccaugccgcucggguacgugacccacggccugaaccuggaggaggccgcgcgguacaugcgcagccucaaggugcccgccaccgucuccgugagcucccccgacgccgugacggccuacaacggguaccugaccagcuccagcaagacccccgaggagcacuucaucgagaccaucucccuggccggcagcuacaaggacuggagcuacuccggccagagcacgcagcucgggaucgaguuccugaagcggggcgacaaguccgucuacuacaccagcaacccgaccaccuuccaccuggacggggaggugaucacguucgacaaccucaagacccugcugucccuccgcgaggugcggaccaucaaggucuucaccacgguggacaacaucaaccugcacacccagguggucgacaugagcaugaccuacggccagcaguucggccccaccuaccuggacggggcggacgugacgaagaucaagccccacaacucccacgagggcaagaccuucuacgugcucccgaacgacgacacccugcgcgucgaggccuucgaguacuaccacaccacggaccccagcuuccuggggcgguacauguccgcccucaaccacaccaagaaguggaaguacccccaggugaacggccugaccagcaucaagugggccgacaacaacugcuaccuggccaccgcgcuccugacgcugcagcagaucgagcucaaguucaaccccccggcccugcaggacgccuacuaccgcgcccgggcgggggaggccgccaacuucugcgcccugauccucgccuacugcaacaagaccgugggcgagcugggcgacguccgcgagaccauguccuaccuguuccagcacgcgaaccucgacagcugcaagcgggugcugaacgucgugugcaagaccugcgggcagcagcagaccacgcugaagggcguggaggccgucauguacauggggacccucuccuacgagcaguucaagaagggcgugcagauccccugcaccugcgggaagcaggccaccaaguaccuggugcagcaggagagccccuucgucaugauguccgcccccccggcccaguacgagcugaagcacggcacguucaccugcgcgagcgaguacaccggcaacuaccagugcgggcacuacaagcacaucaccuccaaggagacgcucuacugcaucgacggcgcccugcugaccaagagcagcgaguacaaggggcccaucaccgacguguucuacaaggagaacuccuacaccacgaccaucaagcccgugaccuacaagcucgacggcgucgugugcaccgagaucgaccccaagcuggacaacuacuacaagaaggacaacagcuacuucacggagcagccgaucgaccuggugcccaaccagcccuaccccaacgccuccuucgacaacuucaaguucgucugcgacaacaucaaguucgccgacgaccucaaccagcugaccggguacaagaagccggccagccgcgagcugaaggugaccuucuuccccgaccucaacggcgacguggucgcgaucgacuacaagcacuacacccccuccuucaagaagggcgccaagcugcugcacaagcccaucguguggcacgugaacaacgccacgaacaaggccaccuacaagccgaacaccuggugcauccggugccucuggagcaccaagcccgucgagacguccaacagcuucgacgugcugaaguccgaggacgcgcaggggauggacaaccuggccugcgaggaccucaagcccgugagcgaggaggucguggagaaccccaccauccagaaggacgugcuggagugcaacgucaagaccaccgagguggugggcgacaucauccugaagccggccaacaacucccucaagaucacggaggaggucgggcacaccgaccugauggccgccuacguggacaacagcucccugaccaucaagaagcccaacgagcucagccgcgugcugggccugaagacccucgcgacgcacgggcuggccgccgucaacuccgugcccugggacaccaucgccaacuacgccaagccguuccugaacaagguggucagcaccaccacgaacaucgugacccgcugccucaaccgggugugcaccaacuacaugcccuacuucuucacccugcugcuccagcugugcaccuucacgcgcuccaccaacagccggaucaaggcguccaugcccaccaccaucgccaagaacacggucaagagcgugggcaaguucugccuggaggccagcuucaacuaccucaagucccccaacuucagcaagcugaucaacaucaucaucugguuccugcuccuguccgugugccugggcagccucaucuacuccaccgccguccugggggugcugaugagcaaccucggcaugccguccuacugcaccggguaccgcgagggcuaccugaacagcaccaacgugacgaucgccaccuacugcaccggcuccauccccugcagcgucugccuguccgggcucgacagccuggacaccuaccccucccuggagacgauccagaucaccaucagcuccuucaagugggaccucaccgcguucggccugguggccgagugguuccuggccuacauccucuucacccgguucuucuacgugcuggggcuggccgccaucaugcagcucuucuucagcuacuucgcgguccacuucaucuccaacagcuggcugauguggcugaucaucaaccuggugcagauggcccccaucuccgccauggugcgcauguacaucuucuucgccagcuucuacuacgucuggaagagcuacgugcacguggucgacggcugcaacuccagcacgugcaugaugugcuacaagcggaaccgcgcgacccggguggagugcaccaccaucgucaacggggugcgccgguccuucuacguguacgccaacggcggcaagggguucugcaagcuccacaacuggaacugcgucaacugcgacacguucugcgccggcagcaccuucaucuccgacgagguggcccgcgaccugagccugcaguucaagcggccgaucaaccccaccgaccaguccagcuacaucguggacuccgucaccgugaagaacgggagcauccaccucuacuucgacaaggccggccagaagacguacgagcgccacucccugagccacuucgugaaccuggacaaccuccgggcgaacaacaccaaggggucccugcccaucaacgucaucguguucgacggcaagagcaagugcgaggaguccagcgccaaguccgccagcguguacuacucccagcugaugugccagcccauccuccugcuggaccaggcccucgucagcgacgugggcgacagcgccgagguggcggucaagauguucgacgccuacgugaacaccuucuccagcaccuucaacgugccgauggagaagcugaagacgcuggucgccaccgccgaggccgagcucgcgaagaacgugucccuggacaacgugcugagcaccuucaucuccgccgcccgccagggguucgucgacagcgacguggagaccaaggacguggucgagugccucaagcugucccaccagagcgacaucgaggugacgggcgacuccugcaacaacuacaugcugaccuacaacaagguggagaacaugaccccccgggaccucggggccugcaucgacugcagcgcgcgccacaucaacgcccaggucgccaagucccacaacaucgcccugaucuggaacgugaaggacuucaugagccuguccgagcagcuccggaagcagauccgcagcgccgcgaagaagaacaaccugcccuucaagcugaccugcgccacgacccgccagguggucaacguggugaccaccaagaucgcccucaagggcgggugaggacuagucccuguucccagagcccacuuuuuuuucuuuuuuugaaauaaaauagccugucuuucagaucucaaaggcucuuuucagagccaccaaaaaaaaaaaaaaaaaaaaaaaaaaaaaaaaaaaaaaaaaaaaaaaaaaaaaaaaaaaaaaaaaaaaaaaaaaaaaaaaaaaaaaaaaaaaaaaaaaaaa

SEQ ID NO: 19558 - RNA, 6113 nt, Artificial Sequence
  SARS-CoV-2__MT886315.1__non-structural protein 3 (NSP3) mRNA gc
aggagagucccgcagucggcguccagcggcucugcuuguucgugugugugucguugcaggccuuauucaagcuuaccauggcccccaccaaggugaccuucggcgacgacacggucaucgaggugcagggguacaagagcgugaacaucaccuucgagcuggacgagcgcaucgacaagguccucaacgagaagugcuccgccuacaccguggagcugggcaccgaggugaacgaguucgcgugcgucguggccgacgccgugaucaagacgcugcagccggucagcgagcuccugaccccccuggggaucgaccucgacgagugguccauggccaccuacuaccuguucgacgagagcggcgaguucaagcuggccucccacauguacugcagcuucuacccccccgacgaggacgaggaggagggggacugcgaggaggaggaguucgagccguccacccaguacgaguacggcacggaggacgacuaccagggcaagccccucgaguucggggcgaccagcgccgcccugcagcccgaggaggagcaggaggaggacuggcuggacgacgacucccagcagaccgugggccagcaggacgggagcgaggacaaccagaccacgaccauccagaccaucguggagguccagccccagcucgagauggagcugaccccgguggugcagacgaucgaggucaacuccuucagcggcuaccugaagcucaccgacaacguguacaucaagaacgccgacaucguggaggaggcgaagaaggucaagcccaccgugguggucaacgccgccaacguguaccugaagcacgggggcggcguggccggggcccugaacaaggcgaccaacaacgccaugcaggucgaguccgacgacuacaucgccacgaacggcccccucaagguggggggcagcugcguccuguccggccacaaccuggccaagcacugccuccacgugguggggcccaacgucaacaagggcgaggacauccagcugcugaagagcgccuacgagaacuucaaccagcacgaggugcuccuggcgccgcugcucuccgccgggaucuucggcgccgaccccauccacagccugcgggugugcgucgacaccgugcgcaccaacguguaccuggccgucuucgacaagaaccucuacgacaagcugguguccagcuuccuggagaugaagagcgagaagcagguggagcagaagaucgccgagauccccaaggaggaggucaagcccuucaucaccgaguccaagccgagcguggagcagcggaagcaggacgacaagaagaucaaggcgugcguggaggaggucacgaccacccucgaggagaccaaguuccugacggagaaccugcuccuguacaucgacaucaacgggaaccugcaccccgacuccgccacccucgugagcgacaucgacaucaccuuccugaagaaggacgcccccuacaucgugggcgacgucgugcaggagggcgugcugaccgccgucgugauccccacgaagaaggccgggggcaccaccgagaugcucgcgaaggcccugcgcaaggugccgaccgacaacuacaucacgaccuaccccgggcagggccugaacggguacaccgucgaggaggccaagaccgugcucaagaagugcaaguccgccuucuacauccugcccagcaucaucuccaacgagaagcaggagauccugggcaccgugagcuggaaccuccgggagaugcuggcgcacgccgaggagacgcgcaagcugaugcccgucugcguggagaccaaggccaucguguccaccauccagcggaaguacaagggcaucaagauccaggagggggucguggacuacggcgcccgcuucuacuucuacaccagcaagacgaccguggccucccugaucaacacccucaacgaccugaacgagacccuggucacgaugccgcucggguacgugacccacggccugaaccuggaggaggcggcccgguacaugcgcagccucaaggugcccgccaccgucuccgugagcucccccgacgccgugaccgccuacaacggguaccugacgagcuccagcaagacccuggaggagcacuucaucgagaccaucucccucgcgggcagcuacaaggacuggagcuacuccggccagagcacccagcuggggaucgaguuccugaagcggggcgacaaguccgucuacuacacgagcaaccccaccaccuuccaccucgacggggaggugaucaccuucgacaaccugaagacgcugcucucccugcgcgaggugcggaccaucaaggucuucaccaccguggacaacaucaaccugcacacgcagguggucgacaugagcaugaccuacggccagcaguucggcccgaccuaccucgacggggccgacgugaccaagaucaagccccacaacucccacgagggcaagacguucuacgugcugcccaacgacgacacccugcgcgucgaggccuucgaguacuaccacaccaccgacccgagcuuccucgggcgguacauguccgcccugaaccacacgaagaaguggaaguacccccaggugaacggccugaccagcaucaagugggccgacaacaacugcuaccucgcgaccgcccugcugacccuccagcagaucgagcugaaguucaacccccccgcccugcaggacgccuacuaccgcgcgcgggccggggaggccgccaacuucugcgcccucauccuggcguacugcaacaagacggugggcgagcugggcgacguccgcgagaccauguccuaccucuuccagcacgccaaccuggacagcugcaagcgggugcugaacgucgugugcaagaccugcgggcagcagcagaccacccucaagggcguggaggccgucauguacauggggacgcuguccuacgagcaguucaagaagggcgugcagaucccgugcaccugcgggaagcaggccaccaaguaccuggugcagcaggagagccccuucgucaugauguccgccccccccgcgcaguacgagcucaagcacggcaccuucacgugcgccagcgaguacaccggcaacuaccagugcgggcacuacaagcacaucaccuccaaggagacccuguacugcaucgacggcgcccugcucacgaagagcagcgaguacaaggggccgaucaccgacguguucuacaaggagaacuccuacaccaccacgaucaagcccgugaccuacaagcuggacggcgucgugugcaccgagaucgaccccaagcuggacaacuacuacaagaaggacaacagcuacuucaccgagcagcccaucgaccucgugccgaaccagcccuaccccaacgccuccuucgacaacuucaaguucgucugcgacaacaucaaguucgccgacgaccugaaccagcugacgggguacaagaagcccgcgagccgcgagcucaaggugaccuucuucccggaccugaacggcgacguggucgccaucgacuacaagcacuacacccccuccuucaagaagggcgccaagcugcuccacaagcccaucguguggcacgugaacaacgccaccaacaaggcgacguacaagcccaacaccuggugcauccggugccuguggagcaccaagccggucgagaccuccaacagcuucgacgugcugaaguccgaggacgcccaggggauggacaaccucgccugcgaggaccugaagcccgugagcgaggaggucguggagaaccccacgauccagaaggacgugcuggagugcaacgucaagaccaccgagguggugggcgacaucauccucaagcccgccaacaacucccugaagaucaccgaggaggucgggcacacggaccugauggccgcguacguggacaacagcucccucaccaucaagaagccgaacgagcugagccgcgugcugggccucaagacccuggccacccacgggcuggccgccgucaacuccgugcccugggacacgaucgccaacuacgcgaagcccuuccucaacaagguggucagcaccaccaccaacaucgugacgcgcugccugaaccgggugugcaccaacuacaugccguacuucuucacccugcuccugcagcugugcaccuucacccgcuccacgaacagccggaucaaggccuccaugcccaccaccaucgccaagaacaccgucaagagcgugggcaaguucugccucgaggccagcuucaacuaccugaagucccccaacuucagcaagcugaucaacaucaucaucugguuccuccugcuguccgugugccucggcagccugaucuacuccacggccgcgcuggggguccucaugagcaaccugggcaugcccuccuacugcaccggguaccgcgagggcuaccugaacagcaccaacgugaccaucgccacguacugcaccggcuccaucccgugcagcgugugccucuccgggcuggacagccuggacaccuaccccucccucgagaccauccagaucacgaucagcuccuucaagugggaccugaccgccuucggccuggucgccgagugguuccucgccuacauccuguucacccgguucuucuacgugcuggggcucgcggccaucaugcagcuguucuucagcuacuucgccgugcacuucaucuccaacagcuggcugauguggcugaucaucaaccucguccagauggcccccaucuccgcgauggugcgcauguacaucuucuucgccagcuucuacuacguguggaagagcuacguccacgugguggacggcugcaacuccagcaccugcaugaugugcuacaagcggaaccgcgccacgcgggucgagugcaccaccaucgugaacgggguccgccgguccuucuacguguacgccaacggcggcaagggguucugcaagcugcacaacuggaacugcgugaacugcgacaccuucugcgccggcagcacguucaucuccgacgaggucgcgcgcgaccugagccuccaguucaagcggcccaucaacccgaccgaccaguccagcuacaucguggacuccgugaccgucaagaacgggagcauccaccuguacuucgacaaggccggccagaagaccuacgagcgccacucccugagccacuucgugaaccucgacaaccugcgggccaacaacacgaaggggucccugcccaucaacgugaucgucuucgacggcaagagcaagugcgaggaguccagcgccaaguccgccagcguguacuacucccagcucaugugccagcccauccugcugcucgaccaggcgcuggugagcgacgucggcgacagcgccgagguggccgugaagauguucgacgccuacgucaacaccuucuccagcaccuucaacgugcccauggagaagcugaagacccucguggccacggcggaggccgagcuggccaagaacgucucccuggacaacgugcucagcaccuucaucuccgccgcgcgccagggguucguggacagcgacgucgagaccaaggacgugguggagugccugaagcugucccaccagagcgacaucgaggucaccggcgacuccugcaacaacuacaugcucacguacaacaagguggagaacaugaccccgcgggaccugggggccugcaucgacugcagcgcccgccacaucaacgcccagguggccaagucccacaacaucgcgcugaucuggaacgucaaggacuucaugagccucuccgagcagcugcggaagcagauccgcagcgccgccaagaagaacaaccugcccuucaagcucaccugcgccaccacgcgccagguggugaacgucgugaccaccaagaucgcccugaagggcgggugaggacuagucccuguucccagagcccacuuuuuuuucuuuuuuugaaauaaaauagccugucuuucagaucucaaaggcucuuuucagagccaccaaaaaaaaaaaaaaaaaaaaaaaaaaaaaaaaaaaaaaaaaaaaaaaaaaaaaaaaaaaaaaaaaaaaaaaaaaaaaaaaaaaaaaaaaaaaaaaaaaaaa

SEQ ID NO: 19559 - RNA, 6113 nt, Artificial Sequence
  SARS-CoV-2__MT886334.1__non-structural protein 3 (NSP3) mRNA gc
aggagagucccgcagucggcguccagcggcucugcuuguucgugugugugucguugcaggccuuauucaagcuuaccauggcccccaccaaggugaccuucggcgacgacacggucaucgaggugcagggguacaagagcgugaacaucaccuucgagcuggacgagcgcaucgacaagguccucaacgagaagugcuccgccuacaccguggagcugggcaccgaggugaacgaguucgcgugcgucguggccgacgccgugaucaagacgcugcagccggucagcgagcuccugaccccccuggggaucgaccucgacgagugguccauggccaccuacuaccuguucgacgagagcggcgaguucaagcuggccucccacauguacugcagcuucuacccccccgacgaggacgaggaggagggggacugcgaggaggaggaguucgagccguccacccaguacgaguacggcacggaggacgacuaccagggcaagccccucgaguucggggcgaccagcgccgcccugcagcccgaggaggagcaggaggaggacuggcuggacgacgacucccagcagaccgugggccagcaggacgggagcgaggacaaccagaccacgaccauccagaccaucguggagguccagccccagcucgagauggagcugaccccgguggugcagacgaucgaggucaacuccuucagcggcuaccugaagcucaccgacaacguguacaucaagaacgccgacaucguggaggaggcgaagaaggucaagcccaccgugguggucaacgccgccaacguguaccugaagcacgggggcggcguggccggggcccugaacaaggcgaccaacaacgccaugcaggucgaguccgacgacuacaucgccacgaacggcccccucaagguggggggcagcugcguccuguccggccacaaccuggccaagcacugccuccacgugguggggcccaacgucaacaagggcgaggacauccagcugcugaagagcgccuacgagaacuucaaccagcacgaggugcuccuggcgccgcugcucuccgccgggaucuucggcgccgaccccauccacagccugcgggugugcgucgacaccgugcgcaccaacguguaccuggccgucuucgacaagaaccucuacgacaagcugguguccagcuuccuggagaugaagagcgagaagcagguggagcagaagaucgccgagauccccaaggaggaggucaagcccuucaucaccgaguccaagccgagcguggagcagcggaagcaggacgacaagaagaucaaggcgugcguggaggaggucacgaccacccucgaggagaccaaguuccugacggagaaccugcuccuguacaucgacaucaacgggaaccugcaccccgacuccgccacccucgugagcgacaucgacaucaccuuccugaagaaggacgcccccuacaucgugggcgacgucgugcaggagggcgugcugaccgccgucgugauccccacgaagaaggccgggggcaccaccgagaugcucgcgaaggcccugcgcaaggugccgaccgacaacuacaucacgaccuaccccgggcagggccugaacggguacaccgucgaggaggccaagaccgugcucaagaagugcaaguccgccuucuacauccugcccagcaucaucuccaacgagaagcaggagauccugggcaccgugagcuggaaccuccgggagaugcuggcgcacgccgaggagacgcgcaagcugaugcccgucugcguggagaccaaggccaucguguccaccauccagcggaaguacaagggcaucaagauccaggagggggucguggacuacggcgcccgcuucuacuucuacaccagcaagacgaccguggccucccugaucaacacccucaacgaccugaacgagacccuggucacgaugccgcucggguacgugacccacggccugaaccuggaggaggcggcccgguacaugcgcagccucaaggugcccgccaccgucuccgugagcucccccgacgccgugaccgccuacaacggguaccugacgagcuccagcaagacccccgaggagcacuucaucgagaccaucucccuggcgggcagcuacaaggacuggagcuacuccggccagagcacccagcucgggaucgaguuccugaagcggggcgacaaguccgucuacuacacgagcaacccgaccaccuuccaccuggacggggaggugaucaccuucgacaaccucaagacgcugcugucccuccgcgaggugcggaccaucaaggucuucaccaccguggacaacaucaaccugcacacgcagguggucgacaugagcaugaccuacggccagcaguucggccccaccuaccuggacggggccgacgugaccaagaucaagccccacaacucccacgagggcaagacguucuacgugcucccgaacgacgacacccugcgcgucgaggccuucgaguacuaccacaccaccgaccccagcuuccuggggcgguacauguccgcccucaaccacacgaagaaguggaaguacccccaggugaacggccugaccagcaucaagugggccgacaacaacugcuaccuggcgaccgcccuccugacccugcagcagaucgagcucaaguucaaccccccggcccugcaggacgccuacuaccgcgcgcgggccggggaggccgccaacuucugcgcccugauccucgcguacugcaacaagacggugggcgagcugggcgacguccgcgagaccauguccuaccuguuccagcacgccaaccucgacagcugcaagcgggugcugaacgucgugugcaagaccugcgggcagcagcagaccacccugaagggcguggaggccgucauguacauggggacgcucuccuacgagcaguucaagaagggcgugcagauccccugcaccugcgggaagcaggccaccaaguaccuggugcagcaggagagccccuucgucaugauguccgcccccccggcgcaguacgagcugaagcacggcaccuucacgugcgccagcgaguacaccggcaacuaccagugcgggcacuacaagcacaucaccuccaaggagacccucuacugcaucgacggcgcccugcugacgaagagcagcgaguacaaggggcccaucaccgacguguucuacaaggagaacuccuacaccaccacgaucaagcccgugaccuacaagcucgacggcgucgugugcaccgagaucgaccccaagcuggacaacuacuacaagaaggacaacagcuacuucaccgagcagccgaucgaccuggugcccaaccagcccuaccccaacgccuccuucgacaacuucaaguucgucugcgacaacaucaaguucgccgacgaccucaaccagcugacgggguacaagaagccggcgagccgcgagcugaaggugaccuucuuccccgaccucaacggcgacguggucgccaucgacuacaagcacuacacccccuccuucaagaagggcgccaagcugcugcacaagcccaucguguggcacgugaacaacgccaccaacaaggcgacguacaagccgaacaccuggugcauccggugccucuggagcaccaagcccgucgagaccuccaacagcuucgacgugcugaaguccgaggacgcccaggggauggacaaccuggccugcgaggaccucaagcccgugagcgaggaggucguggagaaccccacgauccagaaggacgugcuggagugcaacgucaagaccaccgagguggugggcgacaucauccugaagccggccaacaacucccucaagaucaccgaggaggucgggcacacggaccugauggccgcguacguggacaacagcucccugaccaucaagaagcccaacgagcucagccgcgugcugggccugaagacccucgccacccacgggcuggccgccgucaacuccgugcccugggacacgaucgccaacuacgcgaagccguuccugaacaagguggucagcaccaccaccaacaucgugacgcgcugccucaaccgggugugcaccaacuacaugcccuacuucuucacccugcugcuccagcugugcaccuucacccgcuccacgaacagccggaucaaggccuccaugcccaccaccaucgccaagaacaccgucaagagcgugggcaaguucugccuggaggccagcuucaacuaccucaagucccccaacuucagcaagcugaucaacaucaucaucugguuccugcuccuguccgugugccugggcagccucaucuacuccacggccgcgcuggggguccugaugagcaaccucggcaugccguccuacugcaccggguaccgcgagggcuaccugaacagcaccaacgugaccaucgccacguacugcaccggcuccauccccugcagcgugugccuguccgggcucgacagccuggacaccuaccccucccuggagaccauccagaucacgaucagcuccuucaagugggaccucaccgccuucggccuggucgccgagugguuccuggccuacauccucuucacccgguucuucuacgugcuggggcuggcggccaucaugcagcucuucuucagcuacuucgccgugcacuucaucuccaacagcuggcugauguggcugaucaucaaccugguccagauggcccccaucuccgcgauggugcgcauguacaucuucuucgccagcuucuacuacguguggaagagcuacguccacgugguggacggcugcaacuccagcaccugcaugaugugcuacaagcggaaccgcgccacgcgggucgagugcaccaccaucgugaacgggguccgccgguccuucuacguguacgccaacggcggcaagggguucugcaagcuccacaacuggaacugcgugaacugcgacaccuucugcgccggcagcacguucaucuccgacgaggucgcgcgcgaccugagccugcaguucaagcggccgaucaaccccaccgaccaguccagcuacaucguggacuccgugaccgucaagaacgggagcauccaccucuacuucgacaaggccggccagaagaccuacgagcgccacucccugagccacuucgugaaccuggacaaccuccgggccaacaacacgaaggggucccugcccaucaacgugaucgucuucgacggcaagagcaagugcgaggaguccagcgccaaguccgccagcguguacuacucccagcugaugugccagcccauccuccugcuggaccaggcgcucgugagcgacgucggcgacagcgccgagguggccgugaagauguucgacgccuacgucaacaccuucuccagcaccuucaacgugccgauggagaagcugaagacccuguucgccacggcggaggccgagcucgccaagaacgugucccuggacaacguccugagcaccuucaucuccgccgcgcgccagggguucguggacagcgacguggagaccaaggacgucguggagugccucaagcugucccaccagagcgacaucgaggugaccggcgacuccugcaacaacuacaugcugacguacaacaaggucgagaacaugaccccccgggaccucggggccugcaucgacugcagcgcccgccacaucaacgcccagguggccaagucccacaacaucgcgcugaucuggaacgugaaggacuucaugagccuguccgagcagcuccggaagcagauccgcagcgccgccaagaagaacaaccugcccuucaagcugaccugcgccaccacgcgccaggucgugaacguggucaccaccaagaucgcccucaagggcgggugaggacuagucccuguucccagagcccacuuuuuuuucuuuuuuugaaauaaaauagccugucuuucagaucucaaaggcucuuuucagagccaccaaaaaaaaaaaaaaaaaaaaaaaaaaaaaaaaaaaaaaaaaaaaaaaaaaaaaaaaaaaaaaaaaaaaaaaaaaaaaaaaaaaaaaaaaaaaaaaaaaaaa

SEQ ID NO: 19560 - RNA, 6113 nt, Artificial Sequence
  SARS-CoV-2__MT886345.1__non-structural protein 3 (NSP3) mRNA gc
aggagagucccgcagucggcguccagcggcucugcuuguucgugugugugucguugcaggccuuauucaagcuuaccauggcccccaccaaggugaccuucggcgacgacacggucaucgaggugcagggguacaagagcgugaacaucaccuucgagcuggacgagcgcaucgacaagguccucaacgagaagugcuccgccuacaccguggagcugggcaccgaggugaacgaguucgcgugcgucguggccgacgccgugaucaagacgcugcagccggucagcgagcuccugaccccccuggggaucgaccucgacgagugguccauggccaccuacuaccuguucgacgagagcggcgaguucaagcuggccucccacauguacugcagcuucuacccccccgacgaggacgaggaggagggggacugcgaggaggaggaguucgagccguccacccaguacgaguacggcacggaggacgacuaccagggcaagccccucgaguucggggcgaccagcgccgcccugcagcccgaggaggagcaggaggaggacuggcuggacgacgacucccagcagaccgugggccagcaggacgggagcgaggacaaccagaccacgaccauccagaccaucguggagguccagccccagcucgagauggagcugaccccgguggugcagacgaucgaggucaacuccuucagcggcuaccugaagcucaccgacaacguguacaucaagaacgccgacaucguggaggaggcgaagaaggucaagcccaccgugguggucaacgccgccaacguguaccugaagcacgggggcggcguggccggggcccugaacaaggcgaccaacaacgccaugcaggucgaguccgacgacuacaucgccacgaacggcccccucaagguggggggcagcugcguccuguccggccacaaccuggccaagcacugccuccacgugguggggcccaacgucaacaagggcgaggacauccagcugcugaagagcgccuacgagaacuucaaccagcacgaggugcuccuggcgccgcugcucuccgccgggaucuucggcgccgaccccauccacagccugcgggugugcgucgacaccgugcgcaccaacguguaccuggccgucuucgacaagaaccucuacgacaagcugguguccagcuuccuggagaugaagagcgagaagcagguggagcagaagaucgccgagauccccaaggaggaggucaagcccuucaucaccgaguccaagccgagcguggagcagcggaagcaggacgacaagaagaucaaggcgugcguggaggaggucacgaccacccucgaggagaccaaguuccugacggagaaccugcuccuguacaucgacaucaacgggaaccugcaccccgacuccgccacccucgugagcgacaucgacaucaccuuccugaagaaggacgcccccuacaucgugggcgacgucgugcaggagggcgugcugaccgccgucgugauccccacgaagaaggccgggggcaccaccgagaugcucgcgaaggcccugcgcaaggugccgaccgacaacuacaucacgaccuaccccgggcagggccugaacggguacaccgucgaggaggccaagaccgugcucaagaagugcaaguccgccuucuacauccugcccagcaucaucuccaacgagaagcaggagauccugggcaccgugagcuggaaccuccgggagaugcuggcgcacgccgaggagacgcgcaagcugaugcccgucugcguggagaccaaggccaucguguccaccauccagcggaaguacaagggcaucaagauccaggagggggucguggacuacggcgcccgcuucuacuucuacaccagcaagacgaccguggccucccugaucaacacccucaacgaccugaacgagacccuggucacgaugccgcucggguacgugacccacggccugaaccuggaggaggcggcccgguacaugcgcagccucaaggugcccgccaccgucuccgugagcucccccgacgccgugaccgccuacaacggguaccugacgagcuccagcaagacccccgaggagcacuucaucgagaccaucucccuggcgggcagcuacaaggacuggagcuacuccggccagagcacccagcucgggaucgaguuccugaagcggggcgacaaguccgucuacuacacgagcaacccgaccaccuuccaccuggacggggaggugaucaccuucgacaaccucaagacgcugcugucccuccgcgaggugcggaccaucaaggucuucaccaccguggacaacaucaaccugcacacgcagguggucgacaugagcaugaccuacggccagcaguucggccccaccuaccuggacggggccgacgugaccaagaucaagccccacaacucccacgagggcaagacguucuacgugcucccgaacgacgacacccugcgcgucgaggccuucgaguacuaccacaccaccgaccccagcuuccuggggcgguacauguccgcccucaaccacacgaagaaguggaaguacccccaggugaacggccugaccagcaucaagugggccgacaacaacugcuaccuggcgaccgcccuccugacccugcagcagaucgagcucaaguucaaccccccggcccugcaggacgccuacuaccgcgcgcgggccggggaggccgccaacuucugcgcccugauccucgcguacugcaacaagacggugggcgagcugggcgacguccgcgagaccauguccuaccuguuccagcacgccaaccucgacagcugcaagcgggugcugaacgucgugugcaagaccugcgggcagcagcagaccacccugaagggcguggaggccgucauguacauggggacgcucuccuacgagcaguucaagaagggcgugcagauccccugcaccugcgggaagcaggccaccaaguaccuggugcagcaggagagccccuucgucaugauguccgcccccccggcgcaguacgagcugaagcacggcaccuucacgugcgccagcgaguacaccggcaacuaccagugcgggcacuacaagcacaucaccuccaaggagacccucuacugcaucgacggcgcccugcugacgaagagcagcgaguacaaggggcccaucaccgacguguucuacaaggagaacuccuacaccaccacgaucaagcccgugaccuacaagcucgacggcgucgugugcaccgagaucgaccccaagcuggacaacuacuacaagaaggacaacagcuacuucaccgagcagccgaucgaccuggugcccaaccagcccuaccccaacgccuccuucgacaacuucaaguucgucugcgacaacaucaaguucgccgacgaccucaaccagcugacgggguacaagaagccggcgagccgcgagcugaaggugaccuucuuccccgaccucaacggcgacguggucgccaucgacuacaagcacuacacccccuccuucaagaagggcgccaagcugcugcacaagcccaucguguggcacgugaacaacgccaccaacaaggcgacguacaagccgaacaccuggugcauccggugccucuggagcaccaagcccgucgagaccuccaacagcuucgacgugcugaaguccgaggacgcccaggggauggacaaccuggccugcgaggaccucaagcccgugagcgaggaggucguggagaaccccacgauccagaaggacgugcuggagugcaacgucaagaccaccgagguggugggcgacaucauccugaagccggccaacaacucccucaagaucaccgaggaggucgggcacacggaccugauggccgcguacguggacaacagcucccugaccaucaagaagcccaacgagcucagccgcgugcugggccugaagacccucgccacccacgggcuggccgccgucaacuccgugcccugggacacgaucgccaacuacgcgaagccguuccugaacaagguggucagcaccaccaccaacaucgugacgcgcugccucaaccgggugugcaccaacuacaugcccuacuucuucacccugcugcuccagcugugcaccuucacccgcuccacgaacagccggaucaaggccuccaugcccaccaccaucgccaagaacaccgucaacagcgugggcaaguucugccuggaggccagcuucaacuaccucaagucccccaacuucagcaagcugaucaacaucaucaucugguuccugcuccuguccgugugccugggcagccucaucuacuccacggccgcgcuggggguccugaugagcaaccucggcaugccguccuacugcaccggguaccgcgagggcuaccugaacagcaccaacgugaccaucgccacguacugcaccggcuccauccccugcagcgugugccuguccgggcucgacagccuggacaccuaccccucccuggagaccauccagaucacgaucagcuccuucaagugggaccucaccgccuucggccuggucgccgagugguuccuggccuacauccucuucacccgguucuucuacgugcuggggcuggcggccaucaugcagcucuucuucagcuacuucgccgugcacuucaucuccaacagcuggcugauguggcugaucaucaaccugguccagauggcccccaucuccgcgauggugcgcauguacaucuucuucgccagcuucuacuacguguggaagagcuacguccacgugguggacggcugcaacuccagcaccugcaugaugugcuacaagcggaaccgcgccacgcgggucgagugcaccaccaucgugaacgggguccgccgguccuucuacguguacgccaacggcggcaagggguucugcaagcuccacaacuggaacugcgugaacugcgacaccuucugcgccggcagcacguucaucuccgacgaggucgcgcgcgaccugagccugcaguucaagcggccgaucaaccccaccgaccaguccagcuacaucguggacuccgugaccgucaagaacgggagcauccaccucuacuucgacaaggccggccagaagaccuacgagcgccacucccugagccacuucgugaaccuggacaaccuccgggccaacaacacgaaggggucccugcccaucaacgugaucgucuucgacggcaagagcaagugcgaggaguccagcgccaaguccgccagcguguacuacucccagcugaugugccagcccauccuccugcuggaccaggcgcucgugagcgacgucggcgacagcgccgagguggccgugaagauguucgacgccuacgucaacaccuucuccagcaccuucaacgugccgauggagaagcugaagacccugguggccacggcggaggccgagcucgccaagaacgucucccuggacaacgugcugagcaccuucaucuccgccgcgcgccagggguucguggacagcgacgucgagaccaaggacgugguggagugccucaagcugucccaccagagcgacaucgaggucaccggcgacuccugcaacaacuacaugcugacguacaacaagguggagaacaugaccccccgggaccucggggccugcaucgacugcagcgcccgccacaucaacgcccagguggccaagucccacaacaucgcgcugaucuggaacgucaaggacuucaugagccuguccgagcagcuccggaagcagauccgcagcgccgccaagaagaacaaccugcccuucaagcugaccugcgccaccacgcgccagguggugaacgucgugaccaccaagaucgcccucaagggcgggugaggacuagucccuguucccagagcccacuuuuuuuucuuuuuuugaaauaaaauagccugucuuucagaucucaaaggcucuuuucagagccaccaaaaaaaaaaaaaaaaaaaaaaaaaaaaaaaaaaaaaaaaaaaaaaaaaaaaaaaaaaaaaaaaaaaaaaaaaaaaaaaaaaaaaaaaaaaaaaaaaaaaa

SEQ ID NO: 19561 - RNA, 6113 nt, Artificial Sequence
  SARS-CoV-2__MT886363.1__non-structural protein 3 (NSP3) mRNA gc
aggagagucccgcagucggcguccagcggcucugcuuguucgugugugugucguugcaggccuuauucaagcuuaccauggcccccaccaaggugaccuucggcgacgacacggucaucgaggugcagggguacaagagcgugaacaucaccuucgagcuggacgagcgcaucgacaagguccucaacgagaagugcuccgccuacaccguggagcugggcaccgaggugaacgaguucgcgugcgucguggccgacgccgugaucaagacgcugcagccggucagcgagcuccugaccccccuggggaucgaccucgacgagugguccauggccaccuacuaccuguucgacgagagcggcgaguucaagcuggccucccacauguacugcagcuucuacccccccgacgaggacgaggaggagggggacugcgaggaggaggaguucgagccguccacccaguacgaguacggcacggaggacgacuaccagggcaagccccucgaguucggggcgaccagcgccgcccugcagcccgaggaggagcaggaggaggacuggcuggacgacgacucccagcagaccgugggccagcaggacgggagcgaggacaaccagaccacgaccauccagaccaucguggagguccagccccagcucgagauggagcugaccccgguggugcagacgaucgaggucaacuccuucagcggcuaccugaagcucaccgacaacguguacaucaagaacgccgacaucguggaggaggcgaagaaggucaagcccaccgugguggucaacgccgccaacguguaccugaagcacgggggcggcguggccggggcccugaacaaggcgaccaacaacgccaugcaggucgaguccgacgacuacaucgccacgaacggcccccucaagguggggggcagcugcguccuguccggccacaaccuggccaagcacugccuccacgugguggggcccaacgucaacaagggcgaggacauccagcugcugaagagcgccuacgagaacuucaaccagcacgaggugcuccuggcgccgcugcucuccgccgggaucuucggcgccgaccccauccacagccugcgggugugcgucgacaccgugcgcaccaacguguaccuggccgucuucgacaagaaccucuacgacaagcugguguccagcuuccuggagaugaagagcgagaagcagguggagcagaagaucgccgagauccccaaggaggaggucaagcccuucaucaccgaguccaagccgagcguggagcagcggaagcaggacgacaagaagaucaaggcgugcguggaggaggucacgaccacccucgaggagaccaaguuccugacggagaaccugcuccuguacaucgacaucaacgggaaccugcaccccgacuccgccacccucgugagcgacaucgacaucaccuuccugaagaaggacgcccccuacaucgugggcgacgucgugcaggagggcgugcugaccgccgucgugauccccacgaagaaggccgggggcaccaccgagaugcucgcgaaggcccugcgcaaggugccgaccgacaacuacaucacgaccuaccccgggcagggccugaacggguacaccgucgaggaggccaagaccgugcucaagaagugcaaguccgccuucuacauccugcccagcaucaucuccaacgagaagcaggagauccugggcaccgugagcuggaaccuccgggagaugcuggcgcacgccgaggagacgcgcaagcugaugcccgucugcguggagaccaaggccaucguguccaccauccagcggaaguacaagggcaucaagauccaggagggggucguggacuacggcgcccgcuucuacuucuacaccagcaagacgaccguggccucccugaucaacacccucaacgaccugaacgagacccuggucacgaugccgcucggguacgugacccacggccugaaccuggaggaggcggcccgguacaugcgcagccucaaggugcccgccaccgucuccgugagcucccccgacgccgugaccgccuacaacggguaccugacgagcuccagcaagacccccgaggagcacuucaucgagaccaucucccuggcgggcagcuacaaggacuggagcuacuccggccagagcacccagcucgggaucgaguuccugaagcggggcgacaaguccgucuacuacacgagcaacccgaccaccuuccaccuggacggggaggugaucaccuucgacaaccucaagacgcugcugucccuccgcgaggugcggaccaucaaggucuucaccaccguggacaacaucaaccugcacacgcagguggucgacaugagcaugaccuacggccagcaguucggccccaccuaccuggacggggccgacgugaccaagaucaagccccacaacucccacgagggcaagacguucuacgugcucccgaacgacgacacccugcgcgucgaggccuucgaguacuaccacaccaccgaccccagcuuccuggggcgguacauguccgcccucaaccacacgaagaaguggaaguacccccaggugaacggccugaccagcaucaagugggccgacaacaacugcuaccuggcgaccgcccuccugacccugcagcagaucgagcucaaguucaaccccccggcccugcaggacgccuacuaccgcgcgcgggccggggaggccgccaacuucugcgcccugauccucgcguacugcaacaagacggugggcgagcugggcgacguccgcgagaccauguccuaccuguuccagcacgccaaccucgacagcugcaagcgggugcugaacgucgugugcaagaccugcgggcagcagcagaccacccugaagggcguggaggccgucauguacauggggacgcucuccuacgagcaguucaagaagggcgugcagauccccugcaccugcgggaagcaggccaccaaguaccuggugcagcaggagagccccuucgucaugauguccgcccccccggcgcaguacgagcugaagcacggcaccuucacgugcgccagcgaguacaccggcaacuaccagugcgggcacuacaagcacaucaccuccaaggagacccucuacugcaucgacggcgcccugcugacgaagagcagcgaguacaaggggcccaucaccgacguguucuacaaggagaacuccuacaccaccacgaucaagcccgugaccuacaagcucgacggcgucgugugcaccgagaucgaccccaagcuggacaacuacuacaagaaggacaacagcuacuucaccgagcagccgaucgaccuggugcccaaccagcccuaccccaacgccuccuucgacaacuucaaguucgucugcgacaacaucaaguucgccgacgaccucaaccagcugacgggguacaagaagccggcgagccgcgagcugaaggugaccuucuuccccgaccucaacggcgacguggucgccaucgacuacaagcacuacacccccuccuucaagaagggcgccaagcugcugcacaagcccaucguguggcacgugaacaacgccaccaacaaggcgacguacaagccgaacaccuggugcauccggugccucuggagcaccaagcccgucgagaccuccaacagcuucgacgugcugaaguccgaggacgcccaggggauggacaaccuggccugcgaggaccucaagcccgugagcgaggaggucguggagaaccccacgauccagaaggacgugcuggagugcaacgucaagaccaccgagguggugggcgacaucauccugaagccggccaacaacucccucaagaucaccgaggaggucgggcacacggaccugauggccguguacguggacaacagcucccugaccaucaagaagcccaacgagcucagccgcguccugggccugaagacccucgcgacccacgggcuggccgccgugaacuccgugcccugggacacgaucgccaacuacgccaagccguuccugaacaaggucgugagcaccaccaccaacaucgugacgcgcugccucaaccgggucugcaccaacuacaugcccuacuucuucacccugcugcuccagcugugcaccuucacccgcuccacgaacagccggaucaaggcguccaugcccaccaccaucgccaagaacaccgugaagagcgugggcaaguucugccuggaggccagcuucaacuaccucaagucccccaacuucagcaagcugaucaacaucaucaucugguuccugcuccuguccgucugccugggcagccucaucuacuccacggccgcccugggggugcugaugagcaaccucggcaugccguccuacugcaccggguaccgcgagggcuaccugaacagcaccaacgugaccaucgcgacguacugcaccggcuccauccccugcagcgucugccuguccgggcucgacagccuggacaccuaccccucccuggagaccauccagaucacgaucagcuccuucaagugggaccucaccgccuucggccugguggccgagugguuccuggccuacauccucuucacccgguucuucuacgugcuggggcuggccgcgaucaugcagcucuucuucagcuacuucgccguccacuucaucuccaacagcuggcugauguggcugaucaucaaccuggugcagauggcccccaucuccgccauggugcgcauguacaucuucuucgcgagcuucuacuacgucuggaagagcuacgugcacguggucgacggcugcaacuccagcaccugcaugaugugcuacaagcggaaccgcgccacgcggguggagugcaccaccaucgucaacggggugcgccgguccuucuacguguacgccaacggcggcaagggguucugcaagcuccacaacuggaacugcgucaacugcgacaccuucugcgccggcagcacguucaucuccgacgagguggcccgcgaccugagccugcaguucaagcggccgaucaaccccaccgaccaguccagcuacaucguggacuccgucaccgugaagaacgggagcauccaccucuacuucgacaaggcgggccagaagaccuacgagcgccacucccugagccacuucgugaaccuggacaaccuccgggccaacaacacgaaggggucccugcccaucaacgucaucguguucgacggcaagagcaagugcgaggaguccagcgccaaguccgccagcguguacuacucccagcugaugugccagcccauccuccugcuggaccaggcccucgucagcgacgugggcgacagcgcggagguggccgucaagauguucgacgccuacgugaacaccuucuccagcaccuucaacgugccgauggagaagcugaagacccuggucgccacggccgaggcggagcucgccaagaacgugucccuggacaacgugcugagcaccuucaucuccgccgcccgccagggguucgucgacagcgacguggagaccaaggacguggucgagugccucaagcugucccaccagagcgacaucgaggugaccggcgacuccugcaacaacuacaugcugacguacaacaagguggagaacaugaccccccgggaccucggggcgugcaucgacugcagcgcccgccacaucaacgcccaggucgccaagucccacaacaucgcccugaucuggaacgugaaggacuucaugagccuguccgagcagcuccggaagcagauccgcagcgcggccaagaagaacaaccugcccuucaagcugaccugcgccaccacgcgccagguggucaacguggugaccaccaagaucgcccucaagggcgggugaggacuagucccuguucccagagcccacuuuuuuuucuuuuuuugaaauaaaauagccugucuuucagaucucaaaggcucuuuucagagccaccaaaaaaaaaaaaaaaaaaaaaaaaaaaaaaaaaaaaaaaaaaaaaaaaaaaaaaaaaaaaaaaaaaaaaaaaaaaaaaaaaaaaaaaaaaaaaaaaaaaaa

SEQ ID NO: 19562 - RNA, 6113 nt, Artificial Sequence
  SARS-CoV-2__MT886381.1__non-structural protein 3 (NSP3) mRNA gc
aggagagucccgcagucggcguccagcggcucugcuuguucgugugugugucguugcaggccuuauucaagcuuaccauggcccccaccaaggugaccuucggcgacgacacggucaucgaggugcagggguacaagagcgugaacaucaccuucgagcuggacgagcgcaucgacaagguccucaacgagaagugcuccgccuacaccguggagcugggcaccgaggugaacgaguucgcgugcgucguggccgacgccgugaucaagacgcugcagccggucagcgagcuccugaccccccuggggaucgaccucgacgagugguccauggccaccuacuaccuguucgacgagagcggcgaguucaagcuggccucccacauguacugcagcuucuacccccccgacgaggacgaggaggagggggacugcgaggaggaggaguucgagccguccacccaguacgaguacggcacggaggacgacuaccagggcaagccccucgaguucggggcgaccagcgccgcccugcagcccgaggaggagcaggaggaggacuggcuggacgacgacucccagcagaccgugggccagcaggacgggagcgaggacaaccagaccacgaccauccagaccaucguggagguccagccccagcucgagauggagcugaccuccguggugcagacgaucgaggucaacagcuucuccggcuaccugaagcucaccgacaacguguacaucaagaacgccgacaucguggaggaggcgaagaaggucaagccgaccgugguggucaacgccgccaacguguaccugaagcacgggggcggcguggccggggcccugaacaaggcgaccaacaacgccaugcaggucgagagcgacgacuacaucgccacgaacggcccccucaagguggggggcuccugcguccugagcggccacaaccuggccaagcacugccuccacgugguggggcccaacgucaacaagggcgaggacauccagcugcugaaguccgccuacgagaacuucaaccagcacgaggugcuccuggcgccccugcucagcgccgggaucuucggcgccgacccgauccacucccugcgggugugcgucgacaccgugcgcaccaacguguaccuggccgucuucgacaagaaccucuacgacaagcuggugagcagcuuccuggagaugaaguccgagaagcagguggagcagaagaucgccgagauccccaaggaggaggucaagcccuucaucaccgagagcaagcccuccguggagcagcggaagcaggacgacaagaagaucaaggcgugcguggaggaggucacgaccacccucgaggagaccaaguuccugacggagaaccugcuccuguacaucgacaucaacgggaaccugcacccggacagcgccacccucguguccgacaucgacaucaccuuccugaagaaggacgcccccuacaucgugggcgacgucgugcaggagggcgugcugaccgccgucgugauccccacgaagaaggccgggggcaccaccgagaugcucgcgaaggcccugcgcaaggugcccaccgacaacuacaucacgaccuacccggggcagggccugaacggguacaccgucgaggaggccaagaccgugcucaagaagugcaagagcgccuucuacauccugcccuccaucaucagcaacgagaagcaggagauccugggcaccguguccuggaaccuccgggagaugcuggcgcacgccgaggagacgcgcaagcugaugcccgucugcguggagaccaaggccaucgugagcaccauccagcggaaguacaagggcaucaagauccaggagggggucguggacuacggcgcccgcuucuacuucuacaccuccaagacgaccguggccagccugaucaacacccucaacgaccugaacgagacccuggucacgaugccccucggguacgugacccacggccugaaccuggaggaggcggcccgguacaugcgcucccucaaggugccggccaccgucagcguguccagccccgacgccgugaccgccuacaacggguaccugacguccagcuccaagacccccgaggagcacuucaucgagaccaucagccuggcgggcagcuacaaggacugguccuacagcggccaguccacccagcucgggaucgaguuccugaagcggggcgacaagagcgucuacuacacguccaaccccaccaccuuccaccuggacggggaggugaucaccuucgacaaccucaagacgcugcugagccuccgcgaggugcggaccaucaaggucuucaccaccguggacaacaucaaccugcacacgcagguggucgacauguccaugaccuacggccagcaguucggcccgaccuaccuggacggggccgacgugaccaagaucaagccccacaacagccacgagggcaagacguucuacgugcuccccaacgacgacacccugcgcgucgaggccuucgaguacuaccacaccaccgacccguccuuccuggggcgguacaugagcgcccucaaccacacgaagaaguggaaguacccccaggugaacggccugaccuccaucaagugggccgacaacaacugcuaccuggcgaccgcccuccugacccugcagcagaucgagcucaaguucaacccccccgcccugcaggacgccuacuaccgcgcgcgggccggggaggccgccaacuucugcgcccugauccucgcguacugcaacaagacggugggcgagcugggcgacguccgcgagaccaugagcuaccuguuccagcacgccaaccucgacuccugcaagcgggugcugaacgucgugugcaagaccugcgggcagcagcagaccacccugaagggcguggaggccgucauguacauggggacgcucagcuacgagcaguucaagaagggcgugcagaucccgugcaccugcgggaagcaggccaccaaguaccuggugcagcaggagucccccuucgucaugaugagcgccccccccgcgcaguacgagcugaagcacggcaccuucacgugcgccuccgaguacaccggcaacuaccagugcgggcacuacaagcacaucaccagcaaggagacccucuacugcaucgacggcgcccugcugacgaagagcuccgaguacaaggggccgaucaccgacguguucuacaaggagaacagcuacaccaccacgaucaagcccgugaccuacaagcucgacggcgucgugugcaccgagaucgaccccaagcuggacaacuacuacaagaaggacaacuccuacuucaccgagcagcccaucgaccuggugccgaaccagcccuaccccaacgccagcuucgacaacuucaaguucgucugcgacaacaucaaguucgccgacgaccucaaccagcugacgggguacaagaagcccgcgucccgcgagcugaaggugaccuucuucccggaccucaacggcgacguggucgccaucgacuacaagcacuacacccccagcuucaagaagggcgccaagcugcugcacaagcccaucguguggcacgugaacaacgccaccaacaaggcgacguacaagcccaacaccuggugcauccggugccucugguccaccaagccggucgagaccagcaacuccuucgacgugcugaagagcgaggacgcccaggggauggacaaccuggccugcgaggaccucaagcccguguccgaggaggucguggagaaccccacgauccagaaggacgugcuggagugcaacgucaagaccaccgagguggugggcgacaucauccugaagcccgccaacaacagccucaagaucaccgaggaggucgggcacacggaccugauggccgcguacguggacaacuccagccugaccaucaagaagccgaacgagcucucccgcgugcugggccugaagacccucgccacccacgggcuggccgccgucaacagcgugcccugggacacgaucgccaacuacgcgaagcccuuccugaacaagguggucuccaccaccaccaacaucgugacgcgcugccucaaccgggugugcaccaacuacaugccguacuucuucacccugcugcuccagcugugcaccuucacccgcagcacgaacucccggaucaaggccagcaugcccaccaccaucgccaagaacaccgucaagagcgugggcaaguucugccuggaggccuccuucaacuaccucaagagccccaacuucuccaagcugaucaacaucaucaucugguuccugcuccugagcgugugccugggcucccucaucuacagcacggccgcgcuggggguccugauguccaaccucggcaugcccagcuacugcaccggguaccgcgagggcuaccugaacuccaccaacgugaccaucgccacguacugcaccggcagcaucccgugcuccgugugccugagcgggcucgacucccuggacaccuaccccagccuggagaccauccagaucacgaucuccagcuucaagugggaccucaccgccuucggccuggucgccgagugguuccuggccuacauccucuucacccgguucuucuacgugcuggggcuggcggccaucaugcagcucuucuucuccuacuucgccgugcacuucaucagcaacuccuggcugauguggcugaucaucaaccugguccagauggcccccaucagcgcgauggugcgcauguacaucuucuucgccagcuucuacuacguguggaaguccuacguccacgugguggacggcugcaacagcuccaccugcaugaugugcuacaagcggaaccgcgccacgcgggucgagugcaccaccaucgugaacgggguccgccggagcuucuacguguacgccaacggcggcaagggguucugcaagcuccacaacuggaacugcgugaacugcgacaccuucugcgccggcuccacguucaucagcgacgaggucgcgcgcgaccugucccugcaguucaagcggcccaucaacccgaccgaccagagcuccuacaucguggacagcgugaccgucaagaacggguccauccaccucuacuucgacaaggccggccagaagaccuacgagcgccacagccugucccacuucgugaaccuggacaaccuccgggccaacaacacgaaggggagccugcccaucaacgugaucgucuucgacggcaaguccaagugcgaggagagcuccgccaagagcgccuccguguacuacagccagcugaugugccagcccauccuccugcuggaccaggcgcucgugagcgacgucggcgacuccgccgagguggccgugaagauguucgacgccuacgucaacaccuucagcuccaccuucaacgugcccauggagaagcugaagacccugguggccacggcggaggccgagcucgccaagaacgucagccuggacaacgugcuguccaccuucaucagcgccgcgcgccagggguucguggacuccgacgucgagaccaaggacgugguggagugccucaagcugagccaccaguccgacaucgaggucaccggcgacagcugcaacaacuacaugcugacguacaacaagguggagaacaugaccccgcgggaccucggggccugcaucgacugcuccgcccgccacaucaacgcccagguggccaagagccacaacaucgcgcugaucuggaacgucaaggacuucaugucccugagcgagcagcuccggaagcagauccgcuccgccgccaagaagaacaaccugcccuucaagcugaccugcgccaccacgcgccagguggugaacgucgugaccaccaagaucgcccucaagggcgggugaggacuagucccuguucccagagcccacuuuuuuuucuuuuuuugaaauaaaauagccugucuuucagaucucaaaggcucuuuucagagccaccaaaaaaaaaaaaaaaaaaaaaaaaaaaaaaaaaaaaaaaaaaaaaaaaaaaaaaaaaaaaaaaaaaaaaaaaaaaaaaaaaaaaaaaaaaaaaaaaaaaaa

SEQ ID NO: 19563 - RNA, 6113 nt, Artificial Sequence
  SARS-CoV-2__MT879619.1__non-structural protein 3 (NSP3) mRNA gc
aggagagucccgcagucggcguccagcggcucugcuuguucgugugugugucguugcaggccuuauucaagcuuaccauggcccccaccaaggugaccuucggcgacgacacggucaucgaggugcagggguacaagagcgugaacaucaccuucgagcuggacgagcgcaucgacaagguccucaacgagaagugcuccgccuacaccguggagcugggcaccgaggugaacgaguucgcgugcgucguggccgacgccgugaucaagacgcugcagccggucagcgagcuccugaccccccuggggaucgaccucgacgagugguccauggccaccuacuaccuguucgacgagagcggcgaguucaagcuggccucccacauguacugcagcuucuacccccccgacgaggacgaggaggagggggacugcgaggaggaggaguucgagccguccacccaguacgaguacggcacggaggacgacuaccagggcaagccccucgaguucggggcgaccagcgccgcccugcagcccgaggaggagcaggaggaggacuggcuggacgacgacucccagcagaccgugggccagcaggacgggagcgaggacaaccagaccacgaccauccagaccaucguggagguccagccccagcucgagauggagcugaccccgguggugcagacgaucgaggucaacuccuucagcggcuaccugaagcucaccgacaacguguacaucaagaacgccgacaucguggaggaggcgaagaaggucaagcccaccgugguggucaacgccgccaacguguaccugaagcacgggggcggcguggccggggcccugaacaaggcgaccaacaacgccaugcaggucgaguccgacgacuacaucgccacgaacggcccccucaagguggggggcagcugcguccuguccggccacaaccuggccaagcacugccuccacgugguggggcccaacgucaacaagggcgaggacauccagcugcugaagagcgccuacgagaacuucaaccagcacgaggugcuccuggcgccgcugcucuccgccgggaucuucggcgccgaccccauccacagccugcgggugugcgucgacaccgugcgcaccaacguguaccuggccgucuucgacaagaaccucuacgacaagcugguguccagcuuccuggagaugaagagcgagaagcagguggagcagaagaucgccgagauccccaaggaggaggucaagcccuucaucaccgaguccaagccgagcguggagcagcggaagcaggacgacaagaagaucaaggcgugcguggaggaggucacgaccacccucgaggagaccaaguuccugacggagaaccugcuccuguacaucgacaucaacgggaaccugcaccccgacuccgccacccucgugagcgacaucgacaucaccuuccugaagaaggacgcccccuacaucgugggcgacgucgugcaggagggcgugcugaccgccgucgugauccccacgaagaaggccgggggcaccaccgagaugcucgcgaaggcccugcgcaaggugccgaccgacaacuacaucacgaccuaccccgggcagggccugaacggguacaccgucgaggaggccaagaccgugcucaagaagugcaaguccgccuucuacauccugcccagcaucaucuccaacgagaagcaggagauccugggcaccgugagcuggaaccuccgggagaugcuggcgcacgccgaggagacgcgcaagcugaugcccgucugcguggagaccaaggccaucguguccaccauccagcggaaguacaagggcaucaagauccaggagggggucguggacuacggcgcccgcuucuacuucuacaccagcaagacgaccguggccucccugaucaacacccucaacgaccugaacgagacccuggucacgaugccgcucggguacgugacccacggccugaaccuggaggaggcggcccgguacaugcgcagccucaaggugcccgccaccgucuccgugagcucccccgacgccgugaccgccuacaacggguaccugacgagcuccagcaagacccccgaggagcacuucaucgagaccaucucccuggcgggcagcuacaaggacuggagcuacuccggccagagcacccagcucgggaucgaguuccugaagcggggcgacaaguccgucuacuacacgagcaacccgaccaccuuccaccuggacggggaggugaucaccuucgacaaccucaagacgcugcugucccuccgcgaggugcggaccaucaaggucuucaccaccguggacaacaucaaccugcacacgcagguggucgacaugagcaugaccuacggccagcaguucggccccaccuaccuggacggggccgacgugaccaagaucaagccccacaacucccacgagggcaagacguucuacgugcucccgaacgacgacacccugcgcgucgaggccuucgaguacuaccacaccaccgaccccagcuuccuggggcgguacauguccgcccucaaccacacgaagaaguggaaguacccccaggugaacggccugaccagcaucaagugggccgacaacaacugcuaccuggcgaccgcccuccugacccugcagcagaucgagcucaaguucaaccccccggcccugcaggacgccuacuaccgcgcgcgggccggggaggccgccaacuucugcgcccugauccucgcguacugcaacaagacggugggcgagcugggcgacguccgcgagaccauguccuaccuguuccagcacgccaaccucgacagcugcaagcgggugcugaacgucgugugcaagaccugcgggcagcagcagaccacccugaagggcguggaggccgucauguacauggggacgcucuccuacgagcaguucaagaagggcgugcagauccccugcaccugcgggaagcaggccaccaaguaccuggugcagcaggagagccccuucgucaugauguccgcccccccggcgcaguacgagcugaagcacggcaccuucacgugcgccagcgaguacaccggcaacuaccagugcgggcacuacaagcacaucaccuccaaggagacccucuacugcaucgacggcgcccugcugacgaagagcagcgaguacaaggggcccaucaccgacguguucuacaaggagaacuccuacaccaccacgaucaagcccgugaccuacaagcucgacggcgucgugugcaccgagaucgaccccaagcuggacaacuacuacaagaaggacaacagcuacuucaccgagcagccgaucgaccuggugcccaaccagcccuaccccaacgccuccuucgacaacuucaaguucgucugcgacaacaucaaguucgccgacgaccucaaccagcugacgggguacaagaagccggcgagccgcgagcugaaggugaccuucuuccccgaccucaacggcgacguggucgccaucgacuacaagcacuacacccccuccuucaagaagggcgccaagcugcugcacaagcccaucguguggcacgugaacaacgccaccaacaaggcgacguacaagccgaacaccuggugcauccggugccucuggagcaccaagcccgucgagaccuccaacagcuucgacgugcugaaguccgaggacgcccaggggauggacaaccuggccugcgaggaccucaagcccgugagcgaggaggucguggagaaccccacgauccagaaggacgugcuggagugcaacgucaagaccaccgagguggugggcgacaucauccugaagccggccaacaacucccucaagaucaccgaggaggucgggcacacggaccugauggccgcguacguggacaacagcucccugaccaucaagaagcccaacgagcucagccgcgugcugggccugaagacccucgccacccacgggcuggccgccgucaacuccgugcccugggacacgaucgccaacuacgcgaagccguuccugaacaagguggucagcaccaccaccaacaucgugacgcgcugccucaaccgggugugcaccaacuacaugcccuacuucuucacccugcugcuccagcugugcaccuucacccgcuccacgaacagccggaucaaggccuccaugcccaccaccaucgccaagaacaccgucaagagcgugggcaaguucugccuggaggccagcuucaacuaccucaagucccccaacuucagcaagcugaucaacaucaucaucugguuccugcuccuguccgugugccugggcagccucaucuacuccacggccgcgcuggggguccugaugagcaaccucggcaugccguccuacugcaccggguaccgcgagggcuaccugaacagcaccaacgugaccaucgccacguacugcaccggcuccauccccugcagcgugugccuguccgggcucgacagccuggacaccuaccccucccuggagaccauccagaucacgaucagcuccuucaagugggaccucaccgccuucggccuggucgccgagugguuccuggccuacauccucuucacccgguucuucuacgugcuggggcuggcggccaucaugcagcucuucuucagcuacuucgccgugcacuucaucuccaacagcuggcugauguggcugaucaucaaccugguccagauggcccccaucuccgcgauggugcgcauguacaucuucuucgccagcuucuacuacguguggaagagcuacguccacgugguggacggcugcaacuccagcaccugcaugaugugcuacaagcggaaccgcgccacgcgggucgagugcaccaccaucgugaacgggguccgccgguccuucuacguguacgccaacggcggcaagggguucugcaagcuccacaacuggaacugcgugaacugcgacaccuucugcgccggcagcacguucaucuccgacgaggucgcgcgcgaccugagccugcaguucaagcggccgaucaaccccaccgaccaguccagcuacaucguggacuccgugaccgucaagaacgggagcauccaccucuacuucgacaaggccggccagaagaccuacgagcgccacucccugagccacuucgugaaccuggacaaccuccgggccaacaacacgaaggggucccugcccaucaacgugaucgucuucgacggcaagagcaagugcgaggaguccagcgccaaguccgccagcguguacuacucccagcugaugugccagcccauccuccugcuggaccaggcgcucgugagcgacgucggcgacagcgccgagguggccgugaagauguucgacgccuacgucaacaccuucuccagcaccuucaacgugccgauggagaagcugaagacccugguggccacggcggaggccgagcucgccaagaacgucucccuggacaacgugcugagcaccuucaucuccgccgcgcgccagggguucguggacagcgacgucgagaccaaggacgugguggagugccucaagcugucccaccagagcgacaucgaggucaccggcgacuccugcaacaacuacaugcugacguacaacaagguggagaacaugaccccccgggaccucggggccugcaucgacugcagcgcccgccacaucaacgcccacguggccaagucccacaacaucgcgcugaucuggaacgucaaggacuucaugagccuguccgagcagcuccggaagcagauccgcagcgccgccaagaagaacaaccugcccuucaagcugaccugcgccaccacgcgccagguggugaacgucgugaccaccaagaucgcccucaagggcgggugaggacuagucccuguucccagagcccacuuuuuuuucuuuuuuugaaauaaaauagccugucuuucagaucucaaaggcucuuuucagagccaccaaaaaaaaaaaaaaaaaaaaaaaaaaaaaaaaaaaaaaaaaaaaaaaaaaaaaaaaaaaaaaaaaaaaaaaaaaaaaaaaaaaaaaaaaaaaaaaaaaaaa

SEQ ID NO: 19564 - RNA, 6113 nt, Artificial Sequence
  SARS-CoV-2__MT880873.1__non-structural protein 3 (NSP3) mRNA gc
aggagagucccgcagucggcguccagcggcucugcuuguucgugugugugucguugcaggccuuauucaagcuuaccauggcccccaccaaggugaccuucggcgacgacacggucaucgaggugcagggguacaagagcgugaacaucaccuucgagcuggacgagcgcaucgacaagguccucaacgagaagugcuccgccuacaccguggagcugggcaccgaggugaacgaguucgcgugcgucguggccgacgccgugaucaagacgcugcagccggucagcgagcuccugaccccccuggggaucgaccucgacgagugguccauggccaccuacuaccuguucgacgagagcggcgaguucaagcuggccucccacauguacugcagcuucuacccccccgacgaggacgaggaggagggggacugcgaggaggaggaguucgagccguccacccaguacgaguacggcacggaggacgacuaccagggcaagccccucgaguucggggcgaccagcgccgcccugcagcccgaggaggagcaggaggaggacuggcuggacgacgacucccagcagaccgugggccagcaggacgggagcgaggacaaccagaccacgaccauccagaccaucguggagguccagccccagcucgagauggagcugaccccgguggugcagacgaucgaggucaacuccuucagcggcuaccugaagcucaccgacaacguguacaucaagaacgccgacaucguggaggaggcgaagaaggucaagcccaccgugguggucaacgccgccaacguguaccugaagcacgggggcggcguggccggggcccugaacaaggcgaccaacaacgccaugcaggucgaguccgacgacuacaucgccacgaacggcccccucaagguggggggcagcugcguccuguccggccacaaccuggccaagcacugccuccacgugguggggcccaacgucaacaagggcgaggacauccagcugcugaagagcgccuacgagaacuucaaccagcacgaggugcuccuggcgccgcugcucuccgccgggaucuucggcgccgaccccauccacagccugcgggugugcgucgacaccgugcgcaccaacguguaccuggccgucuucgacaagaaccucuacgacaagcugguguccagcuuccuggagaugaagagcgagaagcagguggagcagaagaucgccgagauccccaaggaggaggucaagcccuucaucaccgaguccaagccgagcguggagcagcggaagcaggacgacaagaagaucaaggcgugcguggaggaggucacgaccacccucgaggagaccaaguuccugacggagaaccugcuccuguacaucgacaucaacgggaaccugcaccccgacuccgccacccucgugagcgacaucgacaucaccuuccugaagaaggacgcccccuacaucgugggcgacgucgugcaggagggcgugcugaccgccgucgugauccccacgaagaaggccgggggcaccaccgagaugcucgcgaaggcccugcgcaaggugccgaccgacaacuacaucacgaccuaccccgggcagggccugaacggguacaccgucgaggaggccaagaccgugcucaagaagugcaaguccgccuucuacauccugcccagcaucaucuccaacgagaagcaggagauccugggcaccgugagcuggaaccuccgggagaugcuggcgcacgccgaggagacgcgcaagcugaugcccgucugcguggagaccaaggccaucguguccaccauccagcggaaguacaagggcaucaagauccaggagggggucguggacuacggcgcccgcuucuacuucuacaccagcaagacgaccguggccucccugaucaacacccucaacgaccugaacgagacccuggucacgaugccgcucggguacgugacccacggccugaaccuggaggaggcggcccgguacaugcgcagccucaaggugcccgccaccgucuccgugagcucccccgacgccgugaccgccuacaacggguaccugacgagcuccagcaagacccccgaggagcacuucaucgagaccaucucccuggcgggcagcuacaaggacuggagcuacuccggccagagcacccagcucgggaucgaguuccugaagcggggcgacaaguccgucuacuacacgagcaacccgaccaccuuccaccuggacggggaggugaucaccuucgacaaccucaagacgcugcugucccuccgcgaggugcggaccaucaaggucuucaccaccguggacaacaucaaccugcacacgcagguggucgacaugagcaugaccuacggccagcaguucggccccaccuaccuggacggggccgacgugaccaagaucaagccccacaacucccacgagggcaagacguucuacgugcucccgaacgacgacacccugcgcgucgaggccuucgaguacuaccacaccaccgaccccagcuuccuggggcgguacauguccgcccucaaccacacgaagaaguggaaguacccccaggugaacggccugaccagcaucaagugggccgacaacaacugcuaccuggcgaccgcccuccugacccugcagcagaucgagcucaaguucaaccccccggcccugcaggacgccuacuaccgcgcgcgggccggggaggccgccaacuucugcgcccugauccucgcguacugcaacaagacggugggcgagcugggcgacguccgcgagaccauguccuaccuguuccagcacgccaaccucgacagcugcaagcgggugcugaacgucgugugcaagaccugcgggcagcagcagaccacccugaagggcguggaggccgucauguacauggggacgcucuccuacgagcaguucaagaagggcgugcagauccccugcaccugcgggaagcaggccaccaaguaccuggugcagcaggagagccccuucgucaugauguccgcccccccggcgcaguacgagcugaagcacggcaccuucacgugcgccagcgaguacaccggcaacuaccagugcgggcacuacaagcacaucaccuccaaggagacccucuacugcaucgacggcgcccugcugacgaagagcagcgaguacaaggggcccaucaccgacguguucuacaaggagaacuccuacaccaccacgaucaagcccgugaccuacaagcucgacggcgucgugugcaccgagaucgaccccaagcuggacaacuacuacaagaaggacaacagcuacuucaccgagcagccgaucgaccuggugcccaaccagcccuaccccaacgccuccuucgacaacuucaaguucgucugcgacaacaucaaguucgccgacgaccucaaccagcugacgggguacaagaagccggcgagccgcgagcugaaggugaccuucuuccccgaccucaacggcgacguggucgccaucgacuacaagcacuacacccccuccuucaagaagggcgccaagcugcugcacaagcccaucguguggcacgugaacaacgccaccaacaaggcgacguacaagccgaacaccuggugcauccggugccucuggagcaccaagcccgucgagaccuccaacagcuucgacgugcugaaguccgaggacgcccaggggauggacaaccuggccugcgaggaccucaagcccgugagcgaggaggucguggagaaccccacgauccagaaggacgugcuggagugcaacgucaagaccaccgagguggugggcgacaucauccugaagccggccaacaacucccucaagaucaccgaggaggucgggcacacggaccugauggccgcguacguggacaacagcucccugaccaucaagaagcccaacgagcucagccgcgugcugggccugaagacccucgccacccacgggcuggccgccgucaacuccgugcccugggacacgaucgccaacuacgcgaagccguuccugaacaagguggucagcaccaccaccaacaucgugacgcgcugccucaaccgggugugcaccaacuacaugcccuacuucuucacccugcugcuccagcugugcaccuucacccgcuccacgaacagccggaucaaggccuccaugcccaccaccaucgccaagaacaccgucaagagcgugggcaaguucugccuggaggccagcuucaacuaccucaagucccccaacuucagcaagcugaucaacaucaucaucugguuccugcuccuguccgugugccugggcagccucaucuacuccacggccgcgcuggggguccugaugagcaaccucggcaugccguccuacugcaccggguaccgcgagggcuaccugaacagcaccaacgugaccaucgccacguacugcaccggcuccauccccugcagcgugugccuguccgggcucgacagccuggacaccuaccccucccuggagaccauccagaucacgaucagcuccuucaagugggaccucaccgccuucggccuggucgccgagugguuccuggccuacauccucuucacccgguucuucuacgugcuggggcuggcggccaucaugcagcucuucuucagcuacuucgccgugcacuucaucuccaacagcuggcugauguggcugaucaucaaccugguccagauggcccccaucuccgcgauggugcgcauguacaucuucuucgccagcuucuacuacguguggaagagcuacguccacgugguggacggcugcaacuccagcaccugcaugaugugcuacaagcggaaccgcgccacgcgggucgagugcaccaccaucgugaacgggguccgccgguccuucuacguguacgccaacggcggcaagggguucugcaagcuccacaacuggaacugcgugaacugcgacaccuucugcgccggcagcacguucaucuccgacgaggucgcgcgcgaccugagccugcaguucaagcggccgaucaaccccaccgaccaguccagcuacaucguggacuccgugaccgucaagaacgggagcauccaccucuacuucgacaaggccggccagaagaccuacgagcgccacucccugagccacuucgugaaccuggacaaccuccgggccaacaacacgaaggggucccugcccaucaacgugaucgucuucgacggcaagagcaagugcgaggaguccagcgcccgcuccgccagcguguacuacucccagcugaugugccagcccauccuccugcuggaccaggcgcucgugagcgacgucggcgacagcgccgagguggccgugaagauguucgacgccuacgucaacaccuucuccagcaccuucaacgugccgauggagaagcugaagacccugguggccacggcggaggccgagcucgccaagaacgucucccuggacaacgugcugagcaccuucaucuccgccgcgcggcagggguucguggacagcgacgucgagaccaaggacgugguggagugccucaagcugucccaccagagcgacaucgaggucaccggcgacuccugcaacaacuacaugcugacguacaacaagguggagaacaugaccccccgcgaccucggggccugcaucgacugcagcgcccggcacaucaacgcccagguggccaagucccacaacaucgcgcugaucuggaacgucaaggacuucaugagccuguccgagcagcuccgcaagcagauccgcagcgccgccaagaagaacaaccugcccuucaagcugaccugcgccaccacgcggcagguggugaacgucgugaccaccaagaucgcccucaagggcgggugaggacuagucccuguucccagagcccacuuuuuuuucuuuuuuugaaauaaaauagccugucuuucagaucucaaaggcucuuuucagagccaccaaaaaaaaaaaaaaaaaaaaaaaaaaaaaaaaaaaaaaaaaaaaaaaaaaaaaaaaaaaaaaaaaaaaaaaaaaaaaaaaaaaaaaaaaaaaaaaaaaaaa

SEQ ID NO: 19565 - RNA, 6113 nt, Artificial Sequence
  SARS-CoV-2__MT880876.1__non-structural protein 3 (NSP3) mRNA gc
aggagagucccgcagucggcguccagcggcucugcuuguucgugugugugucguugcaggccuuauucaagcuuaccauggcccccaccaaggugaccuucggcgacgacacggucaucgaggugcagggguacaagagcgugaacaucaccuucgagcuggacgagcgcaucgacaagguccucaacgagaagugcuccgccuacaccguggagcugggcaccgaggugaacgaguucgcgugcgucguggccgacgccgugaucaagacgcugcagccggucagcgagcuccugaccccccuggggaucgaccucgacgagugguccauggccaccuacuaccuguucgacgagagcggcgaguucaagcuggccucccacauguacugcagcuucuacccccccgacgaggacgaggaggagggggacugcgaggaggaggaguucgagccguccacccaguacgaguacggcacggaggacgacuaccagggcaagccccucgaguucggggcgaccagcgccgcccugcagcccgaggaggagcaggaggaggacuggcuggacgacgacucccagcagaccgugggccagcaggacgggagcgaggacaaccagaccacgaccauccagaccaucguggagguccagccccagcucgagauggagcugaccccgguggugcagacgaucgaggucaacuccuucagcggcuaccugaagcucaccgacaacguguacaucaagaacgccgacaucguggaggaggcgaagaaggucaagcccaccgugguggucaacgccgccaacguguaccugaagcacgggggcggcguggccggggcccugaacaaggcgaccaacaacgccaugcaggucgaguccgacgacuacaucgccacgaacggcccccucaagguggggggcagcugcguccuguccggccacaaccuggccaagcacugccuccacgugguggggcccaacgucaacaagggcgaggacauccagcugcugaacagcgccuacgagaacuucaaccagcacgaggugcuccuggcgccgcugcucuccgccgggaucuucggcgccgaccccauccacagccugcgggugugcgucgacaccgugcgcaccaacguguaccuggccgucuucgacaagaaccucuacgacaagcugguguccagcuuccuggagaugaagagcgagaagcagguggagcagaagaucgccgagauccccaaggaggaggucaagcccuucaucaccgaguccaagccgagcguggagcagcggaagcaggacgacaagaagaucaaggcgugcguggaggaggucacgaccacccucgaggagaccaaguuccugacggagaaccugcuccuguacaucgacaucaacgggaaccugcaccccgacuccgccacccucgugagcgacaucgacaucaccuuccugaagaaggacgcccccuacaucgugggcgacgucgugcaggagggcgugcugaccgccgucgugauccccacgaagaaggccgggggcaccaccgagaugcucgcgaaggcccugcgcaaggugccgaccgacaacuacaucacgaccuaccccgggcagggccugaacggguacaccgucgaggaggccaagaccgugcucaagaagugcaaguccgccuucuacauccugcccagcaucaucuccaacgagaagcaggagauccugggcaccgugagcuggaaccuccgggagaugcuggcgcacgccgaggagacgcgcaagcugaugcccgucugcguggagaccaaggccaucguguccaccauccagcggaaguacaagggcaucaagauccaggagggggucguggacuacggcgcccgcuucuacuucuacaccagcaagacgaccguggccucccugaucaacacccucaacgaccugaacgagacccuggucacgaugccgcucggguacgugacccacggccugaaccuggaggaggcggcccgguacaugcgcagccucaaggugcccgccaccgucuccgugagcucccccgacgccgugaccgccuacaacggguaccugacgagcuccagcaagacccccgaggagcacuucaucgagaccaucucccuggcgggcagcuacaaggacuggagcuacuccggccagagcacccagcucgggaucgaguuccugaagcggggcgacaaguccgucuacuacacgagcaacccgaccaccuuccaccuggacggggaggugaucaccuucgacaaccucaagacgcugcugucccuccgcgaggugcggaccaucaaggucuucaccaccguggacaacaucaaccugcacacgcagguggucgacaugagcaugaccuacggccagcaguucggccccaccuaccuggacggggccgacgugaccaagaucaagccccacaacucccacgagggcaagacguucuacgugcucccgaacgacgacacccugcgcgucgaggccuucgaguacuaccacaccaccgaccccagcuuccuggggcgguacauguccgcccucaaccacacgaagaaguggaaguacccccaggugaacggccugaccagcaucaagugggccgacaacaacugcuaccuggcgaccgcccuccugacccugcagcagaucgagcucaaguucaaccccccggcccugcaggacgccuacuaccgcgcgcgggccggggaggccgccaacuucugcgcccugauccucgcguacugcaacaagacggugggcgagcugggcgacguccgcgagaccauguccuaccuguuccagcacgccaaccucgacagcugcaagcgggugcugaacgucgugugcaagaccugcgggcagcagcagaccacccugaagggcguggaggccgucauguacauggggacgcucuccuacgagcaguucaagaagggcgugcagauccccugcaccugcgggaagcaggccaccaaguaccuggugcagcaggagagccccuucgucaugauguccgcccccccggcgcaguacgagcugaagcacggcaccuucacgugcgccagcgaguacaccggcaacuaccagugcgggcacuacaagcacaucaccuccaaggagacccucuacugcaucgacggcgcccugcugacgaagagcagcgaguacaaggggcccaucaccgacguguucuacaaggagaacuccuacaccaccacgaucaagcccgugaccuacaagcucgacggcgucgugugcaccgagaucgaccccaagcuggacaacuacuacaagaaggacaacagcuacuucaccgagcagccgaucgaccuggugcccaaccagcccuaccccaacgccuccuucgacaacuucaaguucgucugcgacaacaucaaguucgccgacgaccucaaccagcugacgggguacaagaagccggcgagccgcgagcugaaggugaccuucuuccccgaccucaacggcgacguggucgccaucgacuacaagcacuacacccccuccuucaagaagggcgccaagcugcugcacaagcccaucguguggcacgugaacaacgccaccaacaaggcgacguacaagccgaacaccuggugcauccggugccucuggagcaccaagcccgucgagaccuccaacagcuucgacgugcugaaguccgaggacgcccaggggauggacaaccuggccugcgaggaccucaagcccgugagcgaggaggucguggagaaccccacgauccagaaggacgugcuggagugcaacgucaagaccaccgagguggugggcgacaucauccugaagccggccaacaacucccucaagaucaccgaggaggucgggcacacggaccugauggccgcguacguggacaacagcucccugaccaucaagaagcccaacgagcucagccgcgugcugggccugaagacccucgccacccacgggcuggccgccgucaacuccgugcccugggacacgaucgccaacuacgcgaagccguuccugaacaagguggucagcaccaccaccaacaucgugacgcgcugccucaaccgggugugcaccaacuacaugcccuacuucuucacccugcugcuccagcugugcaccuucacccgcuccacgaacagccggaucaaggccuccaugcccaccaccaucgccaagaacaccgucaagagcgugggcaaguucugccuggaggccagcuucaacuaccucaagucccccaacuucagcaagcugaucaacaucaucaucugguuccugcuccuguccgugugccugggcagccucaucuacuccacggccgcgcuggggguccugaugagcaaccucggcaugccguccuacugcaccggguaccgcgagggcuaccugaacagcaccaacgugaccaucgccacguacugcaccggcuccauccccugcagcgugugccuguccgggcucgacagccuggacaccuaccccucccuggagaccauccagaucacgaucagcuccuucaagugggaccucaccgccuucggccuggucgccgagugguuccuggccuacauccucuucacccgguucuucuacgugcuggggcuggcggccaucaugcagcucuucuucagcuacuucgccgugcacuucaucuccaacagcuggcugauguggcugaucaucaaccugguccagauggcccccaucuccgcgauggugcgcauguacaucuucuucgccagcuucuacuacguguggaagagcuacguccacgugguggacggcugcaacuccagcaccugcaugaugugcuacaagcggaaccgcgccacgcgggucgagugcaccaccaucgugaacgggguccgccgguccuucuacguguacgccaacggcggcaagggguucugcaagcuccacaacuggaacugcgugaacugcgacaccuucugcgccggcagcacguucaucuccgacgaggucgcgcgcgaccugagccugcaguucaagcggccgaucaaccccaccgaccaguccagcuacaucguggacuccgugaccgucaagaacgggagcauccaccucuacuucgacaaggccggccagaagaccuacgagcgccacucccugagccacuucgugaaccuggacaaccuccgggccaacaacacgaaggggucccugcccaucaacgugaucgucuucgacggcaagagcaagugcgaggaguccagcgcccgcuccgccagcguguacuacucccagcugaugugccagcccauccuccugcuggaccaggcgcucgugagcgacgucggcgacagcgccgagguggccgugaagauguucgacgccuacgucaacaccuucuccagcaccuucaacgugccgauggagaagcugaagacccugguggccacggcggaggccgagcucgccaagaacgucucccuggacaacgugcugagcaccuucaucuccgccgcgcggcagggguucguggacagcgacgucgagaccaaggacgugguggagugccucaagcugucccaccagagcgacaucgaggucaccggcgacuccugcaacaacuacaugcugacguacaacaagguggagaacaugaccccccgcgaccucggggccugcaucgacugcagcgcccggcacaucaacgcccagguggccaagucccacaacaucgcgcugaucuggaacgucaaggacuucaugagccuguccgagcagcuccgcaagcagauccgcagcgccgccaagaagaacaaccugcccuucaagcugaccugcgccaccacgcggcagguggugaacgucgugaccaccaagaucgcccucaagggcgggugaggacuagucccuguucccagagcccacuuuuuuuucuuuuuuugaaauaaaauagccugucuuucagaucucaaaggcucuuuucagagccaccaaaaaaaaaaaaaaaaaaaaaaaaaaaaaaaaaaaaaaaaaaaaaaaaaaaaaaaaaaaaaaaaaaaaaaaaaaaaaaaaaaaaaaaaaaaaaaaaaaaaa

SEQ ID NO: 19566 - RNA, 6113 nt, Artificial Sequence
  SARS-CoV-2__MT873050.1__non-structural protein 3 (NSP3) mRNA gc
aggagagucccgcagucggcguccagcggcucugcuuguucgugugugugucguugcaggccuuauucaagcuuaccauggcccccaccaaggugaccuucggcgacgacacggucaucgaggugcagggguacaagagcgugaacaucaccuucgagcuggacgagcgcaucgacaagguccucaacgagaagugcuccgccuacaccguggagcugggcaccgaggugaacgaguucgcgugcgucguggccgacgccgugaucaagacgcugcagccggucagcgagcuccugaccccccuggggaucgaccucgacgagugguccauggccaccuacuaccuguucgacgagagcggcgaguucaagcuggccucccacauguacugcagcuucuacccccccgacgaggacgaggaggagggggacugcgaggaggaggaguucgagccguccacccaguacgaguacggcacggaggacgacuaccagggcaagccccucgaguucggggcgaccagcgccgcccugcagcccgaggaggagcaggaggaggacuggcuggacgacgacucccagcagaccgugggccagcaggacgggagcgaggacaaccagaccacgaccauccagaccaucguggagguccagccccagcucgagauggagcugaccccgguggugcagacgaucgaggucaacuccuucagcggcuaccugaagcucaccgacaacguguacaucaagaacgccgacaucguggaggaggcgaagaaggucaagcccaccgugguggucaacgccgccaacguguaccugaagcacgggggcggcguggccggggcccugaacaaggcgaccaacaacgccaugcaggucgaguccgacgacuacaucgccacgaacggcccccucaagguggggggcagcugcguccuguccggccacaaccuggccaagcacugccuccacgugguggggcccaacgucaacaagggcgaggacauccagcugcugaagagcgccuacgagaacuucaaccagcacgaggugcuccuggcgccgcugcucuccgccgggaucuucggcgccgaccccauccacagccugcgggugugcgucgacaccgugcgcaccaacguguaccuggccgucuucgacaagaaccucuacgacaagcugguguccagcuuccuggagaugaagagcgagaagcagguggagcagaagaucgccgagauccucaaggaggaggucaagcccuucaucaccgaguccaagcccagcguggagcagcggaagcaggacgacaagaagaucaaggcgugcguggaggaggucacgaccacccuggaggagaccaaguuccugacggagaaccuccugcuguacaucgacaucaacgggaaccuccacccggacuccgccacccuggugagcgacaucgacaucaccuuccugaagaaggacgcccccuacaucgugggcgacgucgugcaggagggcgugcucaccgccgucgugauccccacgaagaaggccgggggcaccaccgagaugcuggcgaaggcccugcgcaaggugcccaccgacaacuacaucacgaccuacccggggcagggccucaacggguacaccgucgaggaggccaagaccgugcugaagaagugcaaguccgccuucuacauccugcccagcaucaucuccaacgagaagcaggagauccucggcaccgugagcuggaaccugcgggagaugcuggcgcacgccgaggagacgcgcaagcugaugcccgucugcguggagaccaaggccaucguguccaccauccagcggaaguacaagggcaucaagauccaggagggggucguggacuacggcgcccgcuucuacuucuacaccagcaagacgaccguggccucccucaucaacacccugaacgaccugaacgagacccucgucacgaugccccugggguacgugacccacggccugaaccucgaggaggcggcccgguacaugcgcagccugaaggugccggccaccgucuccgugagcucccccgacgccgugaccgccuacaacggguaccugacgagcuccagcaagacccccgaggagcacuucaucgagaccaucucccucgcgggcagcuacaaggacuggagcuacuccggccagagcacccagcuggggaucgaguuccugaagcggggcgacaaguccgucuacuacacgagcaaccccaccaccuuccaccucgacggggaggugaucaccuucgacaaccugaagacgcugcucucccugcgcgaggugcggaccaucaaggucuucaccaccguggacaacaucaaccugcacacgcagguggucgacaugagcaugaccuacggccagcaguucggcccgaccuaccucgacggggccgacgugaccaagaucaagccccacaacucccacgagggcaagacguucuacgugcugcccaacgacgacacccugcgcgucgaggccuucgaguacuaccacaccaccgacccgagcuuccucgggcgguacauguccgcccugaaccacacgaagaaguggaaguacccccaggugaacggccugaccagcaucaagugggccgacaacaacugcuaccucgcgaccgcccugcugacccuccagcagaucgagcugaaguucaacccccccgcccugcaggacgccuacuaccgcgcgcgggccggggaggccgccaacuucugcgcccucauccuggcguacugcaacaagacggugggcgagcugggcgacguccgcgagaccauguccuaccucuuccagcacgccaaccuggacagcugcaagcgggugcugaacgucgugugcaagaccugcgggcagcagcagaccacccucaagggcguggaggccgucauguacauggggacgcuguccuacgagcaguucaagaagggcgugcagaucccgugcaccugcgggaagcaggccaccaaguaccuggugcagcaggagagccccuucgucaugauguccgccccccccgcgcaguacgagcucaagcacggcaccuucacgugcgccagcgaguacaccggcaacuaccagugcgggcacuacaagcacaucaccuccaaggagacccuguacugcaucgacggcgcccugcucacgaagagcagcgaguacaaggggccgaucaccgacguguucuacaaggagaacuccuacaccaccacgaucaagcccgugaccuacaagcuggacggcgucgugugcaccgagaucgaccccaagcuggacaacuacuacaagaaggacaacagcuacuucaccgagcagcccaucgaccucgugccgaaccagcccuaccccaacgccuccuucgacaacuucaaguucgucugcgacaacaucaaguucgccgacgaccugaaccagcugacgggguacaagaagcccgcgagccgcgagcucaaggugaccuucuucccggaccugaacggcgacguggucgccaucgacuacaagcacuacacccccuccuucaagaagggcgccaagcugcuccacaagcccaucguguggcacgugaacaacgccaccaacaaggcgacguacaagcccaacaccuggugcauccggugccuguggagcaccaagccggucgagaccuccaacagcuucgacgugcugaaguccgaggacgcccaggggauggacaaccucgccugcgaggaccugaagcccgugagcgaggaggucguggagaaccccacgauccagaaggacgugcuggagugcaacgucaagaccaccgagguggugggcgacaucauccucaagcccgccaacaacucccugaagaucaccgaggaggucgggcacacggaccugauggccgcguacguggacaacagcucccucaccaucaagaagccgaacgagcugagccgcgugcugggccucaagacccuggccacccacgggcuggccgccgucaacuccgugcccugggacacgaucgccaacuacgcgaagcccuuccucaacaagguggucagcaccaccaccaacaucgugacgcgcugccugaaccgggugugcaccaacuacaugccguacuucuucacccugcuccugcagcugugcaccuucacccgcuccacgaacagccggaucaaggccuccaugcccaccaccaucgccaagaacaccgucaagagcgugggcaaguucugccucgaggccagcuucaacuaccugaagucccccaacuucagcaagcugaucaacaucaucaucugguuccuccugcuguccgugugccucggcagccugaucuacuccacggccgcgcuggggguccucaugagcaaccugggcaugcccuccuacugcaccggguaccgcgagggcuaccugaacagcaccaacgugaccaucgccacguacugcaccggcuccaucccgugcagcgugugccucuccgggcuggacagccuggacaccuaccccucccucgagaccauccagaucacgaucagcuccuucaagugggaccugaccgccuucggccuggucgccgagugguuccucgccuacauccuguucacccgguucuucuacgugcuggggcucgcggccaucaugcagcuguucuucagcuacuucgccgugcacuucaucuccaacagcuggcugauguggcugaucaucaaccucguccagauggcccccaucuccgcgauggugcgcauguacaucuucuucgccagcuucuacuacguguggaagagcuacguccacgugguggacggcugcaacuccagcaccugcaugaugugcuacaagcggaaccgcgccacgcgggucgagugcaccaccaucgugaacgggguccgccgguccuucuacguguacgccaacggcggcaagggguucugcaagcugcacaacuggaacugcgugaacugcgacaccuucugcgccggcagcacguucaucuccgacgaggucgcgcgcgaccugagccuccaguucaagcggcccaucaacccgaccgaccaguccagcuacaucguggacuccgugaccgucaagaacgggagcauccaccuguacuucgacaaggccggccagaagaccuacgagcgccacucccugagccacuucgugaaccucgacaaccugcgggccaacaacacgaaggggucccugcccaucaacgugaucgucuucgacggcaagagcaagugcgaggaguccagcgccaaguccgccagcguguacuacucccagcucaugugccagcccauccugcugcucgaccaggcgcuggugagcgacgucggcgacagcgccgagguggccgugaagauguucgacgccuacgucaacaccuucuccagcaccuucaacgugcccauggagaagcugaagacccucguggccacggcggaggccgagcuggccaagaacgucucccuggacaacgugcucagcaccuucaucuccgccgcgcgccagggguucguggacagcgacgucgagaccaaggacgugguggagugccugaagcugucccaccagagcgacaucgaggucaccggcgacuccugcaacaacuacaugcucacguacaacaagguggagaacaugaccccgcgggaccugggggccugcaucgacugcagcgcccgccacaucaacgcccagguggccaagucccacaacaucgcgcugaucuggaacgucaaggacuucaugagccucuccgagcagcugcggaagcagauccgcagcgccgccaagaagaacaaccugcccuucaagcucaccugcgccaccacgcgccagguggugaacgucgugaccaccaagaucgcccugaagggcgggugaggacuagucccuguucccagagcccacuuuuuuuucuuuuuuugaaauaaaauagccugucuuucagaucucaaaggcucuuuucagagccaccaaaaaaaaaaaaaaaaaaaaaaaaaaaaaaaaaaaaaaaaaaaaaaaaaaaaaaaaaaaaaaaaaaaaaaaaaaaaaaaaaaaaaaaaaaaaaaaaaaaaa

SEQ ID NO: 19567 - RNA, 6113 nt, Artificial Sequence
  SARS-CoV-2__MT873051.1__non-structural protein 3 (NSP3) mRNA gc
aggagagucccgcagucggcguccagcggcucugcuuguucgugugugugucguugcaggccuuauucaagcuuaccauggcccccaccaaggugaccuucggcgacgacacggucaucgaggugcagggguacaagagcgugaacaucaccuucgagcuggacgagcgcaucgacaagguccucaacgagaagugcuccgccuacaccguggagcugggcaccgaggugaacgaguucgcgugcgucguggccgacgccgugaucaagacgcugcagccggucagcgagcuccugaccccccuggggaucgaccucgacgagugguccauggccaccuacuaccuguucgacgagagcggcgaguucaagcuggccucccacauguacugcagcuucuacccccccgacgaggacgaggaggagggggacugcgaggaggaggaguucgagccguccacccaguacgaguacggcacggaggacgacuaccagggcaagccccucgaguucggggcgaccagcgccgcccugcagcccgaggaggagcaggaggaggacuggcuggacgacgacucccagcagaccgugggccagcaggacgggagcgaggacaaccagaccacgaccauccagaccaucguggagguccagccccagcucgagauggagcugaccccgguggugcagacgaucgaggucaacuccuucagcggcuaccugaagcucaccgacaacguguacaucaagaacgccgacaucguggaggaggcgaagaaggucaagcccaccgugguggucaacgccgccaacguguaccugaagcacgggggcggcguggccggggcccugaacaaggcgaccaacaacgccaugcaggucgaguccgacgacuacaucgccacgaacggcccccucaagguggggggcagcugcguccuguccggccacaaccuggccaagcacugccuccacgugguggggcccaacgucaacaagggcgaggacauccagcugcugaagagcgccuacgagaacuucaaccagcacgaggugcuccuggcgccgcugcucuccgccgggaucuucggcgccgaccccauccacagccugcgggugugcgucgacaccgugcgcaccaacguguaccuggccgucuucgacaagaaccucuacgacaagcugguguccagcuuccuggagaugaagagcgagaagcagguggagcagaagaucgccgagauccccaaggaggaggucaagcccuucaucaccgaguccaagccgagcguggagcagcggaagcaggacgacaagaagaucaaggcgugcguggaggaggucacgaccacccucgaggagaccaaguuccugacggagaaccugcuccuguacaucgacaucaacgggaaccugcaccccgacuccgccacccucgugagcgacaucgacaucaccuuccugaagaaggacgcccccuacaucgugggcgacgucgugcaggagggcgugcugaccgccgucgugauccccacgaagaaggccgggggcaccaccgagaugcucgcgaaggcccugcgcaaggugccgaccgacaacuacaucacgaccuaccccgggcagggccugaacggguacaccgucgaggaggccaagaccgugcucaagaagugcaaguccgccuucuacauccugcccagcaucaucuccaacgagaagcaggagauccugggcaccgugagcuggaaccuccgggagaugcuggcgcacgccgaggagacgcgcaagcugaugcccgucugcguggagaccaaggccaucguguccaccauccagcggaaguacaagggcaucaagauccaggagggggucguggacuacggcgcccgcuucuacuucuacaccagcaagacgaccguggccucccugaucaacacccucaacgaccugaacgagacccuggucacgaugccgcucggguacgugacccacggccugaaccuggaggaggcggcccgguacaugcgcagccucaaggugcccgccaccgucuccgugagcucccccgacgccgugaccgccuacaacggguaccugacgagcuccagcaagacccccgaggagcacuucaucgagaccaucucccuggcgggcagcuacaaggacuggagcuacuccggccagagcacccagcucgggaucgaguuccugaagcggggcgacaaguccgucuacuacacgagcaacccgaccaccuuccaccuggacggggaggugaucaccuucgacaaccucaagacgcugcugucccuccgcgaggugcggaccaucaaggucuucaccaccguggacaacaucaaccugcacacgcagguggucgacaugagcaugaccuacggccagcaguucggccccaccuaccuggacggggccgacgugaccaagaucaagccccacaacucccacgagggcaagacguucuacgugcucccgaacgacgacacccugcgcgucgaggccuucgaguacuaccacaccaccgaccccagcuuccuggggcgguacauguccgcccucaaccacacgaagaaguggaaguacccccaggugaacggccugaccagcaucaagugggccgacaacaacugcuaccuggcgaccgcccuccugacccugcagcagaucgagcucaaguucaaccccccggcccugcaggacgccuacuaccgcgcgcgggccggggaggccgccaacuucugcgcccugauccucgcguacugcaacaagacggugggcgagcugggcgacguccgcgagaccauguccuaccuguuccagcacgccaaccucgacagcugcaagcgggugcugaacgucgugugcaagaccugcgggcagcagcagaccacccugaagggcguggaggccgucauguacauggggacgcucuccuacgagcaguucaagaagggcgugcagauccccugcaccugcgggaagcaggccaccaaguaccuggugcagcaggagagccccuucgucaugauguccgcccccccggcgcaguacgagcugaagcacggcaccuucacgugcgccagcgaguacaccggcaacuaccagugcgggcacuacaagcacaucaccuccaaggagacccucuacugcaucgacggcgcccugcugacgaagagcagcgaguacaaggggcccaucaccgacguguucuacaaggagaacuccuacaccaccacgaucaagcccgugaccuacaagcucgacggcgucgugugcaccgagaucgaccccaagcuggacaacuacuacaagaaggacaacagcuacuucaccgagcagccgaucgaccuggugcccaaccagcccuaccccaacgccuccuucgacaacuucaaguucgucugcgacaacaucaaguucgccgacgaccucaaccagcugacgggguacaagaagccggcgagccgcgagcugaaggugaccuucuuccccgaccucaacggcgacguggucgccaucgacuacaagcacuacacccccuccuucaagaagggcgccaagcugcugcacaagcccaucguguggcacgugaacaacgccaccaacaaggcgacguacaagccgaacaccuggugcauccggugccucuggagcaccaagcccgucgagaccuccaacagcuucgacgugcugaaguccgaggacgcccaggggauggacaaccuggccugcgaggaccucaagcccgugagcgaggaggucguggagaaccccacgauccagaaggacgugcuggagugcaacgucaagaccaccgagguggugggcgacaucauccugaagccggccaacaacucccucaagaucaccgaggaggucgggcacacggaccugauggccgcguacguggacaacagcucccugaccaucaagaagcccaacgagcucagccgcgugcugggccugaagacccucgccacccacgggcuggccgccgucaacuccgugcccugggacacgaucgccaacuacgcgaagccguuccugaacaagguggucagcaccaccaccaacaucgugacgcgcugccucaaccgggugugcaccaacuacaugcccuacuucuucacccugcugcuccagcugugcaccuucacccgcuccacgaacagccggaucaaggccuccaugcccaccaccaucgccaagaacaccgucaagagcgugggcaaguucugccuggaggccagcuucaacuaccucaagucccccaacuucagcaagcugaucaacaucaucaucugguuccugcuccuguccgugugccugggcagccucaucuacuccacggccgcgcuggggguccugaugagcaaccucggcaugccguccuacugcaccggguaccgcgagggcuaccugaacagcaccaacgugaccaucgccacguacugcaccggcuccauccccugcagcgugugccuguccgggcucgacagccuggacaccuaccccucccuggagaccauccagaucacgaucagcuccuucaagugggaccucaccgccuucggccuggucgccgagugguuccuggccuacauccucuucacccgguucuucuacgugcuggggcuggcggccaucaugcagcucuucuucagcuacuucgccgugcacuucaucuccaacagcuggcugauguggcugaucaucaaccugguccagauggcccccaucuccgcgauggugcgcauguacaucuucuucgccagcuucuacuacguguggaagagcuacguccacgugguggacggcugcaacuccagcaccugcaugaugugcuacaagcggaaccgcgccacgcgggucgagugcaccaccaucgugaacgggguccgccgguccuucuacguguacgccaacggcggcaagggguucugcaagcuccacaacuggaacugcgugaacugcgacaccuucugcgccggcagcacguucaucuccgacgaggucgcgcgcgaccugagccugcaguucaagcggccgaucaaccccaccgaccaguccagcuacaucguggacuccgugaccgucaagaacgggagcauccaccucuacuucgacaaggccggccagaagaccuacgagcgccacucccugagccacuucgugaaccuggacaaccuccgggccaacaacacgaaggggucccugcccaucaacgugaucgucuucgacggcaagagcaagugcgaggaguccagcgccaaguccgccagcguguacuacucccagcugaugugccagcccauccuccugcuggaccaggcgcucgugagcgacgucggcgacagcgccgagguggccgugaagauguucgacgccuacgucaacaccuucuccagcaccuucaacgugccgauggagaagcugaagacccugguggccacggcggaggccgagcucgccaagaacgucucccuggacaacgugcugagcaccuucaucuccgccgcgcgccagggguucguggacagcgacgucgagaccaaggacgugguggagugccucaagcugucccaccagagcgacaucgaggucaccggcgacuccugcaacaacuacaugcugacguacaacaagguggagaacaugaccacccgggaccucggggccugcaucgacugcagcgcccgccacaucaacgcccagguggccaagucccacaacaucgcgcugaucuggaacgucaaggacuucaugagccuguccgagcagcuccggaagcagauccgcagcgccgccaagaagaacaaccugcccuucaagcugaccugcgccacgacccgccagguggugaacgucgugaccaccaagaucgcccucaagggcgggugaggacuagucccuguucccagagcccacuuuuuuuucuuuuuuugaaauaaaauagccugucuuucagaucucaaaggcucuuuucagagccaccaaaaaaaaaaaaaaaaaaaaaaaaaaaaaaaaaaaaaaaaaaaaaaaaaaaaaaaaaaaaaaaaaaaaaaaaaaaaaaaaaaaaaaaaaaaaaaaaaaaaa

SEQ ID NO: 19568 - RNA, 6113 nt, Artificial Sequence
  SARS-CoV-2__MT873064.1__non-structural protein 3 (NSP3) mRNA gc
aggagagucccgcagucggcguccagcggcucugcuuguucgugugugugucguugcaggccuuauucaagcuuaccauggcccccaccaaggugaccuucggcgacgacacggucaucgaggugcagggguacaagagcgugaacaucaccuucgagcuggacgagcgcaucgacaagguccucaacgagaagugcuccgccuacaccguggagcugggcaccgaggugaacgaguucgcgugcgucguggccgacgccgugaucaagacgcugcagccggucagcgagcuccugaccccccuggggaucgaccucgacgagugguccauggccaccuacuaccuguucgacgagagcggcgaguucaagcuggccucccacauguacugcagcuucuacccccccgacgaggacgaggaggagggggacugcgaggaggaggaguucgagccguccacccaguacgaguacggcacggaggacgacuaccagggcaagccccucgaguucggggcgaccagcgccgcccugcagcccgaggaggagcaggaggaggacuggcuggacgacgacucccagcagaccgugggccagcaggacgggagcgaggacaaccagaccacgaccauccagaccaucguggagguccagccccagcucgagauggagcugaccccgguggugcagacgaucgaggucaacuccuucagcggcuaccugaagcucaccgacaacguguacaucaagaacgccgacaucguggaggaggcgaagaaggucaagcccaccgugguggucaacgccgccaacguguaccugaagcacgggggcggcguggccggggcccugaacaaggcgaccaacaacgccaugcaggucgaguccgacgacuacaucgccacgaacggcccccucaagguggggggcagcugcguccuguccggccacaaccuggccaagcacugccuccacgugguggggcccaacgucaacaagggcgaggacauccagcugcugaagagcgccuacgagaacuucaaccagcacgaggugcuccuggcgccgcugcucuccgccgggaucuucggcgccgaccccauccacagccugcgggugugcgucgacaccgugcgcaccaacguguaccuggccgucuucgacaagaaccucuacgacaagcugguguccagcuuccuggagaugaagagcgagaagcagguggagcagaagaucgccgagauccccaaggaggaggucaagcccuucaucaccgaguccaagccgagcguggagcagcggaagcaggacgacaagaagaucaaggcgugcguggaggaggucacgaccacccucgaggagaccaaguuccugacggagaaccugcuccuguacaucgacaucaacgggaaccugcaccccgacuccgccacccucgugagcgacaucgacaucaccuuccugaagaaggacgcccccuacaucgugggcgacgucgugcaggagggcgugcugaccgccgucgugauccccacgaagaaggccgggggcaccaccgagaugcucgcgaaggcccugcgcaaggugccgaccgacaacuacaucacgaccuaccccgggcagggccugaacggguacaccgucgaggaggccaagaccgugcucaagaagugcaaguccgccuucuacauccugcccagcaucaucuccaacgagaagcaggagauccugggcaccgugagcuggaaccuccgggagaugcuggcgcacgccgaggagacgcgcaagcugaugcccgucugcguggagaccaaggccaucguguccaccauccagcggaaguacaagggcaucaagauccaggagggggucguggacuacggcgcccgcuucuacuucuacaccagcaagacgaccguggccucccugaucaacacccucaacgaccugaacgagacccuggucacgaugccgcucggguacgugacccacggccugaaccuggaggaggcggcccgguacaugcgcagccucaaggugcccgccaccgucuccgugagcucccccgacgccgugaccgccuacaacggguaccugacgagcuccagcaagacccccgaggagcacuucaucgagaccaucucccuggcgggcagcuacaaggacuggagcuacuccggccagagcacccagcucgggaucgaguuccugaagcggggcgacaaguccgucuacuacacgagcaacccgaccaccuuccaccuggacggggaggugaucaccuucgacaaccucaagacgcugcugucccuccgcgaggugcggaccaucaaggucuucaccaccguggacaacaucaaccugcacacgcagguggucgacaugagcaugaccuacggccagcaguucggccccaccuaccuggacggggccgacgugaccaagaucaagccccacaacucccacgagggcaagacguucuacgugcucccgaacgacgacacccugcgcgucgaggccuucgaguacuaccacaccaccgaccccagcuuccuggggcgguacauguccgcccucaaccacacgaagaaguggaaguacccccaggugaacggccugaccagcaucaagugggccgacaacaacugcuaccuggcgaccgcccuccugacccugcagcagaucgagcucaaguucaaccccccggcccugcaggacgccuacuaccgcgcgcgggccggggaggccgccaacuucugcgcccugauccucgcguacugcaacaagacggugggcgagcugggcgacguccgcgagaccauguccuaccuguuccagcacgccaaccucgacagcugcaagcgggugcugaacgucgugugcaagaccugcgggcagcagcagaccacccugaagggcguggaggccgucauguacauggggacgcucuccuacgagcaguucaagaagggcgugcagauccccugcaccugcgggaagcaggccaccaaguaccuggugcagcaggagagccccuucgucaugauguccgcccccccggcgcaguacgagcugaagcacggcaccuucacgugcgccagcgaguacaccggcaacuaccagugcgggcacuacaagcacaucaccuccaaggagacccucuacugcaucgacggcgcccugcugacgaagagcagcgaguacaaggggcccaucaccgacguguucuacaaggagaacuccuacaccaccacgaucaagcccgugaccuacaagcucgacggcgucgugugcaccgagaucgaccccaagcuggacaacuacuacaagaaggacaacagcuacuucaccgagcagccgaucgaccuggugcccaaccagcccuaccccaacgccuccuucgacaacuucaaguucgucugcgacaacaucaaguucgccgacgaccucaaccagcugacgggguacaagaagccggcgagccgcgagcugaaggugaccuucuuccccgaccucaacggcgacguggucgccaucgacuacaagcacuacacccccuccuucaagaagggcgccaagcugcugcacaagcccaucguguggcacgugaacaacgccaccaacaaggcgacguacaagccgaacaccuggugcauccggugccucuggagcaccaagcccuucgagaccuccaacagcuucgacguccugaaguccgaggacgcccaggggauggacaaccuggccugcgaggaccucaagcccgugagcgaggagguggucgagaaccccacgauccagaaggacgugcuggagugcaacgugaagaccaccgaggucgugggcgacaucauccugaagccggccaacaacucccucaagaucaccgaggagguggggcacacggaccugauggccgcguacgucgacaacagcucccugaccaucaagaagcccaacgagcucagccgcgugcugggccugaagacccucgccacccacgggcuggccgccgugaacuccguccccugggacacgaucgccaacuacgcgaagccguuccugaacaagguggugagcaccaccaccaacaucgucacgcgcugccucaaccgggugugcaccaacuacaugcccuacuucuucacccugcugcuccagcugugcaccuucacccgcuccacgaacagccggaucaaggccuccaugcccaccaccaucgccaagaacaccgugaagagcgucggcaaguucugccuggaggccagcuucaacuaccucaagucccccaacuucagcaagcugaucaacaucaucaucugguuccugcuccuguccgugugccugggcagccucaucuacuccacggccgcgcugggggugcugaugagcaaccucggcaugccguccuacugcaccggguaccgcgagggcuaccugaacagcaccaacgucaccaucgccacguacugcaccggcuccauccccugcagcgugugccuguccgggcucgacagccuggacaccuaccccucccuggagaccauccagaucacgaucagcuccuucaagugggaccucaccgccuucggccugguggccgagugguuccuggccuacauccucuucacccgguucuucuacguccuggggcuggcggccaucaugcagcucuucuucagcuacuucgccgugcacuucaucuccaacagcuggcugauguggcugaucaucaaccuggugcagauggcccccaucuccgcgaugguccgcauguacaucuucuucgccagcuucuacuacguguggaagagcuacgugcacgucguggacggcugcaacuccagcaccugcaugaugugcuacaagcggaaccgcgccacgcggguggagugcaccaccaucgucaacggggugcgccgguccuucuacgucuacgccaacggcggcaagggguucugcaagcuccacaacuggaacugcgugaacugcgacaccuucugcgccggcagcacguucaucuccgacgagguggcgcgcgaccugagccugcaguucaagcggccgaucaaccccaccgaccaguccagcuacaucgucgacuccgugaccgugaagaacgggagcauccaccucuacuucgacaaggccggccagaagaccuacgagcgccacucccugagccacuucgucaaccuggacaaccuccgggccaacaacacgaaggggucccugcccaucaacgugaucguguucgacggcaagagcaagugcgaggaguccagcgccaaguccgccagcgucuacuacucccagcugaugugccagcccauccuccugcuggaccaggcgcucgugagcgacgugggcgacagcgccgaggucgccgugaagauguucgacgccuacgugaacaccuucuccagcaccuucaacgucccgauggagaagcugaagacccugguggccacggcggaggccgagcucgccaagaacgugucccuggacaacguccugagcaccuucaucuccgccgcgcgccagggguucguggacagcgacguggagaccaaggacgucguggagugccucaagcugucccaccagagcgacaucgaggugaccggcgacuccugcaacaacuacaugcugacguacaacaaggucgagaacaugaccccccgggaccucggggccugcaucgacugcagcgcccgccacaucaacgcccagguggccaagucccacaacaucgcgcugaucuggaacgugaaggacuucaugagccuguccgagcagcuccggaagcagauccgcagcgccgccaagaagaacaaccugcccuucaagcugaccugcgccaccacgcgccaggucgugaacguggucaccaccaagaucgcccucaagggcgggugaggacuagucccuguucccagagcccacuuuuuuuucuuuuuuugaaauaaaauagccugucuuucagaucucaaaggcucuuuucagagccaccaaaaaaaaaaaaaaaaaaaaaaaaaaaaaaaaaaaaaaaaaaaaaaaaaaaaaaaaaaaaaaaaaaaaaaaaaaaaaaaaaaaaaaaaaaaaaaaaaaaaa

SEQ ID NO: 19569 - RNA, 6113 nt, Artificial Sequence
  SARS-CoV-2__MT873083.1__non-structural protein 3 (NSP3) mRNA gc
aggagagucccgcagucggcguccagcggcucugcuuguucgugugugugucguugcaggccuuauucaagcuuaccauggcccccaccaaggugaccuucggcgacgacacggucaucgaggugcagggguacaagagcgugaacaucaccuucgagcuggacgagcgcaucgacaagguccucaacgagaagugcuccgccuacaccguggagcugggcaccgaggugaacgaguucgcgugcgucguggccgacgccgugaucaagacgcugcagccggucagcgagcuccugaccccccuggggaucgaccucgacgagugguccauggccaccuacuaccuguucgacgagagcggcgaguucaagcuggccucccacauguacugcagcuucuacccccccgacgaggacgaggaggagggggacugcgaggaggaggaguucgagccguccacccaguacgaguacggcacggaggacgacuaccagggcaagccccucgaguucggggcgaccagcgccgcccugcagcccgaggaggagcaggaggaggacuggcuggacgacgacucccagcagaccgugggccagcaggacgggagcgaggacaaccagaccacgaccauccagaccaucguggagguccagccccagcucgagauggagcugaccccgguggugcagacgaucgaggucaacuccuucagcggcuaccugaagcucaccgacaacguguacaucaagaacgccgacaucguggaggaggcgaagaaggucaagcccaccgugguggucaacgccgccaacguguaccugaagcacgggggcggcguggccggggcccugaacaaggcgaccaacaacgccaugcaggucgaguccgacgacuacaucgccacgaacggcccccucaagguggggggcagcugcguccuguccggccacaaccuggccaagcacugccuccacgugguggggcccaacgucaacaagggcgaggacauccagcugcugaagagcgccuacgagaacuucaaccagcacgaggugcuccuggcgccgcugcucuccgccgggaucuucggcgccgaccccauccacagccugcgggugugcgucgacaccgugcgcaccaacguguaccuggccgucuucgacaagaaccucuacgacaagcugguguccagcuuccuggagaugaagagcgagaagcagguggagcagaagaucgccgagauccccaaggaggaggucaagcccuucaucaccgaguccaagccgagcguggagcagcggaagcaggacgacaagaagaucaaggcgugcguggaggaggucacgaccacccucgaggagaccaaguuccugacggagaaccugcuccuguacaucgacaucaacgggaaccugcaccccgacuccgccacccucgugagcgacaucgacaucaccuuccugaagaaggacgcccccuacaucgugggcgacgucgugcaggagggcgugcugaccgccgucgugauccccacgaagaaggccgggggcaccaccgagaugcucgcgaaggcccugcgcaaggugccgaccgacaacuacaucacgaccuaccccgggcagggccugaacggguacaccgucgaggaggccaagaccaugcucaagaagugcaaguccgccuucuacauccugcccagcaucaucuccaacgagaagcaggagauccugggcaccgugagcuggaaccuccgggagaugcuggcgcacgccgaggagacgcgcaagcugaugcccgugugcgucgagaccaaggccaucguguccaccauccagcggaaguacaagggcaucaagauccaggaggggguggucgacuacggcgcccgcuucuacuucuacaccagcaagacgaccguggccucccugaucaacacccucaacgaccugaacgagacccuggugacgaugccgcucggguacgucacccacggccugaaccuggaggaggcggcccgguacaugcgcagccucaaggugcccgccaccguguccgucagcucccccgacgccgugaccgccuacaacggguaccugacgagcuccagcaagacccccgaggagcacuucaucgagaccaucucccuggcgggcagcuacaaggacuggagcuacuccggccagagcacccagcucgggaucgaguuccugaagcggggcgacaaguccguguacuacacgagcaacccgaccaccuuccaccuggacggggaggucaucaccuucgacaaccucaagacgcugcugucccuccgcgaggugcggaccaucaagguguucaccaccgucgacaacaucaaccugcacacgcaggugguggacaugagcaugaccuacggccagcaguucggccccaccuaccuggacggggccgacgucaccaagaucaagccccacaacucccacgagggcaagacguucuacgugcucccgaacgacgacacccugcgcguggaggccuucgaguacuaccacaccaccgaccccagcuuccuggggcgguacauguccgcccucaaccacacgaagaaguggaaguacccccaggucaacggccugaccagcaucaagugggccgacaacaacugcuaccuggcgaccgcccuccugacccugcagcagaucgagcucaaguucaaccccccggcccugcaggacgccuacuaccgcgcgcgggccggggaggccgccaacuucugcgcccugauccucgcguacugcaacaagacggugggcgagcugggcgacgugcgcgagaccauguccuaccuguuccagcacgccaaccucgacagcugcaagcggguccugaacguggucugcaagaccugcgggcagcagcagaccacccugaagggcguggaggccgugauguacauggggacgcucuccuacgagcaguucaagaagggcguccagauccccugcaccugcgggaagcaggccaccaaguaccuggugcagcaggagagccccuucgugaugauguccgcccccccggcgcaguacgagcugaagcacggcaccuucacgugcgccagcgaguacaccggcaacuaccagugcgggcacuacaagcacaucaccuccaaggagacccucuacugcaucgacggcgcccugcugacgaagagcagcgaguacaaggggcccaucaccgacgucuucuacaaggagaacuccuacaccaccacgaucaagcccgugaccuacaagcucgacggcguggucugcaccgagaucgaccccaagcuggacaacuacuacaagaaggacaacagcuacuucaccgagcagccgaucgaccuggugcccaaccagcccuaccccaacgccuccuucgacaacuucaaguucgugugcgacaacaucaaguucgccgacgaccucaaccagcugacgggguacaagaagccggcgagccgcgagcugaaggucaccuucuuccccgaccucaacggcgacgugguggccaucgacuacaagcacuacacccccuccuucaagaagggcgccaagcugcugcacaagcccaucgucuggcacgugaacaacgccaccaacaaggcgacguacaagccgaacaccuggugcauccggugccucuggagcaccaagcccguggagaccuccaacagcuucgacguccugaaguccgaggacgcccaggggauggacaaccuggccugcgaggaccucaagcccgugagcgaggagguggucgagaaccccacgauccagaaggacgugcuggagugcaacgugaagaccaccgaggucgugggcgacaucauccugaagccggccaacaacucccucaagaucaccgaggagguggggcacacggaccugauggccgcguacgucgacaacagcucccugaccaucaagaagcccaacgagcucagccgcgugcugggccugaagacccucgccacccacgggcuggccgccgugaacuccguccccugggacacgaucgccaacuacgcgaagccguuccugaacaagguggugagcaccaccaccaacaucgucacgcgcugccucaaccgggugugcaccaacuacaugcccuacuucuucacccugcugcuccagcugugcaccuucacccgcuccacgaacagccggaucaaggccuccaugcccaccaccaucgccaagaacaccgugaagagcgucggcaaguucugccuggaggccagcuucaacuaccucaagucccccaacuucagcaagcugaucaacaucaucaucugguuccugcuccuguccgugugccugggcagccucaucuacuccacggccgcgcugggggugcugaugagcaaccucggcaugccguccuacugcaccggguaccgcgagggcuaccugaacagcaccaacgucaccaucgccacguacugcaccggcuccauccccugcagcgugugccuguccgggcucgacagccuggacaccuaccccucccuggagaccauccagaucacgaucagcuccuucaagugggaccucaccgccuucggccugguggccgagugguuccuggccuacauccucuucacccgguucuucuacguccuggggcuggcggccaucaugcagcucuucuucagcuacuucgccgugcacuucaucuccaacagcuggcugauguggcugaucaucaaccuggugcagauggcccccaucuccgcgaugguccgcauguacaucuucuucgccagcuucuacuacguguggaagagcuacgugcacgucguggacggcugcaacuccagcaccugcaugaugugcuacaagcggaaccgcgccacgcggguggagugcaccaccaucgucaacggggugcgccgguccuucuacgucuacgccaacggcggcaagggguucugcaagcuccacaacuggaacugcgugaacugcgacaccuucugcgccggcagcacguucaucuccgacgagguggcgcgcgaccugagccugcaguucaagcggccgaucaaccccaccgaccaguccagcuacaucgucgacuccgugaccgugaagaacgggagcauccaccucuacuucgacaaggccggccagaagaccuacgagcgccacucccugagccacuucgucaaccuggacaaccuccgggccaacaacacgaaggggucccugcccaucaacgugaucguguucgacggcaagagcaagugcgaggaguccagcgccaaguccgccagcgucuacuacucccagcugaugugccagcccauccuccugcuggaccaggcgcucgugagcgacgugggcgacagcgccgaggucgccgugaagauguucgacgccuacgugaacaccuucuccagcaccuucaacgucccgauggagaagcugaagacccugguggccacggcggaggccgagcucgccaagaacgugucccuggacaacguccugagcaccuucaucuccgccgcgcgccagggguucguggacagcgacguggagaccaaggacgucguggagugccucaagcugucccaccagagcgacaucgaggugaccggcgacuccugcaacaacuacaugcugacguacaacaaggucgagaacaugaccccccgggaccucggggccugcaucgacugcagcgcccgccacaucaacgcccagguggccaagucccacaacaucgcgcugaucuggaacgugaaggacuucaugagccuguccgagcagcuccggaagcagauccgcagcgccgccaagaagaacaaccugcccuucaagcugaccugcgccaccacgcgccaggucgugaacguggucaccaccaagaucgcccucaagggcgggugaggacuagucccuguucccagagcccacuuuuuuuucuuuuuuugaaauaaaauagccugucuuucagaucucaaaggcucuuuucagagccaccaaaaaaaaaaaaaaaaaaaaaaaaaaaaaaaaaaaaaaaaaaaaaaaaaaaaaaaaaaaaaaaaaaaaaaaaaaaaaaaaaaaaaaaaaaaaaaaaaaaaa

SEQ ID NO: 19570 - RNA, 6113 nt, Artificial Sequence
  SARS-CoV-2__MT873098.1__non-structural protein 3 (NSP3) mRNA gc
aggagagucccgcagucggcguccagcggcucugcuuguucgugugugugucguugcaggccuuauucaagcuuaccauggcccccaccaaggugaccuucggcgacgacacggucaucgaggugcagggguacaagagcgugaacaucaccuucgagcuggacgagcgcaucgacaagguccucaacgagaagugcuccgccuacaccguggagcugggcaccgaggugaacgaguucgcgugcgucguggccgacgccgugaucaagacgcugcagccggucagcgagcuccugaccccccuggggaucgaccucgacgagugguccauggccaccuacuaccuguucgacgagagcggcgaguucaagcuggccucccacauguacugcagcuucuacccccccgacgaggacgaggaggagggggacugcgaggaggaggaguucgagccguccacccaguacgaguacggcacggaggacgacuaccagggcaagccccucgaguucggggcgaccagcgccgcccugcagcccgaggaggagcaggaggaggacuggcuggacgacgacucccagcagaccgugggccagcaggacgggagcgaggacaaccagaccacgaccauccagaccaucguggagguccagccccagcucgagauggagcugaccccgguggugcagacgaucgaggucaacuccuucagcggcuaccugaagcucaccgacaacguguacaucaagaacgccgacaucguggaggaggcgaagaaggucaagcccaccgugguggucaacgccgccaacguguaccugaagcacgggggcggcguggccggggcccugaacaaggcgaccaacaacgccaugcaggucgaguccgacgacuacaucgccacgaacggcccccucaagguggggggcagcugcguccuguccggccacaaccuggccaagcacugccuccacgugguggggcccaacgucaacaagggcgaggacauccagcugcugaagagcgccuacgagaacuucaaccagcacgaggugcuccuggcgccgcugcucuccgccgggaucuucggcgccgaccccauccacagccugcgggugugcgucgacaccgugcgcaccaacguguaccuggccgucuucgacaagaaccucuacgacaagcugguguccagcuuccuggagaugaagagcgagaagcagguggagcagaagaucgccgagauccccaaggaggaggucaagcccuucaucaccgaguccaagccgagcguggagcagcggaagcaggacgacaagaagaucaaggcgugcguggaggaggucacgaccacccucgaggagaccaaguuccugacggagaaccugcuccuguacaucgacaucaacgggaaccugcaccccgacuccgccacccucgugagcgacaucgacaucaccuuccugaagaaggacgcccccuacaucgugggcgacgucgugcaggagggcgugcugaccgccgucgugauccccacgaagaaggccgggggcaccaccgagaugcucgcgaaggcccugcgcaaggugccgaccgacaacuacaucacgaccuaccccgggcagggccugaacggguacaccgucgaggaggccaagaccgugcucaagaagugcaaguccgccuucuacauccugcccagcaucaucuccaacgagaagcaggagauccugggcaccgugagcuggaaccuccgggagaugcuggcgcacgccgaggagacgcgcaagcugaugcccgucugcguggagaccaaggccaucguguccaccauccagcggaaguacaagggcaucaagauccaggagggggucguggacuacggcgcccgcuucuacuucuacaccagcaagacgaccguggccucccugaucaacacccucaacgaccugaacgagacccuggucacgaugccgcucggguacgugacccacggccugaaccuggaggaggcggcccgguacaugcgcagccucaaggugcccgccaccgucuccgugagcucccccgacgccgugaccgccuacaacggguaccugacgagcuccagcaagacccccgaggagcacuucaucgagaccaucucccuggcgggcagcuacaaggacuggagcuacuccggccagagcacccagcucgggaucgaguuccugaagcggggcgacaaguccgucuacuacacgagcaacccgaccaccuuccaccuggacggggaggugaucaccuucgacaaccucaagacgcugcugucccuccgcgaggugcggaccaucaaggucuucaccaccguggacaacaucaaccugcacacgcagguggucgacaugagcaugaccuacggccagcaguucggccccaccuaccuggacggggccgacgugaccaagaucaagccccacaacucccacgagggcaagacguucuacgugcucccgaacgacgacacccugcgcgucgaggccuucgaguacuaccacaccaccgaccccagcuuccuggggcgguacauguccgcccucaaccacacgaagaaguggaaguacccccaggugaacggccugaccagcaucaagugggccgacaacaacugcuaccuggcgaccgcccuccugacccugcagcagaucgagcucaaguucaaccccccggcccugcaggacgccuacuaccgcgcgcgggccggggaggccgccaacuucugcgcccugauccucgcguacugcaacaagacggugggcgagcugggcgacguccgcgagaccauguccuaccuguuccagcacgccaaccucgacagcugcaagcgggugcugaacgucgugugcaagaccugcgggcagcagcagaccacccugaagggcguggaggccgucauguacauggggacgcucuccuacgagcaguucaagaagggcgugcagauccccugcaccugcgggaagcaggccaccaaguaccuggugcagcaggagagccccuucgucaugauguccgcccccccggcgcaguacgagcugaagcacggcaccuucacgugcgccagcgaguacaccggcaacuaccagugcgggcacuacaagcacaucaccuccaaggagacccucuacugcaucgacggcgcccugcugacgaagagcagcgaguacaaggggcccaucaccgacguguucuacaaggagaacuccuacaccaccacgaucaagcccgugaccuacaagcucgacggcgucgugugcaccgagaucgaccccaagcuggacaacuacuacaagaaggacaacagcuacuucaccgagcagccgaucgaccuggugcccaaccagcccuaccccaacgccuccuucgacaacuucaaguucgucugcgacaacaucaaguucgccgacgaccucaaccagcugacgggguacaagaagccggcgagccgcgagcugaaggugaccuucuuccccgaccucaacggcgacguggucgccaucgacuacaagcacuacacccccuccuucaagaagggcgccaagcugcugcacaagcccaucguguggcacgugaacaacgccaccaacaaggcgacguacaagccgaacaccuggugcauccggugccucuggagcaccaagcccgucgagaccuccaacagcuucgacgugcugaaguccgaggacgcccaggggauggacaaccuggccugcgaggaccucaagcccgugagcgaggaggucguggagaaccccacgauccagaaggacgugcuggagugcaacgucaagaccaccgagguggugggcgacaucauccugaagccggccaacaacucccucaagaucaccgaggaggucgggcacacggaccugauggccgcguacguggacaacagcucccugaccaucaagaagcccaacgagcucagccgcgugcugggccugaagacccucgccacccacgggcuggccgccgucaacuccgugcccugggacacgaucgccaacuacgcgaagccguuccugaacaagguggucagcaccaccaccaacaucgugacgcgcugccucaaccgggugugcaccaacuacaugcccuacuucuucacccugcugcuccagcugugcaccuucacccgcuccacgaacagccggaucaaggccuccaugcccaccaccaucgccaagaacaccgucaagagcgugggcaaguucugccuggaggccagcuucaacuaccucaagucccccaacuucagcaagcugaucaacaucaucaucugguuccugcuccuguccgugugccugggcagccucaucuacuccacggccgcgcuggggguccugaugagcaaccucggcaugccguccuacugcaccggguaccgcgagggcuaccugaacagcaccaacgugaccaucgccacguacugcaccggcuccauccccugcagcgugugccuguccgggcucgacagccuggacaccuaccccucccuggagaccauccagaucacgaucagcuccuucaagugggaccucaccgccuucggccuggucgccgagugguuccuggccuacauccucuucacccgguucuucuacgugcuggggcuggcggccaucaugcagcucuucuucagcuacuucgccgugcacuucaucuccaacagcuggcugauguggcugaucaucaaccugguccagauggcccccaucuccgcgauggugcgcauguacaucuucuucgccagcuucuacuacguguggaagagcuacguccacgugguggacggcugcaacuccagcaccugcaugaugugcuacaagcggaaccgcgccacgcgggucgagugcaccaccaucgugaacgggguccgccgguccuucuacguguacgccaacggcggcaagggguucugcaagcuccacaacuggaacugcgugaacugcgacaccuucugcgccggcagcacguucaucuccgacgaggucgcgcgcgaccugagccugcaguucaagcggccgaucaaccccaccgaccaguccagcuacaucguggacuccgugaccgucaagaacgggagcauccaccucuacuucgacaaggccggccagaagaccuacgagcgccacucccugagccacuucgugaaccuggacaaccuccgggccaacaacacgaaggggucccugcccaucaacgugaucgucuucgacggcaagagcaagugcgaggaguccagcgccaaguccgccagcguguacuacucccagcugaugugccagcccauccuccugcuggaccaggcgcucgugagcgacgucggcgacagcgccgagguggccgugaagauguucgacgccuacgucaacaccuucuccagcaccuucaacgugccgauggagaagcugaagacccugguggccacggcggaggccgagcucgccaagaacgucucccuggacaacgugcugagcaccuucaucuccgccgcgcgccagggguucguggacagcgacgucgagaccaaggacgugguggagugccucaaguucucccaccagagcgacaucgaggucaccggcgacuccugcaacaacuacaugcugacguacaacaagguggagaacaugaccccccgggaccugggggccugcaucgacugcagcgcccgccacaucaacgcccagguggccaagucccacaacaucgcgcucaucuggaacgucaaggacuucaugagccuguccgagcagcugcggaagcagauccgcagcgccgccaagaagaacaaccuccccuucaagcugaccugcgccaccacgcgccagguggugaacgucgugaccaccaagaucgcccugaagggcgggugaggacuagucccuguucccagagcccacuuuuuuuucuuuuuuugaaauaaaauagccugucuuucagaucucaaaggcucuuuucagagccaccaaaaaaaaaaaaaaaaaaaaaaaaaaaaaaaaaaaaaaaaaaaaaaaaaaaaaaaaaaaaaaaaaaaaaaaaaaaaaaaaaaaaaaaaaaaaaaaaaaaaa

SEQ ID NO: 19571 - RNA, 6113 nt, Artificial Sequence
  SARS-CoV-2__MT873131.1__non-structural protein 3 (NSP3) mRNA gc
aggagagucccgcagucggcguccagcggcucugcuuguucgugugugugucguugcaggccuuauucaagcuuaccauggcccccaccaaggugaccuucggcgacgacacggucaucgaggugcagggguacaagagcgugaacaucaccuucgagcuggacgagcgcaucgacaagguccucaacgagaagugcuccgccuacaccguggagcugggcaccgaggugaacgaguucgcgugcgucguggccgacgccgugaucaagacgcugcagccggucagcgagcuccugaccccccuggggaucgaccucgacgagugguccauggccaccuacuaccuguucgacgagagcggcgaguucaagcuggccucccacauguacugcagcuucuacccccccgacgaggacgaggaggagggggacugcgaggaggaggaguucgagccguccacccaguacgaguacggcacggaggacgacuaccagggcaagccccucgaguucggggcgaccagcgccgcccugcagcccgaggaggagcaggaggaggacuggcuggacgacgacucccagcagaccgugggccagcaggacgggagcgaggacaaccagaccacgaccauccagaccaucguggagguccagccccagcucgagauggagcugaccccgguggugcagacgaucgaggucaacuccuucagcggcuaccugaagcucaccgacaacguguacaucaagaacgccgacaucguggaggaggcgaagaaggucaagcccaccgugguggucaacgccgccaacguguaccugaagcacgggggcggcguggccggggcccugaacaaggcgaccaacaacgccaugcaggucgaguccgacgacuacaucgccacgaacggcccccucaagguggggggcagcugcguccuguccggccacaaccuggccaagcacugccuccacgugguggggcccaacgucaacaagggcgaggacauccagcugcugaagaucgccuacgagaacuucaaccagcacgaggugcuccuggcgccgcugcucagcgccgggaucuucggcgccgaccccauccacucccugcgggugugcgucgacaccgugcgcaccaacguguaccuggccgucuucgacaagaaccucuacgacaagcuggugagcuccuuccuggagaugaagagcgagaagcagguggagcagaagaucgccgagauccccaaggaggaggucaagcccuucaucaccgagagcaagccguccguggagcagcggaagcaggacgacaagaagaucaaggcgugcguggaggaggucacgaccacccucgaggagaccaaguuccugacggagaaccugcuccuguacaucgacaucaacgggaaccugcaccccgacagcgccacccucguguccgacaucgacaucaccuuccugaagaaggacgcccccuacaucgugggcgacgucgugcaggagggcgugcugaccgccgucgugauccccacgaagaaggccgggggcaccaccgagaugcucgcgaaggcccugcgcaaggugccgaccgacaacuacaucacgaccuaccccgggcagggccugaacggguacaccgucgaggaggccaagaccgugcucaagaagugcaagagcgccuucuacauccugcccuccaucaucagcaacgagaagcaggagauccugggcaccguguccuggaaccuccgggagaugcuggcgcacgccgaggagacgcgcaagcugaugcccgucugcguggagaccaaggccaucgugagcaccauccagcggaaguacaagggcaucaagauccaggagggggucguggacuacggcgcccgcuucuacuucuacaccuccaagacgaccguggccagccugaucaacacccucaacgaccugaacgagacccuggucacgaugccgcucggguacgugacccacggccugaaccuggaggaggcggcccgguacaugcgcucccucaaggugcccgccaccgucagcguguccagccccgacgccgugaccgccuacaacggguaccugacguccagcuccaagacccccgaggagcacuucaucgagaccaucagccuggcgggcuccuacaaggacuggagcuacagcggccaguccacccagcucgggaucgaguuccugaagcggggcgacaagagcgucuacuacacguccaacccgaccaccuuccaccuggacggggaggugaucaccuucgacaaccucaagacgcugcugagccuccgcgaggugcggaccaucaaggucuucaccaccguggacaacaucaaccugcacacgcagguggucgacauguccaugaccuacggccagcaguucggccccaccuaccuggacggggccgacgugaccaagaucaagccccacaacagccacgagggcaagacguucuacgugcucccgaacgacgacacccugcgcgucgaggccuucgaguacuaccacaccaccgaccccuccuuccuggggcgguacaugagcgcccucaaccacacgaagaaguggaaguacccccaggugaacggccugaccuccaucaagugggccgacaacaacugcuaccuggcgaccgcccuccugacccugcagcagaucgagcucaaguucaaccccccggcccugcaggacgccuacuaccgcgcgcgggccggggaggccgccaacuucugcgcccugauccucgcguacugcaacaagacggugggcgagcugggcgacguccgcgagaccaugagcuaccuguuccagcacgccaaccucgacuccugcaagcgggugcugaacgucgugugcaagaccugcgggcagcagcagaccacccugaagggcguggaggccgucauguacauggggacgcucagcuacgagcaguucaagaagggcgugcagauccccugcaccugcgggaagcaggccaccaaguaccuggugcagcaggagucccccuucgucaugaugagcgcccccccggcgcaguacgagcugaagcacggcaccuucacgugcgccuccgaguacaccggcaacuaccagugcgggcacuacaagcacaucaccagcaaggagacccucuacugcaucgacggcgcccugcugacgaaguccagcgaguacaaggggcccaucaccgacguguucuacaaggagaacagcuacaccaccacgaucaagcccgugaccuacaagcucgacggcgucgugugcaccgagaucgaccccaagcuggacaacuacuacaagaaggacaacuccuacuucaccgagcagccgaucgaccuggugcccaaccagcccuaccccaacgccagcuucgacaacuucaaguucgucugcgacaacaucaaguucgccgacgaccucaaccagcugacgggguacaagaagccggcgucccgcgagcugaaggugaccuucuuccccgaccucaacggcgacguggucgccaucgacuacaagcacuacacccccagcuucaagaagggcgccaagcugcugcacaagcccaucguguggcacgugaacaacgccaccaacaaggcgacguacaagccgaacaccuggugcauccggugccucugguccaccaagcccgucgagaccagcaacuccuucgacgugcugaagagcgaggacgcccaggggauggacaaccuggccugcgaggaccucaagcccguguccgaggaggucguggagaaccccacgauccagaaggacgugcuggagugcaacgucaagaccaccgagguggugggcgacaucauccugaagccggccaacaacagccucaagaucaccgaggaggucgggcacacggaccugauggccgcguacguggacaacuccagccugaccaucaagaagcccaacgagcucucccgcgugcugggccugaagacccucgccacccacgggcuggccgccgucaacagcgugcccugggacacgaucgccaacuacgcgaagccguuccugaacaagguggucuccaccaccaccaacaucgugacgcgcugccucaaccgggugugcaccaacuacaugcccuacuucuucacccugcugcuccagcugugcaccuucacccgcagcacgaacucccggaucaaggccagcaugcccaccaccaucgccaagaacaccgucaaguccgugggcaaguucugccuggaggccagcuucaacuaccucaagagccccaacuucuccaagcugaucaacaucaucaucugguuccugcuccugagcgugugccugggcucccucaucuacagcacggccgcgcuggggguccugauguccaaccucggcaugccgagcuacugcaccggguaccgcgagggcuaccugaacuccaccaacgugaccaucgccacguacugcaccggcagcauccccugcuccgugugccugagcgggcucgacucccuggacaccuaccccagccuggagaccauccagaucacgaucuccagcuucaagugggaccucaccgccuucggccuggucgccgagugguuccuggccuacauccucuucacccgguucuucuacgugcuggggcuggcggccaucaugcagcucuucuucuccuacuucgccgugcacuucaucagcaacuccuggcugauguggcugaucaucaaccugguccagauggcccccaucagcgcgauggugcgcauguacaucuucuucgccuccuucuacuacguguggaagagcuacguccacgugguggacggcugcaacagcuccaccugcaugaugugcuacaagcggaaccgcgccacgcgggucgagugcaccaccaucgugaacgggguccgccggagcuucuacguguacgccaacggcggcaagggguucugcaagcuccacaacuggaacugcgugaacugcgacaccuucugcgccggcuccacguucaucagcgacgaggucgcgcgcgaccugucccugcaguucaagcggccgaucaaccccaccgaccagagcuccuacaucguggacagcgugaccgucaagaacggguccauccaccucuacuucgacaaggccggccagaagaccuacgagcgccacagccugucccacuucgugaaccuggacaaccuccgggccaacaacacgaaggggagccugcccaucaacgugaucgucuucgacggcaaguccaagugcgaggagagcuccgccaagagcgccuccguguacuacagccagcugaugugccagcccauccuccugcuggaccaggcgcucguguccgacgucggcgacagcgccgagguggccgugaagauguucgacgccuacgucaacaccuucagcuccaccuucaacgugccgauggagaagcugaagacccugguggccacggcggaggccgagcucgccaagaacgucagccuggacaacgugcuguccaccuucaucagcgccgcgcgccagggguucguggacuccgacgucgagaccaaggacgugguggagugccucaagcugagccaccaguccgacaucgaggucaccggcgacagcugcaacaacuacaugcugacguacaacaagguggagaacaugaccccccgggaccucggggccugcaucgacugcuccgcccgccacaucaacgcccagguggccaagagccacaacaucgcgcugaucuggaacgucaaggacuucaugucccugagcgagcagcuccggaagcagauccgcuccgccgccaagaagaacaaccugcccuucaagcugaccugcgccaccacgcgccagguggugaacgucgugaccaccaagaucgcccucaagggcgggugaggacuagucccuguucccagagcccacuuuuuuuucuuuuuuugaaauaaaauagccugucuuucagaucucaaaggcucuuuucagagccaccaaaaaaaaaaaaaaaaaaaaaaaaaaaaaaaaaaaaaaaaaaaaaaaaaaaaaaaaaaaaaaaaaaaaaaaaaaaaaaaaaaaaaaaaaaaaaaaaaaaaa

SEQ ID NO: 19572 - RNA, 6113 nt, Artificial Sequence
  SARS-CoV-2__MT873132.1__non-structural protein 3 (NSP3) mRNA gc
aggagagucccgcagucggcguccagcggcucugcuuguucgugugugugucguugcaggccuuauucaagcuuaccauggcccccaccaaggugaccuucggcgacgacacggucaucgaggugcagggguacaagagcgugaacaucaccuucgagcuggacgagcgcaucgacaagguccucaacgagaagugcuccgccuacaccguggagcugggcaccgaggugaacgaguucgcgugcgucguggccgacgccgugaucaagacgcugcagccggucagcgagcuccugaccccccuggggaucgaccucgacgagugguccauggccaccuacuaccuguucgacgagagcggcgaguucaagcuggccucccacauguacugcagcuucuacccccccgacgaggacgaggaggagggggacugcgaggaggaggaguucgagccguccacccaguacgaguacggcacggaggacgacuaccagggcaagccccucgaguucggggcgaccagcgccgcccugcagcccgaggaggagcaggaggaggacuggcuggacgacgacucccagcagaccgugggccagcaggacgggagcgaggacaaccagaccacgaccauccagaccaucguggagguccagccccagcucgagauggagcugaccccgguggugcagacgaucgaggucaacuccuucagcggcuaccugaagcucaccgacaacguguacaucaagaacgccgacaucguggaggaggcgaagaaggucaagcccaccgugguggucaacgccgccaacguguaccugaagcacgggggcggcguggccggggcccugaacaaggcgaccaacaacgccaugcaggucgaguccgacgacuacaucgccacgaacggcccccucaagguggggggcagcugcguccuguccggccacaaccuggccaagcacugccuccacgugguggggcccaacgucaacaagggcgaggacauccagcugcugaagagcgccuacgagaacuucaaccagcacgaggugcuccuggcgccgcugcucuccgccgggaucuucggcgccgaccccauccacagccugcgggugugcgucgacaccgugcgcaccaacguguaccuggccgucuucgacaagaaccucuacgacaagcugguguccagcuuccuggagaugaagagcgagaagcagguggagcagaagaucgccgagauccccaaggaggaggucaagcccuucaucaccgaguccaagccgagcguggagcagcggaagcaggacgacaagaagaucaaggcgugcguggaggaggucacgaccacccucgaggagaccaaguuccugacggagaaccugcuccuguacaucgacaucaacgggaaccugcaccccgacuccgccacccucgugagcgacaucgacaucaccuuccugaagaaggacucccccuacaucgugggcgacgucgugcaggagggcgugcugaccgccgucgugauccccacgaagaaggccgggggcaccaccgagaugcucgccaaggcgcugcgcaaggugccgaccgacaacuacaucacgaccuaccccgggcagggccugaacggguacaccgucgaggaggccaagaccgugcucaagaagugcaagagcgccuucuacauccugcccuccaucaucagcaacgagaagcaggagauccugggcaccguguccuggaaccuccgggagaugcuggcccacgcggaggagacgcgcaagcugaugcccgucugcguggagaccaaggccaucgugagcaccauccagcggaaguacaagggcaucaagauccaggagggggucguggacuacggcgcccgcuucuacuucuacaccuccaagacgaccguggccagccugaucaacacccucaacgaccugaacgagacccuggucacgaugccgcucggguacgugacccacggccugaaccuggaggaggccgcgcgguacaugcgcucccucaaggugcccgccaccgucagcguguccagccccgacgccgugaccgccuacaacggguaccugacguccagcuccaagacccccgaggagcacuucaucgagaccaucagccuggccggcagcuacaaggacugguccuacagcggccaguccacccagcucgggaucgaguuccugaagcggggcgacaagagcgucuacuacacguccaacccgaccaccuuccaccuggacggggaggugaucaccuucgacaaccucaagacgcugcugagccuccgcgaggugcggaccaucaaggucuucaccaccguggacaacaucaaccugcacacgcagguggucgacauguccaugaccuacggccagcaguucggccccaccuaccuggacggggcggacgugaccaagaucaagccccacaacagccacgagggcaagacguucuacgugcucccgaacgacgacacccugcgcgucgaggccuucgaguacuaccacaccaccgaccccuccuuccuggggcgguacaugagcgcccucaaccacacgaagaaguggaaguacccccaggugaacggccugaccuccaucaagugggccgacaacaacugcuaccuggccaccgcgcuccugacccugcagcagaucgagcucaaguucaaccccccggcccugcaggacgccuacuaccgcgcccgggcgggggaggccgccaacuucugcgcccugauccucgccuacugcaacaagacggugggcgagcugggcgacguccgcgagaccaugagcuaccuguuccagcacgcgaaccucgacuccugcaagcgggugcugaacgucgugugcaagaccugcgggcagcagcagaccacccugaagggcguggaggccgucauguacauggggacgcucagcuacgagcaguucaagaagggcgugcagauccccugcaccugcgggaagcaggccaccaaguaccuggugcagcaggagucccccuucgucaugaugagcgcccccccggcccaguacgagcugaagcacggcaccuucacgugcgcguccgaguacaccggcaacuaccagugcgggcacuacaagcacaucaccagcaaggagacccucuacugcaucgacggcgcccugcugacgaagagcuccgaguacaaggggcccaucaccgacguguucuacaaggagaacagcuacaccaccacgaucaagcccgugaccuacaagcucgacggcgucgugugcaccgagaucgaccccaagcuggacaacuacuacaagaaggacaacuccuacuucaccgagcagccgaucgaccuggugcccaaccagcccuaccccaacgccagcuucgacaacuucaaguucgucugcgacaacaucaaguucgccgacgaccucaaccagcugacgggguacaagaagccggccucccgcgagcugaaggugaccuucuuccccgaccucaacggcgacguggucgcgaucgacuacaagcacuacacccccagcuucaagaagggcgccaagcugcugcacaagcccaucguguggcacgugaacaacgccaccaacaaggccacguacaagccgaacaccuggugcauccggugccucugguccaccaagcccgucgagaccagcaacuccuucgacgugcugaagagcgaggacgcgcaggggauggacaaccuggccugcgaggaccucaagcccguguccgaggaggucguggagaaccccacgauccagaaggacgugcuggagugcaacgucaagaccaccgagguggugggcgacaucauccugaagccggccaacaacagccucaagaucaccgaggaggucgggcacacggaccugauggccgccuacguggacaacuccagccugaccaucaagaagcccaacgagcucucccgcgugcugggccugaagacccucgcgacccacgggcuggccgccgucaacagcgugcccugggacacgaucgccaacuacgccaagccguuccugaacaagguggucuccaccaccaccaacaucgugacgcgcugccucaaccgggugugcaccaacuacaugcccuacuucuucacccugcugcuccagcugugcaccuucacccgcagcacgaacucccggaucaaggcgagcaugcccaccaccaucgccaagaacaccgucaagagcgugggcaaguucugccuggaggccuccuucaacuaccucaagagccccaacuucuccaagcugaucaacaucaucaucugguuccugcuccugagcgugugccugggcucccucaucuacagcacggccgcccuggggguccugauguccaaccucggcaugccgagcuacugcaccggguaccgcgagggcuaccugaacuccaccaacgugaccaucgcgacguacugcaccggcagcauccccugcuccgugugccugagcgggcucgacucccuggacaccuaccccagccuggagaccauccagaucacgaucuccagcuucaagugggaccucaccgccuucggccugaucgccgagugguuccuggccuacauccucuucacccgguucuucuacguccuggggcuggccgcgaucaugcagcucuucuucuccuacuucgccgugcacuucaucagcaacuccuggcugauguggcugaucaucaaccuggugcagauggcccccaucagcgccaugguccgcauguacaucuucuucgcgagcuucuacuacguguggaaguccuacgugcacgucguggacggcugcaacagcuccaccugcaugaugugcuacaagcggaaccgcgccacgcggguggagugcaccaccaucgucaacggggugcgccggagcuucuacgucuacgccaacggcggcaagggguucugcaagcuccacaacuggaacugcgugaacugcgacaccuucugcgccggcuccacguucaucagcgacgagguggcccgcgaccugucccugcaguucaagcggccgaucaaccccaccgaccagagcuccuacaucgucgacagcgugaccgugaagaacggguccauccaccucuacuucgacaaggcgggccagaagaccuacgagcgccacagccugucccacuucgucaaccuggacaaccuccgggccaacaacacgaaggggagccugcccaucaacgugaucguguucgacggcaaguccaagugcgaggagagcuccgccaagagcgccuccgucuacuacagccagcugaugugccagcccauccuccugcuggaccaggcccucgugagcgacgugggcgacuccgcggaggucgccgugaagauguucgacgccuacgugaacaccuucagcuccaccuucaacgucccgauggagaagcugaagacccugguggccacggccgaggcggagcucgccaagaacgugagccuggacaacguccuguccaccuucaucagcgccgcccgccagggguucguggacuccgacguggagaccaaggacgucguggagugccucaagcugagccaccaguccgacaucgaggugaccggcgacagcugcaacaacuacaugcugacguacaacaaggucgagaacaugaccccccgggaccucggggcgugcaucgacugcuccgcccgccacaucaacgcccagguggccaagagccacaacaucgcccugaucuggaacgugaaggacuucaugucccugagcgagcagcuccggaagcagauccgcuccgcggccaagaagaacaaccugcccuucaagcugaccugcgccaccacgcgccaggucgugaacguggucaccaccaagaucgcccucaagggcgggugaggacuagucccuguucccagagcccacuuuuuuuucuuuuuuugaaauaaaauagccugucuuucagaucucaaaggcucuuuucagagccaccaaaaaaaaaaaaaaaaaaaaaaaaaaaaaaaaaaaaaaaaaaaaaaaaaaaaaaaaaaaaaaaaaaaaaaaaaaaaaaaaaaaaaaaaaaaaaaaaaaaaa

SEQ ID NO: 19573 - RNA, 6113 nt, Artificial Sequence
  SARS-CoV-2__MT873148.1__non-structural protein 3 (NSP3) mRNA gc
aggagagucccgcagucggcguccagcggcucugcuuguucgugugugugucguugcaggccuuauucaagcuuaccauggcccccaccaaggugaccuucggcgacgacacggucaucgaggugcagggguacaagagcgugaacaucaccuucgagcuggacgagcgcaucgacaagguccucaacgagaagugcuccgccuacaccguggagcugggcaccgaggugaacgaguucgcgugcgucguggccgacgccgugaucaagacgcugcagccggucagcgagcuccugaccccccuggggaucgaccucgacgagugguccauggccaccuacuaccuguucgacgagagcggcgaguucaagcuggccucccacauguacugcagcuucuacccccccgacgaggacgaggaggagggggacugcgaggaggaggaguucgagccguccacccaguacgaguacggcacggaggacgacuaccagggcaagccccucgaguucggggcgaccagcgccgcccugcagcccgaggaggagcaggaggaggacuggcuggacgacgacucccagcagaccgugggccagcaggacgggagcgaggacaaccagaccacgaccauccagaccaucguggagguccagccccagcucgagauggagcugaccccgguggugcagacgaucgaggucaacuccuucagcggcuaccugaagcucaccgacaacguguacaucaagaacgccgacaucguggaggaggcgaagaaggucaagcccaccgugguggucaacgccgccaacguguaccugaagcacgggggcggcguggccggggcccugaacaaggcgaccaacaacgccaugcaggucgaguccgacgacuacaucgccacgaacggcccccucaagguggggggcagcugcguccuguccggccacaaccuggccaagcacugccuccacgugguggggcccaacgucaacaagggcgaggacauccagcugcugaagagcgccuacgagaacuucaaccagcacgaggugcuccuggcgccgcugcucuccgccgggaucuucggcgccgaccccauccacagccugcgggugugcgucgacaccgugcgcaccaacguguaccuggccgucuucgacaagaaccucuacgacaagcugguguccagcuuccuggagaugaagagcgagaagcagguggagcagaagaucgccgagauccccaaggaggaggucaagcccuucaucaccgaguccaagccgagcguggagcagcggaagcaggacgacaagaagaucaaggcgugcguggaggaggucacgaccacccucgaggagaccaaguuccugacggagaaccugcuccuguacaucgacaucaacgggaaccugcaccccgacuccgccacccucgugagcgacaucgacaucaccuuccugaagaaggacgcccccuacaucgugggcgacgucgugcaggagggcgugcugaccgccgucgugauccccacgaagaaggccgggggcaccaccgagaugcucgcgaaggcccugcgcaaggugccgaccgacaacuacaucacgaccuaccccgggcagggccugaacggguacaccgucgaggaggccaagaccgugcucaagaagugcaaguccgccuucuacauccugcccagcaucaucuccaacgagaagcaggagauccugggcaccgugagcuggaaccuccgggagaugcuggcgcacgccgaggagacgcgcaagcugaugcccgucugcguggagaccaaggccaucguguccaccauccagcggaaguacaagggcaucaagauccaggagggggucguggacuacggcgcccgcuucuacuucuacaccagcaagacgaccguggccucccugaucaacacccucaacgaccugaacgagacccuggucacgaugccgcucggguacgugacccacggccugaaccuggaggaggcggcccgguacaugcgcagccucaaggugcccgccaccgucuccgugagcucccccgacgccgugaccgccuacaacggguaccugacgagcuccagcaagacccccgaggagcacuucaucgagaccaucucccuggcgggcagcuacaaggacuggagcuacuccggccagagcacccagcucgggaucgaguuccugaagcggggcgacaaguccgucuacuacacgagcaacccgaccaccuuccaccuggggggcgaggugaucaccuucgacaaccucaagacgcugcugucccuccgcgaggugcggaccaucaaggucuucaccaccguggacaacaucaaccugcacacgcagguggucgacaugagcaugaccuacggccagcaguucgggcccaccuaccuggacggcgccgacgugaccaagaucaagccccacaacucccacgaggggaagacguucuacgugcucccgaacgacgacacccugcgcgucgaggccuucgaguacuaccacaccaccgaccccagcuuccugggccgguacauguccgcccucaaccacacgaagaaguggaaguacccccaggugaacgggcugaccagcaucaagugggccgacaacaacugcuaccuggcgaccgcccuccugacccugcagcagaucgagcucaaguucaaccccccggcccugcaggacgccuacuaccgcgcgcgggccggcgaggccgccaacuucugcgcccugauccucgcguacugcaacaagacggugggcgagcugggggacguccgcgagaccauguccuaccuguuccagcacgccaaccucgacagcugcaagcgggugcugaacgucgugugcaagaccugcggccagcagcagaccacccugaaggggguggaggccgucauguacaugggcacgcucuccuacgagcaguucaagaagggggugcagauccccugcaccugcggcaagcaggccaccaaguaccuggugcagcaggagagccccuucgucaugauguccgcccccccggcgcaguacgagcugaagcacggcaccuucacgugcgccagcgaguacaccgggaacuaccagugcggccacuacaagcacaucaccuccaaggagacccucuacugcaucgacggggcccugcugacgaagagcagcgaguacaagggccccaucaccgacguguucuacaaggagaacuccuacaccaccacgaucaagcccgugaccuacaagcucgacggggucgugugcaccgagaucgaccccaagcuggacaacuacuacaagaaggacaacagcuacuucaccgagcagccgaucgaccuggugcccaaccagcccuaccccaacgccuccuucgacaacuucaaguucgucugcgacaacaucaaguucgccgacgaccucaaccagcugacgggcuacaagaagccggcgagccgcgagcugaaggugaccuucuuccccgaccucaacggcgacguggucgccaucgacuacaagcacuacacccccuccuucaagaagggggccaagcugcugcacaagcccaucguguggcacgugaacaacgccaccaacaaggcgacguacaagccgaacaccuggugcauccggugccucuggagcaccaagcccgucgagaccuccaacagcuucgacgugcugaaguccgaggacgcccagggcauggacaaccuggccugcgaggaccucaagcccgugagcgaggaggucguggagaaccccacgauccagaaggacgugcuggagugcaacgucaagaccaccgagguggugggggacaucauccugaagccggccaacaacucccucaagaucaccgaggaggucggccacacggaccugauggccgcguacguggacaacagcucccugaccaucaagaagcccaacgagcucagccgcgugcuggggcugaagacccucgccacccacggccuggccgccgucaacuccgugcccugggacacgaucgccaacuacgcgaagccguuccugaacaagguggucagcaccaccaccaacaucgugacgcgcugccucaaccgggugugcaccaacuacaugcccuacuucuucacccugcugcuccagcugugcaccuucacccgcuccacgaacagccggaucaaggccuccaugcccaccaccaucgccaagaacaccgucaagagcgugggcaaguucugccuggaggccagcuucaacuaccucaagucccccaacuucagcaagcugaucaacaucaucaucugguuccugcuccuguccgugugccuggggagccucaucuacuccacggccgcgcugggcguccugaugagcaaccucgggaugccguccuacugcaccggcuaccgcgagggcuaccugaacagcaccaacgugaccaucgccacguacugcaccggguccauccccugcagcgugugccuguccggccucgacagccuggacaccuaccccucccuggagaccauccagaucacgaucagcuccuucaagugggaccucaccgccuucgggcuggucgccgagugguuccuggccuacauccucuucacccgguucuucuacgugcugggccuggcggccaucaugcagcucuucuucagcuacuucgccgugcacuucaucuccaacagcuggcugauguggcugaucaucaaccugguccagauggcccccaucuccgcgauggugcgcauguacaucuucuucgccagcuucuacuacguguggaagagcuacguccacgugguggacgggugcaacuccagcaccugcaugaugugcuacaagcggaaccgcgccacgcgggucgagugcaccaccaucgugaacggcguccgccgguccuucuacguguacgccaacggcgggaagggcuucugcaagcuccacaacuggaacugcgugaacugcgacaccuucugcgccgggagcacguucaucuccgacgaggucgcgcgcgaccugagccugcaguucaagcggccgaucaaccccaccgaccaguccagcuacaucguggacuccgugaccgucaagaacggcagcauccaccucuacuucgacaaggccgggcagaagaccuacgagcgccacucccugagccacuucgugaaccuggacaaccuccgggccaacaacacgaagggcucccugcccaucaacgugaucgucuucgacggcaagagcaagugcgaggaguccagcgccaaguccgccagcguguacuacucccagcugaugugccagcccauccuccugcuggaccaggcgcucgugagcgacgucggggacagcgccgagguggccgugaagauguucgacgccuacgucaacaccuucuccagcaccuucaacgugccgauggagaagcugaagacccugguggccacggcggaggccgagcucgccaagaacgucucccuggacaacgugcugagcaccuucaucuccgccgcgcgccagggcuucguggacagcgacgucgagaccaaggacgugguggagugccucaagcugucccaccagagcgacaucgaggucaccggggacuccugcaacaacuacaugcugacguacaacaagguggagaacaugaccccccgggaccucggcgccugcaucgacugcagcgcccgccacaucaacgcccagguggccaagucccacaacaucgcgcugaucuggaacgucaaggacuucaugagccuguccgagcagcuccggaagcagauccgcagcgccgccaagaagaacaaccugcccuucaagcugaccugcgccaccacgcgccagguggugaacgucgugaccaccaagaucgcccucaaggggggcugaggacuagucccuguucccagagcccacuuuuuuuucuuuuuuugaaauaaaauagccugucuuucagaucucaaaggcucuuuucagagccaccaaaaaaaaaaaaaaaaaaaaaaaaaaaaaaaaaaaaaaaaaaaaaaaaaaaaaaaaaaaaaaaaaaaaaaaaaaaaaaaaaaaaaaaaaaaaaaaaaaaaa

SEQ ID NO: 19574 - RNA, 6113 nt, Artificial Sequence
  SARS-CoV-2__MT873152.1__non-structural protein 3 (NSP3) mRNA gc
aggagagucccgcagucggcguccagcggcucugcuuguucgugugugugucguugcaggccuuauucaagcuuaccauggcccccaccaaggugaccuucggcgacgacacggucaucgaggugcagggguacaagagcgugaacaucaccuucgagcuggacgagcgcaucgacaagguccucaacgagaagugcuccgccuacaccguggagcugggcaccgaggugaacgaguucgcgugcgucguggccgacgccgugaucaagacgcugcagccggucagcgagcuccugaccccccuggggaucgaccucgacgagugguccauggccaccuacuaccuguucgacgagagcggcgaguucaagcuggccucccacauguacugcagcuucuacccccccgacgaggacgaggaggagggggacugcgaggaggaggaguucgagccguccacccaguacgaguacggcacggaggacgacuaccagggcaagccccucgaguucggggcgaccagcgccgcccugcagcccgaggaggagcaggaggaggacuggcuggacgacgacucccagcagaccgugggccagcaggacgggagcgaggacaaccagaccacgaccauccagaccaucguggagguccagccccagcucgagauggagcugaccccgguggugcagacgaucgaggucaacuccuucagcggcuaccugaagcucaccgacaacguguacaucaagaacgccgacaucguggaggaggcgaagaaggucaagcccaccgugguggucaacgccgccaacguguaccugaagcacgggggcggcguggccggggcccugaacaaggcgaccaacaacgccaugcaggucgaguccgacgacuacaucgccacgaacggcccccucaagguggggggcagcugcguccuguccggccacaaccuggccaagcacugccuccacgugguggggcccaacgucaacaagggcgaggacauccagcugcugaagagcgccuacgagaacuucaaccagcacgaggugcuccuggcgccgcugcucuccgccgggaucuucggcgccgaccccauccacagccugcgggugugcgucgacaccgugcgcaccaacguguaccuggccgucuucgacaagaaccucuacgacaagcugguguccagcuuccuggagaugaagagcgagaagcagguggagcagaagaucgccgagauccucaaggaggaggucaagcccuucaucaccgaguccaagcccagcguggagcagcggaagcaggacgacaagaagaucaaggcgugcguggaggaggucacgaccacccuggaggagaccaaguuccugacggagaaccuccugcuguacaucgacaucaacgggaaccuccacccggacuccgccacccuggugagcgacaucgacaucaccuuccugaagaaggacgcccccuacaucgugggcgacgucgugcaggagggcgugcucaccgccgucgugauccccacgaagaaggccgggggcaccaccgagaugcuggcgaaggcccugcgcaaggugcccaccgacaacuacaucacgaccuacccggggcagggccucaacggguacaccgucgaggaggccaagaccgugcugaagaagugcaaguccgccuucuacauccugcccagcaucaucuccaacgagaagcaggagauccucggcaccgugagcuggaaccugcgggagaugcuggcgcacgccgaggagacgcgcaagcugaugcccgucugcguggagaccaaggccaucguguccaccauccagcggaaguacaagggcaucaagauccaggagggggucguggacuacggcgcccgcuucuacuucuacaccagcaagacgaccguggccucccucaucaacacccugaacgaccugaacgagacccucgucacgaugccccugggguacgugacccacggccugaaccucgaggaggcggcccgguacaugcgcagccugaaggugccggccaccgucuccgugagcucccccgacgccgugaccgccuacaacggguaccugacgagcuccagcaagacccccgaggagcacuucaucgagaccaucucccucgcgggcagcuacaaggacuggagcuacuccggccagagcacccagcuggggaucgaguuccugaagcggggcgacaaguccgucuacuacacgagcaaccccaccaccuuccaccucgacggggaggugaucaccuucgacaaccugaagacgcugcucucccugcgcgaggugcggaccaucaaggucuucaccaccguggacaacaucaaccugcacacgcagguggucgacaugagcaugaccuacggccagcaguucggcccgaccuaccucgacggggccgacgugaccaagaucaagccccacaacucccacgagggcaagacguucuacgugcugcccaacgacgacacccugcgcgucgaggccuucgaguacuaccacaccaccgacccgagcuuccucgggcgguacauguccgcccugaaccacacgaagaaguggaaguacccccaggugaacggccugaccagcaucaagugggccgacaacaacugcuaccucgcgaccgcccugcugacccuccagcagaucgagcugaaguucaacccccccgcccugcaggacgccuacuaccgcgcgcgggccggggaggccgccaacuucugcgcccucauccuggcguacugcaacaagacggugggcgagcugggcgacguccgcgagaccauguccuaccucuuccagcacgccaaccuggacagcugcaagcgggugcugaacgucgugugcaagaccugcgggcagcagcagaccacccucaagggcguggaggccgucauguacauggggacgcuguccuacgagcaguucaagaagggcgugcagaucccgugcaccugcgggaagcaggccaccaaguaccuggugcagcaggagagccccuucgucaugauguccgccccccccgcgcaguacgagcucaagcacggcaccuucacgugcgccagcgaguacaccggcaacuaccagugcgggcacuacaagcacaucaccuccaaggagacccuguacugcaucgacggcgcccugcucacgaagagcagcgaguacaaggggccgaucaccgacguguucuacaaggagaacuccuacaccaccacgaucaagcccgugaccuacaagcuggacggcgucgugugcaccgagaucgaccccaagcuggacaacuacuacaagaaggacaacagcuacuucaccgagcagcccaucgaccucgugccgaaccagcccuaccccaacgccuccuucgacaacuucaaguucgucugcgacaacaucaaguucgccgacgaccugaaccagcugacgggguacaagaagcccgcgagccgcgagcucaaggugaccuucuucccggaccugaacggcgacguggucgccaucgacuacaagcacuacacccccuccuucaagaagggcgccaagcugcuccacaagcccaucguguggcacgugaacaacgccaccaacaaggcgacguacaagcccaacaccuggugcauccggugccuguggagcaccaagccggucgagaccuccaacagcuucgacgugcugaaguccgaggacgcccaggggauggacaaccucgccugcgaggaccugaagcccgugagcgaggaggucguggagaaccccacgauccagaaggacgugcuggagugcaacgucaagaccaccgagguggugggcgacaucauccucaagcccgccaacaacucccugaagaucaccgaggaggucgggcacacggaccugauggccgcguacguggacaacagcucccucaccaucaagaagccgaacgagcugagccgcgugcugggccucaagacccuggccacccacgggcuggccgccgucaacuccgugcccugggacacgguggccaacuacgcgaagcccuuccucaacaaggucgugagcaccaccaccaacaucgugacgcgcugccugaaccgggucugcaccaacuacaugccguacuucuucacccugcuccugcagcugugcaccuucacccgcuccacgaacagccggaucaaggccuccaugcccaccaccaucgccaagaacaccgugaagagcgugggcaaguucugccucgaggccagcuucaacuaccugaagucccccaacuucagcaagcugaucaacaucaucaucugguuccuccugcuguccgucugccucggcagccugaucuacuccacggccgcgcugggggugcucaugagcaaccugggcaugcccuccuacugcaccggguaccgcgagggcuaccugaacagcaccaacgugaccaucgccacguacugcaccggcuccaucccgugcagcgucugccucuccgggcuggacagccuggacaccuaccccucccucgagaccauccagaucacgaucagcuccuucaagugggaccugaccgccuucggccugguggccgagugguuccucgccuacauccuguucacccgguucuucuacgugcuggggcucgcggccaucaugcagcuguucuucagcuacuucgccguccacuucaucuccaacagcuggcugauguggcugaucaucaaccucgugcagauggcccccaucuccgcgauggugcgcauguacaucuucuucgccagcuucuacuacgucuggaagagcuacgugcacguggucgacggcugcaacuccagcaccugcaugaugugcuacaagcggaaccgcgccacgcggguggagugcaccaccaucgucaacggggugcgccgguccuucuacguguacgccaacggcggcaagggguucugcaagcugcacaacuggaacugcgucaacugcgacaccuucugcgccggcagcacguucaucuccgacgagguggcgcgcgaccugagccuccaguucaagcggcccaucaacccgaccgaccaguccagcuacaucguggacuccgucaccgugaagaacgggagcauccaccuguacuucgacaaggccggccagaagaccuacgagcgccacucccugagccacuucgugaaccucgacaaccugcgggccaacaacacgaaggggucccugcccaucaacgucaucguguucgacggcaagagcaagugcgaggaguccagcgccaaguccgccagcguguacuacucccagcucaugugccagcccauccugcugcucgaccaggcgcuggucagcgacgugggcgacagcgccgagguggccgucaagauguucgacgccuacgugaacaccuucuccagcaccuucaacgugcccauggagaagcugaagacccucgucgccacggcggaggccgagcuggccaagaacgugucccuggacaacgugcucagcaccuucaucuccgccgcgcgccagggguucgucgacagcgacguggagaccaaggacguggucgagugccugaagcugucccaccagagcgacaucgaggugaccggcgacuccugcaacaacuacaugcucacguacaacaagguggagaacaugaccccgcgggaccugggggccugcaucgacugcagcgcccgccacaucaacgcccaggucgccaagucccacaacaucgcgcugaucuggaacgugaaggacuucaugagccucuccgagcagcugcggaagcagauccgcagcgccgccaagaagaacaaccugcccuucaagcucaccugcgccaccacgcgccagguggucaacguggugaccaccaagaucgcccugaagggcgggugaggacuagucccuguucccagagcccacuuuuuuuucuuuuuuugaaauaaaauagccugucuuucagaucucaaaggcucuuuucagagccaccaaaaaaaaaaaaaaaaaaaaaaaaaaaaaaaaaaaaaaaaaaaaaaaaaaaaaaaaaaaaaaaaaaaaaaaaaaaaaaaaaaaaaaaaaaaaaaaaaaaaa

SEQ ID NO: 19575 - RNA, 6113 nt, Artificial Sequence
  SARS-CoV-2__MT873163.1__non-structural protein 3 (NSP3) mRNA gc
aggagagucccgcagucggcguccagcggcucugcuuguucgugugugugucguugcaggccuuauucaagcuuaccauggcccccaccaaggugaccuucggcgacgacacggucaucgaggugcagggguacaagagcgugaacaucaccuucgagcuggacgagcgcaucgacaagguccucaacgagaagugcuccgccuacaccguggagcugggcaccgaggugaacgaguucgcgugcgucguggccgacgccgugaucaagacgcugcagccggucagcgagcuccugaccccccuggggaucgaccucgacgagugguccauggccaccuacuaccuguucgacgagagcggcgaguucaagcuggccucccacauguacugcagcuucuacccccccgacgaggacgaggaggagggggacugcgaggaggaggaguucgagccguccacccaguacgaguacggcacggaggacgacuaccagggcaagccccucgaguucggggcgaccagcgccgcccugcagcccgaggaggagcaggaggaggacuggcuggacgacgacucccagcagaccgugggccagcaggacgggagcgaggacaaccagaccacgaccauccagaccaucguggagguccagccccagcucgagauggagcugaccccgguggugcagacgaucgaggucaacuccuucagcggcuaccugaagcucaccgacaacguguacaucaagaacgccgacaucguggaggaggcgaagaaggucaagcccaccgugguggucaacgccgccaacguguaccugaagcacgggggcggcguggccggggcccugaacaaggcgaccaacaacgccaugcaggucgaguccgacgacuacaucgccacgaacggcccccucaagguggggggcagcugcguccuguccggccacaaccuggccaagcacugccuccacgugguggggcccaacgucaacaagggcgaggacauccagcugcugaagagcgccuacgagaacuucaaccagcacgaggugcuccuggcgccgcugcucuccgccgggaucuucggcgccgaccccauccacagccugcgggugugcgucgacaccgugcgcaccaacguguaccuggccgucuucgacaagaaccucuacgacaagcugguguccagcuuccuggagaugaagagcgagaagcagguggagcagaagaucgccgagauccccaaggaggaggucaagcccuucaucaccgaguccaagccgagcguggagcagcggaagcaggacgacaagaagaucaaggcgugcguggaggaggucacgaccacccucgaggagaccaaguuccugacggagaaccugcuccuguacaucgacaucaacgggaaccugcaccccgacuccgccacccucgugagcgacaucgacaucaccuuccugaagaaggacgcccccuacaucgugggcgacgucgugcaggagggcgugcugaccgccgucgugauccccacgaagaaggccgggggcaccaccgagaugcucgcgaaggcccugcgcaaggugccgaccgacaacuacaucacgaccuaccccgggcagggccugaacggguacaccgucgaggaggccaagaccgugcucaagaagugcaaguccgccuucuacauccugcccagcaucaucuccaacgagaagcaggagauccugggcaccgugagcuggaaccuccgggagaugcuggcgcacgccgaggagacgcgcaagcugaugcccgucugcguggagaccaaggccaucguguccaccauccagcggaaguacaagggcaucaagauccaggagggggucguggacuacggcgcccgcuucuacuucuacaccagcaagacgaccguggccucccugaucaacacccucaacgaccugaacgagacccuggucacgaugccgcucggguacgugacccacggccugaaccuggaggaggcggcccgguacaugcgcagccucaaggugcccgccaccgucuccgugagcucccccgacgccgugaccgccuacaacggguaccugacgagcuccagcaagacccccgaggagcacuucaucgagaccaucucccuggcgggcagcuacaaggacuggagcuacuccggccagagcacccagcucgggaucgaguuccugaagcggggcgacaaguccgucuacuacacgagcaacccgaccaccuuccaccuggacggggaggugaucaccuucgacaaccucaagacgcugcugucccuccgcgaggugcggaccaucaaggucuucaccaccguggacaacaucaaccugcacacgcagguggucgacaugagcaugaccuacggccagcaguucggccccaccuaccuggacggggccgacgugaccaagaucaagccccacaacucccacgagggcaagacguucuacgugcucccgaacgacgacacccugcgcgucgaggccuucgaguacuaccacaccaccgaccccagcuuccuggggcgguacauguccgcccucaaccacacgaagaaguggaaguacccccaggugaacggccugaccagcaucaagugggccgacaacaacugcuaccuggcgaccgcccuccugacccugcagcagaucgagcucaaguucaaccccccggcccugcaggacgccuacuaccgcgcgcgggccggggaggccgccaacuucugcgcccugauccucgcguacugcaacaagacggugggcgagcugggcgacguccgcgagaccauguccuaccuguuccagcacgccaaccucgacagcugcaagcgggugcugaacgucgugugcaagaccugcgggcagcagcagaccacccugaagggcguggaggccgucauguacauggggacgcucuccuacgagcaguucaagaagggcgugcagauccccugcaccugcgggaagcaggccaccaaguaccuggugcagcaggagagccccuucgucaugauguccgcccccccggcgcaguacgagcugaagcacggcaccuucacgugcgccagcgaguacaccggcaacuaccagugcgggcacuacaagcacaucaccuccaaggagacccucuacugcaucgacggcgcccugcugacgaagagcagcgaguacaaggggcccaucaccgacguguucuacaaggagaacuccuacaccaccacgaucaagcccgugaccuacaagcucgacggcgucgugugcaccgagaucgaccccaagcuggacaacuacuacaagaaggacaacagcuacuucaccgagcagccgaucgaccuggugcccaaccagcccuaccccaacgccuccuucgacaacuucaaguucgucugcgacaacaucaaguucgccgacgaccucaaccagcugacgggguacaagaagccggcgagccgcgagcugaaggugaccuucuuccccgaccucaacggcgacguggucgccaucgacuacaagcacuacacccccuccuucaagaagggcgccaagcugcugcacaagcccaucguguggcacgugaacaacgccaccaacaaggcgacguacaagccgaacaccuggugcauccggugccucuggagcaccaagcccgucgagaccuccaacagcuucgacgugcugaaguccgaggacgcccaggggauggacaaccuggccugcgaggagcucaagcccgugagcgaggaggucguggagaaccccacgauccagaaggacgugcuggagugcaacgucaagaccaccgagguggugggcgacaucauccugaagccggccaacaacucccucaagaucaccgaggaggucgggcacacggaccugauggccgcguacguggacaacagcucccugaccaucaagaagcccaacgagcucagccgcgugcugggccugaagacccucgccacccacgggcuggccgccgucaacuccgugcccugggacacgaucgccaacuacgcgaagccguuccugaacaagguggucagcaccaccaccaacaucgugacgcgcugccucaaccgggugugcaccaacuacaugcccuacuucuucacccugcugcuccagcugugcaccuucacccgcuccacgaacagccggaucaaggccuccaugcccaccaccaucgccaagaacaccgucaagagcgugggcaaguucugccuggaggccagcuucaacuaccucaagucccccaacuucagcaagcugaucaacaucaucaucugguuccugcuccuguccgugugccugggcagccucaucuacuccacggccgcgcuggggguccugaugagcaaccucggcaugccguccuacugcaccggguaccgcgagggcuaccugaacagcaccaacgugaccaucgccacguacugcaccggcuccauccccugcagcgugugccuguccgggcucgacagccuggacaccuaccccucccuggagaccauccagaucacgaucagcuccuucaagugggaccucaccgccuucggccuggucgccgagugguuccuggccuacauccucuucacccgguucuucuacgugcuggggcuggcggccaucaugcagcucuucuucagcuacuucgccgugcacuucaucuccaacagcuggcugauguggcugaucaucaaccugguccagauggcccccaucuccgcgauggugcgcauguacaucuucuucgccagcuucuacuacguguggaagagcuacguccacgugguggacggcugcaacuccagcaccugcaugaugugcuacaagcggaaccgcgccacgcgggucgagugcaccaccaucgugaacgggguccgccgguccuucuacguguacgccaacggcggcaagggguucugcaagcuccacaacuggaacugcgugaacugcgacaccuucugcgccggcagcacguucaucuccgacgaggucgcgcgcgaccugagccugcaguucaagcggccgaucaaccccaccgaccaguccagcuacaucguggacuccgugaccgucaagaacgggagcauccaccucuacuucgacaaggccggccagaagaccuacgagcgccacucccugagccacuucgugaaccuggacaaccuccgggccaacaacacgaaggggucccugcccaucaacgugaucgucuucgacggcaagagcaagugcgaggaguccagcgccaaguccgccagcguguacuacucccagcugaugugccagcccauccuccugcuggaccaggcgcucgugagcgacgucggcgacagcgccgagguggccgugaagauguucgacgccuacgucaacaccuucuccagcaccuucaacgugccgauggagaagcugaagacccugguggccacggcggaggccgagcucgccaagaacgucucccuggacaacgugcugagcaccuucaucuccgccgcgcgccagggguucguggacagcgacgucgagaccaaggacgugguggagugccucaagcugucccaccagagcgacaucgaggucaccggcgacuccugcaacaacuacaugcugacguacaacaagguggagaacaugaccccccgggaccucggggccugcaucgacugcagcgcccgccacaucaacgcccagguggccaagucccacaacaucgcgcugaucuggaacgucaaggacuucaugagccuguccgagcagcuccggaagcagauccgcagcgccgccaagaagaacaaccugcccuucaagcugaccugcgccaccacgcgccagguggugaacgucgugaccaccaagaucgcccucaagggcgggugaggacuagucccuguucccagagcccacuuuuuuuucuuuuuuugaaauaaaauagccugucuuucagaucucaaaggcucuuuucagagccaccaaaaaaaaaaaaaaaaaaaaaaaaaaaaaaaaaaaaaaaaaaaaaaaaaaaaaaaaaaaaaaaaaaaaaaaaaaaaaaaaaaaaaaaaaaaaaaaaaaaaa

SEQ ID NO: 19576 - RNA, 6113 nt, Artificial Sequence
  SARS-CoV-2__MT873201.1__non-structural protein 3 (NSP3) mRNA gc
aggagagucccgcagucggcguccagcggcucugcuuguucgugugugugucguugcaggccuuauucaagcuuaccauggcccccaccaaggugaccuucggcgacgacacggucaucgaggugcagggguacaagagcgugaacaucaccuucgagcuggacgagcgcaucgacaagguccucaacgagaagugcuccgccuacaccguggagcugggcaccgaggugaacgaguucgcgugcgucguggccgacgccgugaucaagacgcugcagccggucagcgagcuccugaccccccuggggaucgaccucgacgagugguccauggccaccuacuaccuguucgacgagagcggcgaguucaagcuggccucccacauguacugcagcuucuacccccccgacgaggacgaggaggagggggacugcgaggaggaggaguucgagccguccacccaguacgaguacggcacggaggacgacuaccagggcaagccccucgaguucggggcgaccagcgccgcccugcagcccgaggaggagcaggaggaggacuggcuggacgacgacucccagcagaccgugggccagcaggacgggagcgaggacaaccagaccacgaccauccagaccaucguggagguccagccccagcucgagauggagcugaccccgguggugcagacgaucgaggucaacuccuucagcggcuaccugaagcucaccgacaacguguacaucaagaacgccgacaucguggaggaggcgaagaaggucaagcccaccgugguggucaacgccgccaacguguaccugaagcacgggggcggcguggccggggcccugaacaaggcgaccaacaacgccaugcaggucgaguccgacgacuacaucgccacgaacggcccccucaagguggggggcagcugcguccuguccggccacaaccuggccaagcacugccuccacgugguggggcccaacgucaacaagggcgaggacauccagcugcugaagagcgccuacgagaacuucaaccagcacgaggugcuccuggcgccgcugcucuccgccgggaucuucggcgccgaccccauccacagccugcgggugugcgucgacaccgugcgcaccaacguguaccuggccgucuucgacaagaaccucuacgacaagcugguguccagcuuccuggagaugaagagcgagaagcagguggagcagaagaucgccgagauccccaaggaggaggucaagcccuucaucaccgaguccaagccgagcguggagcagcggaagcaggacgacaagaagaucaaggcgugcguggaggaggucacgaccacccucgaggagaccaaguuccugacggagaaccugcuccuguacaucgacaucaacgggaaccugcaccccgacuccgccacccucgugagcgacaucgacaucaccuuccugaagaaggacgcccccuacaucgugggcgacgucgugcaggagggcgugcugaccgccgucgugauccccacgaagaaggccgggggcaccaccgagaugcucgcgaaggcccugcgcaaggugccgaccgacaacuacaucacgaccuaccccgggcagggccugaacggguacaccgucgaggaggccaagaccgugcucaagaagugcaaguccgccuucuacauccugcccagcaucaucuccaacgagaagcaggagauccugggcaccgugagcuggaaccuccgggagaugcuggcgcacgccgaggagacgcgcaagcugaugcccgucugcguggagaccaaggccaucguguccaccauccagcggaaguacaagggcaucaagauccaggagggggucguggacuacggcgcccgcuucuacuucuacaccagcaagacgaccguggccucccugaucaacacccucaacgaccugaacgagacccuggucacgaugccgcucggguacgugacccacggccugaaccuggaggaggcggcccgguacaugcgcagccucaaggugcccgccaccgucuccgugagcucccccgacgccgugaccgccuacaacggguaccugacgagcuccagcaagacccccgaggagcacuucaucgagaccaucucccuggcgggcagcuacaaggacuggagcuacuccggccagagcacccagcucgggaucgaguuccugaagcggggcgacaaguccgucuacuacacgagcaacccgaccaccuuccaccuggacggggaggugaucaccuucgacaaccucaagacgcugcugucccuccgcgaggugcggaccaucaaggucuucaccaccguggacaacaucaaccugcacacgcagguggucgacaugagcaugaccuacggccagcaguucggccccaccuaccuggacggggccgacgugaccaagaucaagccccacaacucccacgagggcaagacguucuacgugcucccgaacgacgacacccugcgcgucgaggccuucgaguacuaccacaccaccgaccccagcuuccuggggcgguacauguccgcccucaaccacacgaagaaguggaaguacccccaggugaacggccugaccagcaucaagugggccgacaacaacugcuaccuggcgaccgcccuccugacccugcagcagaucgagcucaaguucaaccccccggcccugcaggacgccuacuaccgcgcgcgggccggggaggccgccaacuucugcgcccugauccucgcguacugcaacaagacggugggcgagcugggcgacguccgcgagaccauguccuaccuguuccagcacgccaaccucgacagcugcaagcgggugcugaacgucgugugcaagaccugcgggcagcagcagaccacccugaagggcguggaggccgucauguacauggggacgcucuccuacgagcaguucaagaagggcgugcagauccccugcaccugcgggaagcaggccaccaaguaccuggugcagcaggagagccccuucgucaugauguccgcccccccggcgcaguacgagcugaagcacggcaccuucacgugcgccagcgaguacaccggcaacuaccagugcgggcacuacaagcacaucaccuccaaggagacccucuacugcaucgacggcgcccugcugacgaagagcagcgaguacaagggguccaucaccgacguguucuacaaggagaacagcuacaccaccacgaucaagcccgugaccuacaagcucgacggcgucgugugcaccgagaucgaccccaagcuggacaacuacuacaagaaggacaacuccuacuucaccgagcagcccaucgaccuggugccgaaccagcccuaccccaacgccagcuucgacaacuucaaguucgucugcgacaacaucaaguucgccgacgaccucaaccagcugacgggguacaagaagcccgcgucccgcgagcugaaggugaccuucuucccggaccucaacggcgacguggucgccaucgacuacaagcacuacacccccagcuucaagaagggcgccaagcugcugcacaagcccaucguguggcacgugaacaacgccaccaacaaggcgacguacaagcccaacaccuggugcauccggugccucugguccaccaagccggucgagaccagcaacuccuucgacgugcugaagagcgaggacgcccaggggauggacaaccuggccugcgaggaccucaagcccguguccgaggaggucguggagaaccccacgauccagaaggacgugcuggagugcaacgucaagaccaccgagguggugggcgacaucauccugaagcccgccaacaacagccucaagaucaccgaggaggucgggcacacggaccugauggccgcguacguggacaacuccagccugaccaucaagaagccgaacgagcucucccgcgugcugggccugaagacccucgccacccacgggcuggccgccgucaacagcgugcccugggacacgaucgccaacuacgcgaagcccuuccugaacaagguggucuccaccaccaccaacaucgugacgcgcugccucaaccgggugugcaccaacuacaugccguacuucuucacccugcugcuccagcugugcaccuucacccgcagcacgaacucccggaucaaggccagcaugcccaccaccaucgccaagaacaccgucaagagcgugggcaaguucugccuggaggccuccuucaacuaccucaagagccccaacuucuccaagcugaucaacaucaucaucugguuccugcuccugagcgugugccugggcucccucaucuacagcacggccgcgcuggggguccugauguccaaccucggcaugcccagcuacugcaccggguaccgcgagggcuaccugaacuccaccaacgugaccaucgccacguacugcaccggcagcaucccgugcuccgugugccugagcgggcucgacucccuggacaccuaccccagccuggagaccauccagaucacgaucuccagcuucaagugggaccucaccgccuucggccuggucgccgagugguuccuggccuacauccucuucacccgguucuucuacgugcuggggcuggcggccaucaugcagcucuucuucuccuacuucgccgugcacuucaucagcaacuccuggcugauguggcugaucaucaaccugguccagauggcccccaucagcgcgauggugcgcauguacaucuucuucgccagcuucuacuacguguggaaguccuacguccacgugguggacggcugcaacagcuccaccugcaugaugugcuacaagcggaaccgcgccacgcgggucgagugcaccaccaucgugaacgggguccgccggagcuucuacguguacgccaacggcggcaagggguucugcaagcuccacaacuggaacugcgugaacugcgacaccuucugcgccggcuccacguucaucagcgacgaggucgcgcgcgaccugucccugcaguucaagcggcccaucaacccgaccgaccagagcuccuacaucguggacagcgugaccgucaagaacggguccauccaccucuacuucgacaaggccggccagaagaccuacgagcgccacagccugucccacuucgugaaccuggacaaccuccgggccaacaacacgaaggggagccugcccaucaacgugaucgucuucgacggcaaguccaagugcgaggagagcuccgccaagagcgccuccguguacuacagccagcugaugugccagcccauccuccugcuggaccaggcgcucgugagcgacgucggcgacuccgccgagguggccgugaagauguucgacgccuacgucaacaccuucagcuccaccuucaacgugcccauggagaagcugaagacccugguggccacggcggaggccgagcucgccaagaacgucagccuggacaacgugcuguccaccuucaucagcgccgcgcgccagggguucguggacuccgacgucgagaccaaggacgugguggagugccucaagcugagccaccaguccgacaucgaggucaccggcgacagcugcaacaacuacaugcugacguacaacaagguggagaacaugaccccgcgggaccucggggccugcaucgacugcuccgcccgccacaucaacgcccagguggccaagagccacaacaucgcgcugaucuggaacgucaaggacuucaugucccugagcgagcagcuccggaagcagauccgcuccgccgccaagaagaacaaccugcccuucaagcugaccugcgccaccacgcgccagguggugaacgucgugaccaccaagaucgcccucaagggcgggugaggacuagucccuguucccagagcccacuuuuuuuucuuuuuuugaaauaaaauagccugucuuucagaucucaaaggcucuuuucagagccaccaaaaaaaaaaaaaaaaaaaaaaaaaaaaaaaaaaaaaaaaaaaaaaaaaaaaaaaaaaaaaaaaaaaaaaaaaaaaaaaaaaaaaaaaaaaaaaaaaaaaa

SEQ ID NO: 19577 - RNA, 6113 nt, Artificial Sequence
  SARS-CoV-2__MT873208.1__non-structural protein 3 (NSP3) mRNA gc
aggagagucccgcagucggcguccagcggcucugcuuguucgugugugugucguugcaggccuuauucaagcuuaccauggcccccaccaaggugaccuucggcgacgacacggucaucgaggugcagggguacaagagcgugaacaucaccuucgagcuggacgagcgcaucgacaagguccucaacgagaagugcuccgccuacaccguggagcugggcaccgaggugaacgaguucgcgugcgucguggccgacgccgugaucaagacgcugcagccggucagcgagcuccugaccccccuggggaucgaccucgacgagugguccauggccaccuacuaccuguucgacgagagcggcgaguucaagcuggccucccacauguacugcagcuucuacccccccgacgaggacgaggaggagggggacugcgaggaggaggaguucgagccguccacccaguacgaguacggcacggaggacgacuaccagggcaagccccucgaguucggggcgaccagcgccgcccugcagcccgaggaggagcaggaggaggacuggcuggacgacgacucccagcagaccgugggccagcaggacgggagcgaggacaaccagaccacgaccauccagaccaucgccgaggugcagccccagcucgagauggagcugaccccggucgugcagacgaucgaggugaacuccuucagcggcuaccugaagcucaccgacaacgucuacaucaagaacgcggacaucguggaggaggccaagaaggugaagcccaccgucguggugaacgccgccaacgucuaccugaagcacgggggcggcguggccggggcgcugaacaaggccaccaacaacgccaugcagguggaguccgacgacuacaucgccacgaacggcccccucaaggucgggggcagcugcgugcuguccggccacaaccuggccaagcacugccuccacgucguggggcccaacgugaacaagggcgaggacauccagcugcugaagagcgcguacgagaacuucaaccagcacgagguccuccuggccccgcugcucuccgccgggaucuucggcgccgaccccauccacagccugcgggugugcguggacaccguccgcaccaacguguaccuggccguguucgacaagaaccucuacgacaagcuggucuccagcuuccuggagaugaagagcgagaagcagguggagcagaagaucgcggagauccccaaggaggaggugaagcccuucaucaccgaguccaagccgagcgucgagcagcggaagcaggacgacaagaagaucaaggccugcguggaggaggugacgaccacccucgaggagaccaaguuccugacggagaaccugcuccuguacaucgacaucaacgggaaccugcaccccgacuccgccacccucgucagcgacaucgacaucaccuuccugaagaaggacgcccccuacaucgugggcgacgugguccaggagggcgugcugaccgccguggucauccccacgaagaaggcggggggcaccaccgagaugcucgccaaggcccugcgcaaggugccgaccgacaacuacaucacgaccuaccccgggcagggccugaacggguacaccguggaggaggccaagaccguccucaagaagugcaaguccgcguucuacauccugcccagcaucaucuccaacgagaagcaggagauccugggcaccgugagcuggaaccuccgggagaugcuggcccacgccgaggagacgcgcaagcugaugcccgugugcgucgagaccaaggccaucguguccaccauccagcggaaguacaagggcaucaagauccaggaggggguggucgacuacggcgcccgcuucuacuucuacaccagcaagacgaccguggcgucccugaucaacacccucaacgaccugaacgagacccuggugacgaugccgcucggguacgucacccacggccugaaccuggaggaggccgcccgguacaugcgcagccucaaggugcccgccaccguguccgucagcucccccgacgccgugaccgcguacaacggguaccugacgagcuccagcaagacccccgaggagcacuucaucgagaccaucucccuggccggcagcuacaaggacuggagcuacuccggccagagcacccagcucgggaucgaguuccugaagcggggcgacaaguccguguacuacacgagcaacccgaccaccuuccaccuggacggggaggucaucaccuucgacaaccucaagacgcugcugucccuccgcgaggugcggaccaucaagguguucaccaccgucgacaacaucaaccugcacacgcaggugguggacaugagcaugaccuacggccagcaguucggccccaccuaccuggacggggccgacgucaccaagaucaagccccacaacucccacgagggcaagacguucuacgugcucccgaacgacgacacccugcgcguggaggccuucgaguacuaccacaccaccgaccccagcuuccuggggcgguacauguccgcccucaaccacacgaagaaguggaaguacccccaggucaacggccugaccagcaucaagugggcggacaacaacugcuaccuggccaccgcccuccugacccugcagcagaucgagcucaaguucaaccccccggcccugcaggacgcguacuaccgcgcccgggccggggaggccgccaacuucugcgcgcugauccucgccuacugcaacaagacggugggcgagcugggcgacgugcgcgagaccauguccuaccuguuccagcacgccaaccucgacagcugcaagcggguccugaacguggucugcaagaccugcgggcagcagcagaccacccugaagggcguggaggccgugauguacauggggacgcucuccuacgagcaguucaagaagggcguccagauccccugcaccugcgggaagcaggccaccaaguaccuggugcagcaggagagccccuucgugaugauguccgcgcccccggcccaguacgagcugaagcacggcaccuucacgugcgccagcgaguacaccggcaacuaccagugcgggcacuacaagcacaucaccuccaaggagacccucuacugcaucgacggcgcccugcugacgaagagcagcgaguacaaggggcccaucaccgacgucuucuacaaggagaacuccuacaccaccacgaucaagcccgugaccuacaagcucgacggcguggucugcaccgagaucgaccccaagcuggacaacuacuacaagaaggacaacagcuacuucaccgagcagccgaucgaccuggugcccaaccagcccuaccccaacgccuccuucgacaacuucaaguucgugugcgacaacaucaaguucgcggacgaccucaaccagcugacgggguacaagaagccggccagccgcgagcugaaggucaccuucuuccccgaccucaacggcgacgugguggccaucgacuacaagcacuacacccccuccuucaagaagggcgccaagcugcugcacaagcccaucgucuggcacgugaacaacgcgaccaacaaggccacguacaagccgaacaccuggugcauccggugccucuggagcaccaagcccguggagaccuccaacagcuucgacguccugaaguccgaggacgcccaggggauggacaaccuggccugcgaggaccucaagcccgugagcgaggagguggucgagaaccccacgauccagaaggacgugcuggagugcaacgugaagaccaccgaggucgugggcgacaucauccugaagccggccaacaacucccucaagaucaccgaggagguggggcacacggaccugauggcggccuacgucgacaacagcucccugaccaucaagaagcccaacgagcucagccgcgugcugggccugaagacccucgccacccacgggcuggccgccgugaacuccguccccugggacacgaucgcgaacuacgccaagccguuccugaacaagguggugagcaccaccaccaacaucgucacgcgcugccucaaccgggugugcaccaacuacaugcccuacuucuucacccugcugcuccagcugugcaccuucacccgcuccacgaacagccggaucaaggccuccaugcccaccaccaucgccaagaacaccgugaagagcgucggcaaguucugccuggaggccagcuucaacuaccucaagucccccaacuucagcaagcugaucaacaucaucaucugguuccugcuccuguccgugugccugggcagccucaucuacuccacggcggcccugggggugcugaugagcaaccucggcaugccguccuacugcaccggguaccgcgagggcuaccugaacagcaccaacgucaccaucgccacguacugcaccggcuccauccccugcagcgugugccuguccgggcucgacagccuggacaccuaccccucccuggagaccauccagaucacgaucagcuccuucaagugggaccucaccgccuucggccugguggccgagugguuccuggcguacauccucuucacccgguucuucuacguccuggggcuggccgccaucaugcagcucuucuucagcuacuucgccgugcacuucaucuccaacagcuggcugauguggcugaucaucaaccuggugcagauggcgcccaucuccgccaugguccgcauguacaucuucuucgccagcuucuacuacguguggaagagcuacgugcacgucguggacggcugcaacuccagcaccugcaugaugugcuacaagcggaaccgcgccacgcggguggagugcaccaccaucgucaacggggugcgccgguccuucuacgucuacgccaacggcggcaagggguucugcaagcuccacaacuggaacugcgugaacugcgacaccuucugcgcgggcagcacguucaucuccgacgagguggcccgcgaccugagccugcaguucaagcggccgaucaaccccaccgaccaguccagcuacaucgucgacuccgugaccgugaagaacgggagcauccaccucuacuucgacaaggccggccagaagaccuacgagcgccacucccugagccacuucgucaaccuggacaaccuccgggccaacaacacgaaggggucccugcccaucaacgugaucguguucgacggcaagagcaagugcgaggaguccagcgccaaguccgcgagcgucuacuacucccagcugaugugccagcccauccuccugcuggaccaggcccucgugagcgacgugggcgacagcgccgaggucgccgugaagauguucgacgccuacgugaacaccuucuccagcaccuucaacgucccgauggagaagcugaagacccugguggcgacggccgaggccgagcucgccaagaacgugucccuggacaacguccugagcaccuucaucuccgcggcccgccagggguucguggacagcgacguggagaccaaggacgucguggagugccucaagcugucccaccagagcgacaucgaggugaccggcgacuccugcaacaacuacaugcugacguacaacaaggucgagaacaugaccccccgggaccucggggccugcaucgacugcagcgcccgccacaucaacgcccagguggcgaagucccacaacaucgcccugaucuggaacgugaaggacuucaugagccuguccgagcagcuccggaagcagauccgcagcgccgccaagaagaacaaccugcccuucaagcugaccugcgccaccacgcgccaggucgugaacguggucaccaccaagaucgcgcucaagggcgggugaggacuagucccuguucccagagcccacuuuuuuuucuuuuuuugaaauaaaauagccugucuuucagaucucaaaggcucuuuucagagccaccaaaaaaaaaaaaaaaaaaaaaaaaaaaaaaaaaaaaaaaaaaaaaaaaaaaaaaaaaaaaaaaaaaaaaaaaaaaaaaaaaaaaaaaaaaaaaaaaaaaaa

SEQ ID NO: 19578 - RNA, 6113 nt, Artificial Sequence
  SARS-CoV-2__MT873210.1__non-structural protein 3 (NSP3) mRNA gc
aggagagucccgcagucggcguccagcggcucugcuuguucgugugugugucguugcaggccuuauucaagcuuaccauggcccccaccaaggugaccuucggcgacgacacggucaucgaggugcagggguacaagagcgugaacaucaccuucgagcuggacgagcgcaucgacaagguccucaacgagaagugcuccgccuacaccguggagcugggcaccgaggugaacgaguucgcgugcgucguggccgacgccgugaucaagacgcugcagccggucagcgagcuccugaccccccuggggaucgaccucgacgagugguccauggccaccuacuaccuguucgacgagagcggcgaguucaagcuggccucccacauguacugcagcuucuacccccccgacgaggacgaggaggagggggacugcgaggaggaggaguucgagccguccacccaguacgaguacggcacggaggacgacuaccagggcaagccccucgaguucggggcgaccagcgccgcccugcagcccgaggaggagcaggaggaggacuggcuggacgacgacucccagcagaccgugggccagcaggacgggagcgaggacaaccagaccacgaccauccagaccaucguggagguccagccccagcucgagauggagcugaccccgguggugcagacgaucgaggucaacuccuucagcggcuaccugaagcucaccgacaacguguacaucaagaacgccgacaucguggaggaggcgaagaaggucaagcccaccgugguggucaacgccgccaacguguaccugaagcacgggggcggcguggccggggcccugaacaaggcgaccaacaacgccaugcaggucgaguccgacgacuacaucgccacgaacggcccccucaagguggggggcagcugcguccuguccggccacaaccuggccaagcacugccuccacgugguggggcccaacgucaacaagggcgaggacauccagcugcugaagagcgccuacgagaacuucaaccagcacgaggugcuccuggcgccgcugcucuccgccgggaucuucggcgccgaccccauccacagccugcgggugugcgucgacaccgugcgcaccaacguguaccuggccgucuucgacaagaaccucuacgacaagcugguguccagcuuccuggagaugaagagcgagaagcagguggagcagaagaucgccgagauccccaaggacgaggucaagcccuucaucaccgaguccaagccgagcguggagcagcggaagcaggacgacaagaagaucaaggcgugcguggaggaggucacgaccacccucgaggagaccaaguuccugacggagaaccugcuccuguacaucgacaucaacgggaaccugcaccccgacuccgccacccucgugagcgacaucgacaucaccuuccugaagaaggacgcccccuacaucgugggcgacgucgugcaggagggcgugcugaccgccgucgugauccccacgaagaaggccgggggcaccaccgagaugcucgcgaaggcccugcgcaaggugccgaccgacaacuacaucacgaccuaccccgggcagggccugaacggguacaccgucgaggaggccaagaccgugcucaagaagugcaaguccgccuucuacauccugcccagcaucaucuccaacgagaagcaggagauccugggcaccgugagcuggaaccuccgggagaugcuggcgcacgccgaggagacgcgcaagcugaugcccgucugcguggagaccaaggccaucguguccaccauccagcggaaguacaagggcaucaagauccaggagggggucguggacuacggcgcccgcuucuacuucuacaccagcaagacgaccguggccucccugaucaacacccucaacgaccugaacgagacccuggucacgaugccgcucggguacgugacccacggccugaaccuggaggaggcggcccgguacaugcgcagccucaaggugcccgccaccgucuccgugagcucccccgacgccgugaccgccuacaacggguaccugacgagcuccagcaagacccccgaggagcacuucaucgagaccaucucccuggcgggcagcuacaaggacuggagcuacuccggccagagcacccagcucgggaucgaguuccugaagcggggcgacaaguccgucuacuacacgagcaacccgaccaccuuccaccuggacggggaggugaucaccuucgacaaccucaagacgcugcugucccuccgcgaggugcggaccaucaaggucuucaccaccguggacaacaucaaccugcacacgcagguggucgacaugagcaugaccuacggccagcaguucggccccaccuaccuggacggggccgacgugaccaagaucaagccccacaacucccacgagggcaagacguucuacgugcucccgaacgacgacacccugcgcgucgaggccuucgaguacuaccacaccaccgaccccagcuuccuggggcgguacauguccgcccucaaccacacgaagaaguggaaguacccccaggugaacggccugaccagcaucaagugggccgacaacaacugcuaccuggcgaccgcccuccugacccugcagcagaucgagcucaaguucaaccccccggcccugcaggacgccuacuaccgcgcgcgggccggggaggccgccaacuucugcgcccugauccucgcguacugcaacaagacggugggcgagcugggcgacguccgcgagaccauguccuaccuguuccagcacgccaaccucgacagcugcaagcgggugcugaacgucgugugcaagaccugcgggcagcagcagaccacccugaagggcguggaggccgucauguacauggggacgcucuccuacgagcaguucaagaagggcgugcagauccccugcaccugcgggaagcaggccaccaaguaccuggugcagcaggagagccccuucgucaugauguccgcccccccggcgcaguacgagcugaagcacggcaccuucacgugcgccagcgaguacaccggcaacuaccagugcgggcacuacaagcacaucaccuccaaggagacccucuacugcaucgacggcgcccugcugacgaagagcagcgaguacaaggggcccaucaccgacguguucuacaaggagaacuccuacaccaccacgaucaagcccgugaccuacaagcucgacggcgucgugugcaccgagaucgaccccaagcuggacaacuacuacaagaaggacaacagcuacuucaccgagcagccgaucgaccuggugcccaaccagcccuaccccaacgccuccuucgacaacuucaaguucgucugcgacaacaucaaguucgccgacgaccucaaccagcugacgggguacaagaagccggcgagccgcgagcugaaggugaccuucuuccccgaccucaacggcgacguggucgccaucgacuacaagcacuacacccccuccuucaagaagggcgccaagcugcugcacaagcccaucguguggcacgugaacaacgccaccaacaaggcgacguacaagccgaacaccuggugcauccggugccucuggagcaccaagcccgucgagaccuccaacagcuucgacgugcugaaguccgaggacgcccaggggauggacaaccuggccugcgaggaccucaagcccgugagcgaggaggucguggagaaccccacgauccagaaggacgugcuggagugcaacgucaagaccaccgagguggugggcgacaucauccugaagccggccaacaacucccucaagaucaccgaggaggucgggcacacggaccugauggccgcguacguggacaacagcucccugaccaucaagaagcccaacgagcucagccgcgugcugggccugaagacccucgccacccacgggcuggccgccgucaacuccgugcccugggacacgaucgccaacuacgcgaagccguuccugaacaagguggucagcaccaccaccaacaucgugacgcgcugccucaaccgggugugcaccaacuacaugcccuacuucuucacccugcugcuccagcugugcaccuucacccgcuccacgaacagccggaucaaggccuccaugcccaccaccaucgccaagaacaccgucaagagcgugggcaaguucugccuggaggccagcuucaacuaccucaagucccccaacuucagcaagcugaucaacaucaucaucugguuccugcuccuguccgugugccugggcagccucaucuacuccacggccgcgcuggggguccugaugagcaaccucggcaugccguccuacugcaccggguaccgcgagggcuaccugaacagcaccaacgugaccaucgccacguacugcaccggcuccauccccugcagcgugugccuguccgggcucgacagccuggacaccuaccccucccuggagaccauccagaucacgaucagcuccuucaagugggaccucaccgccuucggccuggucgccgagugguuccuggccuacauccucuucacccgguucuucuacgugcuggggcuggcggccaucaugcagcucuucuucagcuacuucgccgugcacuucaucuccaacagcuggcugauguggcugaucaucaaccugguccagauggcccccaucuccgcgauggugcgcauguacaucuucuucgccagcuucuacuacguguggaagagcuacguccacgugguggacggcugcaacuccagcaccugcaugaugugcuacaagcggaaccgcgccacgcgggucgagugcaccaccaucgugaacgggguccgccgguccuucuacguguacgccaacggcggcaagggguucugcaagcuccacaacuggaacugcgugaacugcgacaccuucugcgccggcagcacguucaucuccgacgaggucgcgcgcgaccugagccugcaguucaagcggccgaucaaccccaccgaccaguccagcuacaucguggacuccgugaccgucaagaacgggagcauccaccucuacuucgacaaggccggccagaagaccuacgagcgccacucccugagccacuucgugaaccuggacaaccuccgggccaacaacacgaaggggucccugcccaucaacgugaucgucuucgacggcaagagcaagugcgaggaguccagcgccaaguccgccagcguguacuacucccagcugaugugccagcccauccuccugcuggaccaggcgcucgugagcgacgucggcgacagcgccgagguggccgugaagauguucgacgccuacgucaacaccuucuccagcaccuucaacgugccgauggagaagcugaagacccugguggccacggcggaggccgagcucgccaagaacgucucccuggacaacgugcugagcaccuucaucuccgccgcgcgccagggguucguggacagcgacgucgagaccaaggacgugguggagugccucaagcugucccaccagagcgacaucgaggucaccggcgacuccugcaacaacuacaugcugacguacaacaagguggagaacaugaccccccgggaccucggggccugcaucgacugcagcgcccgccacaucaacgcccagguggccaagucccacaacaucgcgcugaucuggaacgucaaggacuucaugagccuguccgagcagcuccggaagcagauccgcagcgccgccaagaagaacaaccugcccuucaagcugaccugcgccaccacgcgccagguggugaacgucgugaccaccaagaucgcccucaagggcgggugaggacuagucccuguucccagagcccacuuuuuuuucuuuuuuugaaauaaaauagccugucuuucagaucucaaaggcucuuuucagagccaccaaaaaaaaaaaaaaaaaaaaaaaaaaaaaaaaaaaaaaaaaaaaaaaaaaaaaaaaaaaaaaaaaaaaaaaaaaaaaaaaaaaaaaaaaaaaaaaaaaaaa

SEQ ID NO: 19579 - RNA, 6113 nt, Artificial Sequence
  SARS-CoV-2__MT873211.1__non-structural protein 3 (NSP3) mRNA gc
aggagagucccgcagucggcguccagcggcucugcuuguucgugugugugucguugcaggccuuauucaagcuuaccauggcccccaccaaggugaccuucggcgacgacacggucaucgaggugcagggguacaagagcgugaacaucaccuucgagcuggacgagcgcaucgacaagguccucaacgagaagugcuccgccuacaccguggagcugggcaccgaggugaacgaguucgcgugcgucguggccgacgccgugaucaagacgcugcagccggucagcgagcuccugaccccccuggggaucgaccucgacgagugguccauggccaccuacuaccuguucgacgagagcggcgaguucaagcuggccucccacauguacugcagcuucuacccccccgacgaggacgaggaggagggggacugcgaggaggaggaguucgagccguccacccaguacgaguacggcacggaggacgacuaccagggcaagccccucgaguucggggcgaccagcgccgcccugcagcccgaggaggagcaggaggaggacuggcuggacgacgacucccagcagaccgugggccagcaggacgggagcgaggacaaccagaccaucacgauccagaccaucguggagguccagccccagcucgagauggagcugaccccgguggugcagaccaucgaggucaacuccuucagcggcuaccugaagcucacggacaacguguacaucaagaacgccgacaucguggaggaggcgaagaaggucaagcccaccgugguggucaacgccgccaacguguaccugaagcacgggggcggcguggccggggcccugaacaaggcgaccaacaacgccaugcaggucgaguccgacgacuacaucgccaccaacggcccccucaagguggggggcagcugcguccuguccggccacaaccuggccaagcacugccuccacgugguggggcccaacgucaacaagggcgaggacauccagcugcugaagagcgccuacgagaacuucaaccagcacgaggugcuccuggcgccgcugcucuccgccgggaucuucggcgccgaccccauccacagccugcgggugugcgucgacacggugcgcaccaacguguaccuggccgucuucgacaagaaccucuacgacaagcugguguccagcuuccuggagaugaagagcgagaagcagguggagcagaagaucgccgagauccccaaggaggaggucaagcccuucaucaccgaguccaagccgagcguggagcagcggaagcaggacgacaagaagaucaaggcgugcguggaggaggucaccacgacccucgaggagaccaaguuccugaccgagaaccugcuccuguacaucgacaucaacgggaaccugcaccccgacuccgccacgcucgugagcgacaucgacaucaccuuccugaagaaggacgcccccuacaucgugggcgacgucgugcaggagggcgugcugaccgccgucgugauccccaccaagaaggccgggggcacgaccgagaugcucgcgaaggcccugcgcaaggugccgaccgacaacuacaucaccacguaccccgggcagggccugaacggguacaccgucgaggaggccaagaccgugcucaagaagugcaaguccgccuucuacauccugcccagcaucaucuccaacgagaagcaggagauccugggcaccgugagcuggaaccuccgggagaugcuggcgcacgccgaggagacccgcaagcugaugcccgucugcguggagacgaaggccaucguguccaccauccagcggaaguacaagggcaucaagauccaggagggggucguggacuacggcgcccgcuucuacuucuacaccagcaagaccacgguggccucccugaucaacacccucaacgaccugaacgagacccuggucaccaugccgcucggguacgugacgcacggccugaaccuggaggaggcggcccgguacaugcgcagccucaaggugcccgccaccgucuccgugagcucccccgacgccgugaccgccuacaacggguaccugaccagcuccagcaagacgcccgaggagcacuucaucgagaccaucucccuggcgggcagcuacaaggacuggagcuacuccggccagagcacccagcucgggaucgaguuccugaagcggggcgacaaguccgucuacuacaccagcaacccgacgaccuuccaccuggacggggaggugaucaccuucgacaaccucaagacccugcugucccuccgcgaggugcggacgaucaaggucuucaccaccguggacaacaucaaccugcacacccagguggucgacaugagcaugacguacggccagcaguucggccccaccuaccuggacggggccgacgugaccaagaucaagccccacaacucccacgagggcaagaccuucuacgugcucccgaacgacgacacgcugcgcgucgaggccuucgaguacuaccacaccaccgaccccagcuuccuggggcgguacauguccgcccucaaccacaccaagaaguggaaguacccccaggugaacggccugacgagcaucaagugggccgacaacaacugcuaccuggcgaccgcccuccugacccugcagcagaucgagcucaaguucaaccccccggcccugcaggacgccuacuaccgcgcgcgggccggggaggccgccaacuucugcgcccugauccucgcguacugcaacaagaccgugggcgagcugggcgacguccgcgagacgauguccuaccuguuccagcacgccaaccucgacagcugcaagcgggugcugaacgucgugugcaagaccugcgggcagcagcagaccacccugaagggcguggaggccgucauguacauggggacccucuccuacgagcaguucaagaagggcgugcagauccccugcacgugcgggaagcaggccaccaaguaccuggugcagcaggagagccccuucgucaugauguccgcccccccggcgcaguacgagcugaagcacggcaccuucaccugcgccagcgaguacacgggcaacuaccagugcgggcacuacaagcacaucaccuccaaggagacccucuacugcaucgacggcgcccugcugaccaagagcagcgaguacaaggggcccaucacggacguguucuacaaggagaacuccuacaccaccaccaucaagcccgugacguacaagcucgacggcgucgugugcaccgagaucgaccccaagcuggacaacuacuacaagaaggacaacagcuacuucaccgagcagccgaucgaccuggugcccaaccagcccuaccccaacgccuccuucgacaacuucaaguucgucugcgacaacaucaaguucgccgacgaccucaaccagcugaccggguacaagaagccggcgagccgcgagcugaaggugacguucuuccccgaccucaacggcgacguggucgccaucgacuacaagcacuacacccccuccuucaagaagggcgccaagcugcugcacaagcccaucguguggcacgugaacaacgccaccaacaaggcgaccuacaagccgaacacguggugcauccggugccucuggagcaccaagcccgucgagaccuccaacagcuucgacgugcugaaguccgaggacgcccaggggauggacaaccuggccugcgaggaccucaagcccgugagcgaggaggucguggagaaccccaccauccagaaggacgugcuggagugcaacgucaagacgaccgagguggugggcgacaucauccugaagccggccaacaacucccucaagaucaccgaggaggucgggcacaccgaccugauggccgcguacguggacaacagcucccugacgaucaagaagcccaacgagcucagccgcgugcugggccugaagacccucgccacccacgggcuggccgccgucaacuccgugcccugggacaccaucgccaacuacgcgaagccguuccugaacaagguggucagcacgaccaccaacaucgugacccgcugccucaaccgggugugcacgaacuacaugcccuacuucuucacccugcugcuccagcugugcaccuucacccgcuccaccaacagccggaucaaggccuccaugcccacgaccaucgccaagaacaccgucaagagcgugggcaaguucugccuggaggccagcuucaacuaccucaagucccccaacuucagcaagcugaucaacaucaucaucugguuccugcuccuguccgugugccugggcagccucaucuacuccaccgccgcgcuggggguccugaugagcaaccucggcaugccguccuacugcacgggguaccgcgagggcuaccugaacagcaccaacgugaccaucgccaccuacugcacgggcuccauccccugcagcgugugccuguccgggcucgacagccuggacaccuaccccucccuggagaccauccagaucaccaucagcuccuucaagugggaccucacggccuucggccuggucgccgagugguuccuggccuacauccucuucacccgguucuucuacgugcuggggcuggcggccaucaugcagcucuucuucagcuacuucgccgugcacuucaucuccaacagcuggcugauguggcugaucaucaaccugguccagauggcccccaucuccgcgauggugcgcauguacaucuucuucgccagcuucuacuacguguggaagagcuacguccacgugguggacggcugcaacuccagcaccugcaugaugugcuacaagcggaaccgcgccacccgggucgagugcacgaccaucgugaacgggguccgccgguccuucuacguguacgccaacggcggcaagggguucugcaagcuccacaacuggaacugcgugaacugcgacaccuucugcgccggcagcaccuucaucuccgacgaggucgcgcgcgaccugagccugcaguucaagcggccgaucaaccccacggaccaguccagcuacaucguggacuccgugaccgucaagaacgggagcauccaccucuacuucgacaaggccggccagaagaccuacgagcgccacucccugagccacuucgugaaccuggacaaccuccgggccaacaacaccaaggggucccugcccaucaacgugaucgucuucgacggcaagagcaagugcgaggaguccagcgccaaguccgccagcguguacuacucccagcugaugugccagcccauccuccugcuggaccaggcgcucgugagcgacgucggcgacagcgccgagguggccgugaagauguucgacgccuacgucaacacguucuccagcaccuucaacgugccgauggagaagcugaagacccugguggccaccgcggaggccgagcucgccaagaacgucucccuggacaacgugcugagcacguucaucuccgccgcgcgccagggguucguggacagcgacgucgagaccaaggacgugguggagugccucaagcugucccaccagagcgacaucgaggucaccggcgacuccugcaacaacuacaugcugaccuacaacaagguggagaacaugacgccccgggaccucggggccugcaucgacugcagcgcccgccacaucaacgcccagguggccaagucccacaacaucgcgcugaucuggaacgucaaggacuucaugagccuguccgagcagcuccggaagcagauccgcagcgccgccaagaagaacaaccugcccuucaagcugaccugcgccaccacccgccagguggugaacgucgugacgaccaagaucgcccucaagggcgggugaggacuagucccuguucccagagcccacuuuuuuuucuuuuuuugaaauaaaauagccugucuuucagaucucaaaggcucuuuucagagccaccaaaaaaaaaaaaaaaaaaaaaaaaaaaaaaaaaaaaaaaaaaaaaaaaaaaaaaaaaaaaaaaaaaaaaaaaaaaaaaaaaaaaaaaaaaaaaaaaaaaaa

SEQ ID NO: 19580 - RNA, 6113 nt, Artificial Sequence
  SARS-CoV-2__MT873238.1__non-structural protein 3 (NSP3) mRNA gc
aggagagucccgcagucggcguccagcggcucugcuuguucgugugugugucguugcaggccuuauucaagcuuaccauggcccccaccaaggugaccuucggcgacgacacggucaucgaggugcagggguacaagagcgugaacaucaccuucgagcuggacgagcgcaucgacaagguccucaacgagaagugcuccgccuacaccguggagcugggcaccgaggugaacgaguucgcgugcgucguggccgacgccgugaucaagacgcugcagccggucagcgagcuccugaccccccuggggaucgaccucgacgagugguccauggccaccuacuaccuguucgacgagagcggcgaguucaagcuggccucccacauguacugcagcuucuacccccccgacgaggacgaggaggagggggacugcgaggaggaggaguucgagccguccacccaguacgaguacggcacggaggacgacuaccagggcaagccccucgaguucggggcgaccagcgccgcccugcagcccgaggaggagcaggaggaggacuggcuggacgacgacucccagcagaccgugggccagcaggacgggagcgaggacaaccagaccacgaccauccagaccaucguggagguccagccccagcucgagauggagcugaccccgguggugcagacgaucgaggucaacuccuucagcggcuaccugaagcucaccgacaacguguacaucaagaacguggacaucgucgaggaggccaagaaggugaagcccaccguggucgugaacgcggccaacguguaccugaagcacgggggcggcgucgccggggcccugaacaaggccaccaacaacgcgaugcagguggaguccgacgacuacaucgccacgaacggcccccucaaggucgggggcagcugcgugcuguccggccacaaccuggccaagcacugccuccacguggucgggcccaacgugaacaagggcgaggacauccagcugcugaagagcgccuacgagaacuucaaccagcacgaggugcuccuggccccgcugcucuccgcggggaucuucggcgccgaccccauccacagccugcgggucugcguggacaccgugcgcaccaacgucuaccuggccguguucgacaagaaccucuacgacaagcugguguccagcuuccuggagaugaagagcgagaagcaggucgagcagaagaucgccgagauccccaaggaggaggugaagcccuucaucaccgaguccaagccgagcguggagcagcggaagcaggacgacaagaagaucaaggccugcgucgaggaggugacgaccacccucgaggagaccaaguuccugacggagaaccugcuccuguacaucgacaucaacgggaaccugcaccccgacuccgcgacccucgugagcgacaucgacaucaccuuccugaagaaggacgcccccuacaucgucggcgacguggugcaggagggcguccugaccgccguggugauccccacgaagaaggccgggggcaccaccgagaugcucgccaaggcgcugcgcaaggucccgaccgacaacuacaucacgaccuaccccgggcagggccugaacggguacaccguggaggaggccaagaccgugcucaagaagugcaaguccgccuucuacauccugcccagcaucaucuccaacgagaagcaggagauccugggcaccgucagcuggaaccuccgggagaugcuggcccacgcggaggagacgcgcaagcugaugcccgugugcguggagaccaaggccaucgucuccaccauccagcggaaguacaagggcaucaagauccaggagggggugguggacuacggcgcccgcuucuacuucuacaccagcaagacgaccgucgccucccugaucaacacccucaacgaccugaacgagacccuggugacgaugccgcucggguacgugacccacggccugaaccuggaggaggccgcgcgguacaugcgcagccucaagguccccgccaccguguccgugagcucccccgacgccgucaccgccuacaacggguaccugacgagcuccagcaagacccccgaggagcacuucaucgagaccaucucccuggccggcagcuacaaggacuggagcuacuccggccagagcacccagcucgggaucgaguuccugaagcggggcgacaaguccguguacuacacgagcaacccgaccaccuuccaccuggacggggaggugaucaccuucgacaaccucaagacgcugcugucccuccgcgagguccggaccaucaagguguucaccaccguggacaacaucaaccugcacacgcaggucguggacaugagcaugaccuacggccagcaguucggccccaccuaccuggacggggcggacgugaccaagaucaagccccacaacucccacgagggcaagacguucuacguccucccgaacgacgacacccugcgcguggaggccuucgaguacuaccacaccaccgaccccagcuuccuggggcgguacauguccgcccucaaccacacgaagaaguggaaguacccccaggugaacggccugaccagcaucaagugggccgacaacaacugcuaccuggccaccgcgcuccugacccugcagcagaucgagcucaaguucaaccccccggcccugcaggacgccuacuaccgcgcccgggcgggggaggccgccaacuucugcgcccugauccucgccuacugcaacaagacggucggcgagcugggcgacgugcgcgagaccauguccuaccuguuccagcacgcgaaccucgacagcugcaagcggguccugaacguggugugcaagaccugcgggcagcagcagaccacccugaagggcgucgaggccgugauguacauggggacgcucuccuacgagcaguucaagaagggcgugcagauccccugcaccugcgggaagcaggccaccaaguaccugguccagcaggagagccccuucgugaugauguccgcccccccggcccaguacgagcugaagcacggcaccuucacgugcgcgagcgaguacaccggcaacuaccagugcgggcacuacaagcacaucaccuccaaggagacccucuacugcaucgacggcgcccugcugacgaagagcagcgaguacaaggggcccaucaccgacguguucuacaaggagaacuccuacaccaccacgaucaagcccgucaccuacaagcucgacggcguggugugcaccgagaucgaccccaagcuggacaacuacuacaagaaggacaacagcuacuucaccgagcagccgaucgaccugguccccaaccagcccuaccccaacgccuccuucgacaacuucaaguucgugugcgacaacaucaaguucgccgacgaccucaaccagcugacgggguacaagaagccggccagccgcgagcugaaggugaccuucuuccccgaccucaacggcgacgucguggcgaucgacuacaagcacuacacccccuccuucaagaagggcgccaagcugcugcacaagcccaucguguggcacgucaacaacgccaccaacaaggccacguacaagccgaacaccuggugcauccggugccucuggagcaccaagcccguggagaccuccaacagcuucgacgugcugaaguccgaggacgcgcaggggauggacaaccuggccugcgaggaccucaagcccgucagcgaggaggugguggagaaccccacgauccagaaggacguccuggagugcaacgugaagaccaccgagguggucggcgacaucauccugaagccggccaacaacucccucaagaucaccgaggagguggggcacacggaccugauggccgccuacguggacaacagcucccugaccaucaagaagcccaacgagcucagccgcguccugggccugaagacccucgcgacccacgggcuggccgccgugaacuccgugcccugggacacgaucgccaacuacgccaagccguuccugaacaaggucgugagcaccaccaccaacaucgugacgcgcugccucaaccgggucugcaccaacuacaugcccuacuucuucacccugcugcuccagcugugcaccuucacccgcuccacgaacagccggaucaaggcguccaugcccaccaccaucgccaagaacaccgugaagagcgugggcaaguucugccuggaggccagcuucaacuaccucaagucccccaacuucagcaagcugaucaacaucaucaucugguuccugcuccuguccgucugccugggcagccucaucuacuccacggccgcccugggggugcugaugagcaaccucggcaugccguccuacugcaccggguaccgcgagggcuaccugaacagcaccaacgugaccaucgcgacguacugcaccggcuccauccccugcagcgucugccuguccgggcucgacagccuggacaccuaccccucccuggagaccauccagaucacgaucagcuccuucaagugggaccucaccgccuucggccugguggccgagugguuccuggccuacauccucuucacccgguucuucuacgugcuggggcuggccgcgaucaugcagcucuucuucagcuacuucgccguccacuucaucuccaacagcuggcugauguggcugaucaucaaccuggugcagauggcccccaucuccgccauggugcgcauguacaucuucuucgcgagcuucuacuacgucuggaagagcuacgugcacguggucgacggcugcaacuccagcaccugcaugaugugcuacaagcggaaccgcgccacgcggguggagugcaccaccaucgucaacggggugcgccgguccuucuacguguacgccaacggcggcaagggguucugcaagcuccacaacuggaacugcgucaacugcgacaccuucugcgccggcagcacguucaucuccgacgagguggcccgcgaccugagccugcaguucaagcggccgaucaaccccaccgaccaguccagcuacaucguggacuccgucaccgugaagaacgggagcauccaccucuacuucgacaaggcgggccagaagaccuacgagcgccacucccugagccacuucgugaaccuggacaaccuccgggccaacaacacgaaggggucccugcccaucaacgucaucguguucgacggcaagagcaagugcgaggaguccagcgccaaguccgccagcguguacuacucccagcugaugugccagcccauccuccugcuggaccaggcccucgucagcgacgugggcgacagcgcggagguggccgucaagauguucgacgccuacgugaacaccuucuccagcaccuucaacgugccgauggagaagcugaagacccuggucgccacggccgaggcggagcucgccaagaacgugucccuggacaacgugcugagcaccuucaucuccgccgcccgccagggguucgucgacagcgacguggagaccaaggacguggucgagugccucaagcugucccaccagagcgacaucgaggugaccggcgacuccugcaacaacuacaugcugacguacaacaagguggagaacaugaccccccgggaccucggggcgugcaucgacugcagcgcccgccacaucaacgcccaggucgccaagucccacaacaucgcccugaucuggaacgugaaggacuucaugagccuguccgagcagcuccggaagcagauccgcagcgcggccaagaagaacaaccugcccuucaagcugaccugcgccaccacgcgccagguggucaacguggugaccaccaagaucgcccucaagggcgggugaggacuagucccuguucccagagcccacuuuuuuuucuuuuuuugaaauaaaauagccugucuuucagaucucaaaggcucuuuucagagccaccaaaaaaaaaaaaaaaaaaaaaaaaaaaaaaaaaaaaaaaaaaaaaaaaaaaaaaaaaaaaaaaaaaaaaaaaaaaaaaaaaaaaaaaaaaaaaaaaaaaaa

SEQ ID NO: 19581 - RNA, 6113 nt, Artificial Sequence
  SARS-CoV-2__MT873239.1__non-structural protein 3 (NSP3) mRNA gc
aggagagucccgcagucggcguccagcggcucugcuuguucgugugugugucguugcaggccuuauucaagcuuaccauggcccccaccaaggugaccuucggcgacgacacggucaucgaggugcagggguacaagagcgugaacaucaccuucgagcuggacgagcgcaucgacaagguccucaacgagaagugcuccgccuacaccguggagcugggcaccgaggugaacgaguucgcgugcgucguggccgacgccgugaucaagacgcugcagccggucagcgagcuccugaccccccuggggaucgaccucgacgagugguccauggccaccuacuaccuguucgacgagagcggcgaguucaagcuggccucccacauguacugcagcuucuacccccccgacgaggacgaggaggagggggacugcgaggaggaggaguucgagccguccacccaguacgaguacggcacggaggacgacuaccagggcaagccccucgaguucggggcgaccagcgccgcccugcagcccgaggaggagcaggaggaggacuggcuggacgacgacucccagcagaccgugggccagcaggacgggagcgaggacaaccagaccacgaccauccagaccaucguggagguccagccccagcucgagauggagcugaccccgguggugcagacgaucgaggucaacuccuucagcggcuaccugaagcucaccgacaacguguacaucaagaacgccgacaucguggaggaggcgaagaaggucaagcccaccgugguggucaacgccgccaacguguaccugaagcacgggggcggcguggccggggcccugaacaaggcgaccaacaacgccaugcaggucgaguccgacgacuacaucgccacgaacggcccccucaagguggggggcagcugcguccuguccggccacaaccuggccaagcacugccuccacgugguggggcccaacgucaacaagggcgaggacauccagcugcugaagagcgccuacgagaacuucaaccagcacgaggugcuccuggcgccgcugcucuccgccgggaucuucggcgccgaccccauccacagccugcgggugugcgucgacaccgugcgcaccaacguguaccuggccgucuucgacaagaaccucuacgacaagcugguguccagcuuccuggagaugaagagcgagaagcagguggagcagaagaucgccgagauccccaaggaggaggucaagcccuucaucaccgaguccaagccgagcguggagcagcggaagcaggacgacaagaagaucaaggcgugcguggaggaggucacgaccacccucgaggagaccaaguuccugacggagaaccugcuccuguacaucgacaucaacgggaaccugcaccccgacuccgccacccucgugagcgacaucgacaucaccuuccugaagaaggacgcccccuacaucgugggcgacgucgugcaggagggcgugcugaccgccgucgugauccccacgaagaaggccgggggcaccaccgagaugcucgcgaaggcccugcgcaaggugccgaccgacaacuacaucacgaccuaccccgggcagggccugaacggguacaccgucgaggaggccaagaccgugcucaagaagugcaaguccgccuucuacauccugcccagcaucaucuccaacgagaagcaggagauccugggcaccgugagcuggaaccuccgggagaugcuggcgcacgccgaggagacgcgcaagcugaugcccgucugcguggagaccaaggccaucguguccaccauccagcggaaguacaagggcaucaagauccaggagggggucguggacuacggcgcccgcuucuacuucuacaccagcaagacgaccguggccucccugaucaacacccucaacgaccugaacgagacccuggucacgaugccgcucggguacgugacccacggccugaaccuggaggaggcggcccgguacaugcgcagccucaaggugcccgccaccgucuccgugagcucccccgacgccgugaccgccuacaacggguaccugacgagcuccagcaagacccccgaggagcacuucaucgagaccaucucccuggcgggcagcuacaaggacuggagcuacuccggccagagcacccagcucgggaucgaguuccugaagcggggcgacaaguccgucuacuacacgagcaacccgaccaccuuccaccuggacggggaggugaucaccuucgacaaccucaagacgcugcugucccuccgcgaggugcggaccaucaaggucuucaccaccguggacaacaucaaccugcacacgcagguggucgacaugagcaugaccuacggccagcaguucggccccaccuaccuggacggggccgacgugaccaagaucaagccccacaacucccacgagggcaagacguucuacgugcucccgaacgacgacacccugcgcgucgaggccuucgaguacuaccacaccaccgaccccagcuuccuggggcgguacauguccgcccucaaccacacgaagaaguggaaguacccccaggugaacggccugaccagcaucaagugggccgacaacaacugcuaccuggcgaccgcccuccugacccugcagcagaucgagcucaaguucaaccccccggcccugcaggacgccuacuaccgcgcgcgggccggggaggccgccaacuucugcgcccugauccucgcguacugcaacaagacggugggcgagcugggcgacguccgcgagaccauguccuaccuguuccagcacgccaaccucgacagcugcaagcgggugcugaacgucgugugcaagaccugcgggcagcagcagaccacccugaagggcguggaggccgucauguacauggggacgcucuccuacgagcaguucaagaagggcgugcagauccccugcaccugcgggaagcaggccaccaaguaccuggugcagcaggagagccccuucgucaugauguccgcccccccggcgcaguacgagcugaagcacggcaccuucacgugcgccagcgaguacaccggcaacuaccagugcgggcacuacaagcacaucaccuccaaggagacccucuacugcaucgacggcgcccugcugacgaagagcagcgaguacaaggggcccaucaccgacguguucuacaaggagaacuccuacaccaccacgaucaagcccgugaccuacaagcucgacggcgucgugugcaccgagaucgaccccaagcuggacaacuacuacaagaaggacaacagcuacuucaccgagcagccgaucgaccuggugcccaaccagcccuaccccaacgccuccuucgacaacuucaaguucgucugcgacaacaucaaguucgccgacgaccucaaccagcugacgggguacaagaagccggcgagccgcgagcugaaggugaccuucuuccccgaccucaacggcgacguggucgccaucgacuacaagcacuacacccccuccuucaagaagggcgccaagcugcugcacaagcccaucguguggcacgugaacaacgccaccaacaaggcgacguacaagccgaacaccuggugcauccggugccucuggagcaccaagcccgucgagaccuccaacagcuucgacgugcugaaguccgaggacgcccaggggauggacaaccuggccugcgaggaccucaagcccgugagcgaggaggucguggagaaccccacgauccagaaggacgugcuggagugcaacgucaagaccaccgagguggugggcgacaucauccugaagccggccaacaacucccucaagaucaccgaggaggucgggcacacggaccugauggccgcguacguggacaacagcucccugaccaucaagaagcccaacgagcucagccgcgugcugggccugaagacccucgccacccacgggcuggccgccgucaacuccgugcccugggacacgaucgccaacuacgcgaagccguuccugaacaagguggucagcaccaccaccaacaucgugacgcgcugccucaaccgggugugcaccaacuacaugcccuacuucuucacccugcugcuccagcugugcaccuucacccgcuccacgaacagccggaucaaggccuccaugcccaccaccaucgccaagaacaccgucaagagcgugggcaaguucugccuggaggccagcuucaacuaccucaagucccccaacuucagcaagcugaucaacaucaucaucugguuccugcuccuguccgugugccugggcagccucaucuacuccacggccgcgcuggggguccugaugagcaaccucggcaugccguccuacugcaccggguaccgcgagggcuaccugaacagcaccaacgugaccaucgccacguacugcaccggcuccauccccugcagcgugugccuguccgggcucgacagccuggacaccuaccccucccuggagaccauccagaucacgaucagcuccuucaagugggaccucaccgccuucggccuggucgccgagugguuccuggccuacauccucuucacccgguucuucuacgugcuggggcuggcggccaucaugcagcucuucuucagcuacuucgccgugcacuucaucuccaacagcuggcugauguggcugaucaucaaccugguccagauggcccccaucuccgcgauggugcgcauguacaucuucuucgccagcuucuacuacguguggaagagcuacguccacgugguggacggcugcaacuccagcaccugcaugaugugcuacaagcggaaccgcgccacgcgggucgagugcaccaccaucgugaacgggguccgccgguccuucuacguguacgccaacggcggcaagggguucugcaagcuccacaacuggaacugcgugaacugcgacaccuucugcgccggcagcacguucaucuccgacgaggucgcgcgcgaccugagccugcaguucaagcggccgaucaaccccaccgaccaguccagcuacaucguggacuccgugaccgucaagaacgggagcauccaccucuacuucgacaaggccggccagaagaccuacgagcgccacucccugagccacuucgugaaccuggacaaccuccgggccaacaacacgaaggggucccugcccaucaacgugaucgucuucgacggcaagagcaagugcgaggaguccagcgccaaguccgccagcguguacuacucccagcugaugugccagcccauccuccugcuggaccaggcgcucgugagcgacgucggcgacagcgccgagguggccgugaagauguucgacgccuacgucaacaccuucuccagcaccuucaacgugccgauggagaagcugaagacccugguggccacggcggaggccgagcucgccaagaacgucucccuggacaacgugcugagcaccuucaucuccgccgcgcgccagggguucguggacagcgacgucgagaccaaggacgugguggagugccucaagcugucccaccagagcgacaucgaggucaccggcgacuccugcaacaacuacaugcugacguacaacaagguggagaacaugaccccccgggaccucggggccugcaucgacugcagcgcccgccacaucaacgcccagguggccaagucccacaacaucguccugaucuggaacgugaaggacuucaugagccuguccgagcagcuccggaagcagauccgcagcgcggccaagaagaacaaccugcccuucaagcugaccugcgccaccacgcgccagguggucaacguggugaccaccaagaucgcccucaagggcgggugaggacuagucccuguucccagagcccacuuuuuuuucuuuuuuugaaauaaaauagccugucuuucagaucucaaaggcucuuuucagagccaccaaaaaaaaaaaaaaaaaaaaaaaaaaaaaaaaaaaaaaaaaaaaaaaaaaaaaaaaaaaaaaaaaaaaaaaaaaaaaaaaaaaaaaaaaaaaaaaaaaaaa

SEQ ID NO: 19582 - RNA, 6113 nt, Artificial Sequence
  SARS-CoV-2__MT873278.1__non-structural protein 3 (NSP3) mRNA gc
aggagagucccgcagucggcguccagcggcucugcuuguucgugugugugucguugcaggccuuauucaagcuuaccauggcccccaccaaggugaccuucggcgacgacacggucaucgaggugcagggguacaagagcgugaacaucaccuucgagcuggacgagcgcaucgacaagguccucaacgagaagugcuccgccuacaccguggagcugggcaccgaggugaacgaguucgcgugcgucguggccgacgccgugaucaagacgcugcagccggucagcgagcuccugaccccccuggggaucgaccucgacgagugguccauggccaccuacuaccuguucgacgagagcggcgaguucaagcuggccucccacauguacugcagcuucuacccccccgacgaggacgaggaggagggggacugcgaggaggaggaguucgagccguccacccaguacgaguacggcacggaggacgacuaccagggcaagccccucgaguucggggcgaccagcgccgcccugcagcccgaggaggagcaggaggaggacuggcuggacgacgacucccagcagaccgugggccagcaggacgggagcgaggacaaccagaccacgaccauccagaccaucguggagguccagccccagcucgagauggagcugaccccgguggugcagacgaucgaggucaacuccuucagcggcuaccugaagcucaccgacaacguguacaucaagaacgccgacaucguggaggaggcgaagaaggucaagcccaccgugguggucaacgccgccaacguguaccugaagcacgggggcggcguggccggggcccugaacaaggcgaccaacaacgccaugcaggucgaguccgacgacuacaucgccacgaacggcccccucaagguggggggcagcugcguccuguccggccacaaccuggccaagcacugccuccacgugguggggcccaacgucaacaagggcgaggacauccagcugcugaagagcgccuacgagaacuucaaccagcacgaggugcuccuggcgccgcugcucuccgccgggaucuucggcgccgaccccauccacagccugcgggugugcgucgacaccgugcgcaccaacguguaccuggccgucuucgacaagaaccucuacgacaagcugguguccagcuuccuggagaugaagagcgagaagcagguggagcagaagaucgccgagauccccaaggaggaggucaagcccuucaucaccgaguccaagccgagcguggagcagcggaagcaggacgacaagaagaucaaggcgugcguggaggaggucacgaccacccucgaggagaccaaguuccugacggagaaccugcuccuguacaucgacaucaacgggaaccugcaccccgacuccgccacccucgugagcgacaucgacaucaccuuccugaagaaggacgcccccuacaucgugggcgacgucgugcaggagggcgugcugaccgccgucgugauccccacgaagaaggccgggggcaccaccgagaugcucgcgaaggcccugcgcaaggugccgaccgacaacuacaucacgaccuaccccgggcagggccugaacggguacaccgucgaggaggccaagaccgugcucaagaagugcaaguccgccuucuacauccugcccagcaucaucuccaacgagaagcaggagauccugggcaccgugagcuggaaccuccgggagaugcuggcgcacgccgaggagacgcgcaagcugaugcccgucugcguggagaccaaggccaucguguccaccauccagcggaaguacaagggcaucaagauccaggagggggucguggacuacggcgcccgcuucuacuucuacaccagcaagacgaccguggccucccugaucaacacccucaacgaccugaacgagacccuggucacgaugccgcucggguacgugacccacggccugaaccuggaggaggcggcccgguacaugcgcagccucaaggugcccgccaccgucuccgugagcucccccgacgccgugaccgccuacaacggguaccugacgagcuccagcaagacccccgaggagcacuucaucgagaccaucucccuggcgggcagcuacaaggacuggagcuacuccggccagagcacccagcucgggaucgaguuccugaagcggggcgacaaguccgucuacuacacgagcaacccgaccaccuuccaccuggacggggaggugaucaccuucgacaaccucaagacgcugcugucccuccgcgaggugcggaccaucaaggucuucaccaccguggacaacaucaaccugcacacgcagguggucgacaugagcaugaccuacggccagcaguucggccccaccuaccuggacggggccgacgugaccaagaucaagccccacaacucccacgagggcaagacguucuacgugcucccgaacgacgacacccugcgcgucgaggccuucgaguacuaccacaccaccgaccccagcuuccuggggcgguacauguccgcccucaaccacacgaagaaguggaaguacccccaggugaacggccugaccagcaucaagugggccgacaacaacugcuaccuggcgaccgcccuccugacccugcagcagaucgagcucaaguucaaccccccggcccugcaggacgccuacuaccgcgcgcgggccggggaggccgccaacuucugcgcccugauccucgcguacugcaacaagacggugggcgagcugggcgacguccgcgagaccauguccuaccuguuccagcacgccaaccucgacagcugcaagcgggugcugaacgucgugugcaagaccugcgggcagcagcagaccacccugaagggcguggaggccgucauguacauggggacgcucuccuacgagcaguucaagaagggcgugcagauccccugcaccugcgggaagcaggccaccaaguaccuggugcagcaggagagccccuucgucaugauguccgcccccccggcgcaguacgagcugaagcacggcaccuucacgugcgccagcgaguacaccggcaacuaccagugcgggcacuacaagcacaucaccuccaaggagacccucuacugcaucgacggcgcccugcugacgaagagcagcgaguacaaggggcccaucaccgacguguucuacaaggagaacuccuacaccaccacgaucaagcccgugaccuacaagcucgacggcgucgugugcaccgagaucgaccccaagcuggacaacuacuacaagaaggacaacagcuacuucaccgagcagccgaucgaccuggugcccaaccagcccuaccccaacgccuccuucgacaacuucaaguucgucugcgacaacaucaaguucgccgacgaccucaaccagcugacgggguacaagaagccggcgagccgcgagcugaaggugaccuucuuccccgaccucaacggcgacguggucgccaucgacuacaagcacuacacccccuccuucaagaagggcgccaagcugcugcacaagcccaucguguggcacgugaacaacgccaccaacaaggcgacguacaagccgaacaccuggugcauccggugccucuggagcaccaagcccgucgagaccuccaacagcuucgacgugcugaaguccgaggacgcccaggggauggacaaccuggccugcgaggaccucaagcccgugagcgaggaggucguggagaaccccacgauccagaaggacgugcuggagugcaacgucaagaccaccgagguggugggcgacaucauccugaagccggccaacaacucccucaagaucaccgaggaggucgggcacacggaccugauggccgcguacguggacaacagcucccugaccaucaagaagcccaacgagcucagccgcgugcugggccugaagacccucgccacccacgggcuggccgccgucaacuccgugcccugggacacgaucgccaacuacgcgaagccguuccugaacaagguggucagcaccaccaccaacaucgugacgcgcugccucaaccgggugugcaccaacuacaugcccuacuucuucacccugcugcuccagcugugcaccuucacccgcuccacgaacagccggaucaaggccuccaugcccaccaccaucgccaagaacaccgucaagagcgugggcaaguucugccuggaggccagcuucaacuaccucaagucccccaacuucagcaagcugaucaacaucaucaucugguuccugcuccuguccgugugccugggcagccucaucuacuccacggccgcgcuggggguccugaugagcaaccucggcaugccguccuacugcaccggguaccgcgagggcuaccugaacagcaccaacgugaccaucgccacguacugcaccggcuccauccccugcagcgugugccuguccgggcucgacagccuggacaccuaccccucccuggagaccauccagaucacgaucagcuccuucaagugggaccucaccgccuucggccuggucgccgagugguuccuggccuacauccucuucacccgguucuucuacgugcuggggcuggcggugaucaugcagcucuucuucagcuacuucgccguccacuucaucuccaacagcuggcugauguggcugaucaucaaccuggugcagauggcccccaucuccgccauggugcgcauguacaucuucuucgcgagcuucuacuacgucuggaagagcuacgugcacguggucgacggcugcaacuccagcaccugcaugaugugcuacaagcggaaccgcgccacgcggguggagugcaccaccaucgucaacggggugcgccgguccuucuacguguacgccaacggcggcaagggguucugcaagcuccacaacuggaacugcgucaacugcgacaccuucugcgccggcagcacguucaucuccgacgagguggcccgcgaccugagccugcaguucaagcggccgaucaaccccaccgaccaguccagcuacaucguggacuccgucaccgugaagaacgggagcauccaccucuacuucgacaaggcgggccagaagaccuacgagcgccacucccugagccacuucgugaaccuggacaaccuccgggccaacaacacgaaggggucccugcccaucaacgucaucguguucgacggcaagagcaagugcgaggaguccagcgccaaguccgccagcguguacuacucccagcugaugugccagcccauccuccugcuggaccaggcccucgucagcgacgugggcgacagcgcggagguggccgucaagauguucgacgccuacgugaacaccuucuccagcaccuucaacgugccgauggagaagcugaagacccuggucgccacggccgaggcggagcucgccaagaacgugucccuggacaacgugcugagcaccuucaucuccgccgcccgccagggguucgucgacagcgacguggagaccaaggacguggucgagugccucaagcugucccaccagagcgacaucgaggugaccggcgacuccugcaacaacuacaugcugacguacaacaagguggagaacaugaccccccgggaccucggggcgugcaucgacugcagcgcccgccacaucaacgcccaggucgccaagucccacaacaucgcccugaucuggaacgugaaggacuucaugagccuguccgagcagcuccggaagcagauccgcagcgcggccaagaagaacaaccugcccuucaagcugaccugcgccaccacgcgccagguggucaacguggugaccaccaagaucgcccucaagggcgggugaggacuagucccuguucccagagcccacuuuuuuuucuuuuuuugaaauaaaauagccugucuuucagaucucaaaggcucuuuucagagccaccaaaaaaaaaaaaaaaaaaaaaaaaaaaaaaaaaaaaaaaaaaaaaaaaaaaaaaaaaaaaaaaaaaaaaaaaaaaaaaaaaaaaaaaaaaaaaaaaaaaaa

SEQ ID NO: 19583 - RNA, 6113 nt, Artificial Sequence
  SARS-CoV-2__MT873350.1__non-structural protein 3 (NSP3) mRNA gc
aggagagucccgcagucggcguccagcggcucugcuuguucgugugugugucguugcaggccuuauucaagcuuaccauggcccccaccaaggugaccuucggcgacgacacggucaucgaggugcagggguacaagagcgugaacaucaccuucgagcuggacgagcgcaucgacaagguccucaacgagaagugcuccgccuacaccguggagcugggcaccgaggugaacgaguucgcgugcgucguggccgacgccgugaucaagacgcugcagccggucagcgagcuccugaccccccuggggaucgaccucgacgagugguccauggccaccuacuaccuguucgacgagagcggcgaguucaagcuggccucccacauguacugcagcuucuacccccccgacgaggacgaggaggagggggacugcgaggaggaggaguucgagccguccacccaguacgaguacggcaucgaggacgacuaccagggcaagccccucgaguucggggcgacgagcgccgcccugcagcccgaggaggagcaggaggaggacuggcuggacgacgacucccagcagaccgugggccagcaggacgggagcgaggacaaccagaccaccacgauccagaccaucguggagguccagccccagcucgagauggagcugaccccgguggugcagaccaucgaggucaacuccuucagcggcuaccugaagcucacggacaacguguacaucaagaacgccgacaucguggaggaggcgaagaaggucaagcccaccgugguggucaacgccgccaacguguaccugaagcacgggggcggcguggccggggcccugaacaaggcgaccaacaacgccaugcaggucgaguccgacgacuacaucgccaccaacggcccccucaagguggggggcagcugcguccuguccggccacaaccuggccaagcacugccuccacgugguggggcccaacgucaacaagggcgaggacauccagcugcugaagagcgccuacgagaacuucaaccagcacgaggugcuccuggcgccgcugcucuccgccgggaucuucggcgccgaccccauccacagccugcgggugugcgucgacacggugcgcaccaacguguaccuggccgucuucgacaagaaccucuacgacaagcugguguccagcuuccuggagaugaagagcgagaagcagguggagcagaagaucgccgagauccccaaggaggaggucaagcccuucaucaccgaguccaagccgagcguggagcagcggaagcaggacgacaagaagaucaaggcgugcguggaggaggucaccacgacccucgaggagaccaaguuccugaccgagaaccugcuccuguacaucgacaucaacgggaaccugcaccccgacuccgccacgcucgugagcgacaucgacaucaccuuccugaagaaggacgcccccuacaucgugggcgacgucgugcaggagggcgugcugaccgccgucgugauccccaccaagaaggccgggggcacgaccgagaugcucgcgaaggcccugcgcaaggugccgaccgacaacuacaucaccacguaccccgggcagggccugaacggguacaccgucgaggaggccaagaccgugcucaagaagugcaaguccgccuucuacauccugcccagcaucaucuccaacgagaagcaggagauccugggcaccgugagcuggaaccuccgggagaugcuggcgcacgccgaggagacccgcaagcugaugcccgucugcguggagacgaaggccaucguguccaccauccagcggaaguacaagggcaucaagauccaggagggggucguggacuacggcgcccgcuucuacuucuacaccagcaagaccacgguggccucccugaucaacacccucaacgaccugaacgagacccuggucaccaugccgcucggguacgugacgcacggccugaaccuggaggaggcggcccgguacaugcgcagccucaaggugcccgccaccgucuccgugagcucccccgacgccgugaccgccuacaacggguaccugaccagcuccagcaagacgcccgaggagcacuucaucgagaccaucucccuggcgggcagcuacaaggacuggagcuacuccggccagagcacccagcucgggaucgaguuccugaagcggggcgacaaguccgucuacuacaccagcaacccgacgaccuuccaccuggacggggaggugaucaccuucgacaaccucaagacccugcugucccuccgcgaggugcggacgaucaaggucuucaccaccguggacaacaucaaccugcacacccagguggucgacaugagcaugacguacggccagcaguucggccccaccuaccuggacggggccgacgugaccaagaucaagccccacaacucccacgagggcaagaccuucuacgugcucccgaacgacgacacgcugcgcgucgaggccuucgaguacuaccacaccaccgaccccagcuuccuggggcgguacauguccgcccucaaccacaccaagaaguggaaguacccccaggugaacggccugacgagcaucaagugggccgacaacaacugcuaccuggcgaccgcccuccugacccugcagcagaucgagcucaaguucaaccccccggcccugcaggacgccuacuaccgcgcgcgggccggggaggccgccaacuucugcgcccugauccucgcguacugcaacaagaccgugggcgagcugggcgacguccgcgagacgauguccuaccuguuccagcacgccaaccucgacagcugcaagcgggugcugaacgucgugugcaagaccugcgggcagcagcagaccacccugaagggcguggaggccgucauguacauggggacccucuccuacgagcaguucaagaagggcgugcagauccccugcacgugcgggaagcaggccaccaaguaccuggugcagcaggagagccccuucgucaugauguccgcccccccggcgcaguacgagcugaagcacggcaccuucaccugcgccagcgaguacacgggcaacuaccagugcgggcacuacaagcacaucaccuccaaggagacccucuacugcaucgacggcgcccugcugaccaagagcagcgaguacaaggggcccaucacggacguguucuacaaggagaacuccuacaccaccaccaucaagcccgugacguacaagcucgacggcgucgugugcaccgagaucgaccccaagcuggacaacuacuacaagaaggacaacagcuacuucaccgagcagccgaucgaccuggugcccaaccagcccuaccccaacgccuccuucgacaacuucaaguucgucugcgacaacaucaaguucgccgacgaccucaaccagcugaccggguacaagaagccggcgagccgcgagcugaaggugacguucuuccccgaccucaacggcgacguggucgccaucgacuacaagcacuacacccccuccuucaagaagggcgccaagcugcugcacaagcccaucguguggcacgugaacaacgccaccaacaaggcgaccuacaagccgaacacguggugcauccggugccucuggagcaccaagcccgucgagaccuccaacagcuucgacgugcugaaguccgaggacgcccaggggauggacaaccuggccugcgaggaccucaagcccgugagcgaggaggucguggagaaccccaccauccagaaggacgugcuggagugcaacgucaagacgaccgagguggugggcgacaucauccugaagccggccaacaacucccucaagaucaccgaggaggucgggcacaccgaccugauggccgcguacguggacaacagcucccugacgaucaagaagcccaacgagcucagccgcgugcugggccugaagacccucgccacccacgggcuggccgccgucaacuccgugcccugggacaccaucgccaacuacgcgaagccguuccugaacaagguggucagcacgaccaccaacaucgugacccgcugccucaaccgggugugcacgaacuacaugcccuacuucuucacccugcugcuccagcugugcaccuucacccgcuccaccaacagccggaucaaggccuccaugcccacgaccaucgccaagaacaccgucaagagcgugggcaaguucugccuggaggccagcuucaacuaccucaagucccccaacuucagcaagcugaucaacaucaucaucugguuccugcuccuguccgugugccugggcagccucaucuacuccaccgccgcgcuggggguccugaugagcaaccucggcaugccguccuacugcacgggguaccgcgagggcuaccugaacagcaccaacgugaccaucgccaccuacugcacgggcuccauccccugcagcgugugccuguccgggcucgacagccuggacaccuaccccucccuggagaccauccagaucaccaucagcuccuucaagugggaccucacggccuucggccuggucgccgagugguuccuggccuacauccucuucacccgguucuucuacgugcuggggcuggcggccaucaugcagcucuucuucagcuacuucgccgugcacuucaucuccaacagcuggcugauguggcugaucaucaaccugguccagauggcccccaucuccgcgauggugcgcauguacaucuucuucgccagcuucuacuacguguggaagagcuacguccacgugguggacggcugcaacuccagcaccugcaugaugugcuacaagcggaaccgcgccacccgggucgagugcacgaccaucgugaacgggguccgccgguccuucuacguguacgccaacggcggcaagggguucugcaagcuccacaacuggaacugcgugaacugcgacaccuucugcgccggcagcaccuucaucuccgacgaggucgcgcgcgaccugagccugcaguucaagcggccgaucaaccccacggaccaguccagcuacaucguggacuccgugaccgucaagaacgggagcauccaccucuacuucgacaaggccggccagaagaccuacgagcgccacucccugagccacuucgugaaccuggacaaccuccgggccaacaacaccaaggggucccugcccaucaacgugaucgucuucgacggcaagagcaagugcgaggaguccagcgccaaguccgccagcguguacuacucccagcugaugugccagcccauccuccugcuggaccaggcgcucgugagcgacgucggcgacagcgccgagguggccgugaagauguucgacgccuacgucaacacguucuccagcaccuucaacgugccgauggagaagcugaagacccugguggccaccgcggaggccgagcucgccaagaacgucucccuggacaacgugcugagcacguucaucuccgccgcgcgccagggguucguggacagcgacgucgagaccaaggacgugguggagugccucaagcugucccaccagagcgacaucgaggucaccggcgacuccugcaacaacuacaugcugaccuacaacaagguggagaacaugacgccccgggaccucggggccugcaucgacugcagcgcccgccacaucaacgcccagguggccaagucccacaacaucgcgcugaucuggaacgucaaggacuucaugagccuguccgagcagcuccggaagcagauccgcagcgccgccaagaagaacaaccugcccuucaagcugaccugcgccaccacccgccagguggugaacgucgugacgaccaagaucgcccucaagggcgggugaggacuagucccuguucccagagcccacuuuuuuuucuuuuuuugaaauaaaauagccugucuuucagaucucaaaggcucuuuucagagccaccaaaaaaaaaaaaaaaaaaaaaaaaaaaaaaaaaaaaaaaaaaaaaaaaaaaaaaaaaaaaaaaaaaaaaaaaaaaaaaaaaaaaaaaaaaaaaaaaaaaaa

SEQ ID NO: 19584 - RNA, 6113 nt, Artificial Sequence
  SARS-CoV-2__MT873444.1__non-structural protein 3 (NSP3) mRNA gc
aggagagucccgcagucggcguccagcggcucugcuuguucgugugugugucguugcaggccuuauucaagcuuaccauggcccccaccaaggugaccuucggcgacgacacggucaucgaggugcagggguacaagagcgugaacaucaccuucgagcuggacgagcgcaucgacaagguccucaacgagaagugcuccgccuacaccguggagcugggcaccgaggugaacgaguucgcgugcgucguggccgacgccgugaucaagacgcugcagccggucagcgagcuccugaccccccuggggaucgaccucgacgagugguccauggccaccuacuaccuguucgacgagagcggcgaguucaagcuggccucccacauguacugcagcuucuacccccccgacgaggacgaggaggagggggacugcgaggaggaggaguucgagccguccacccaguacgaguacggcacggaggacgacuaccagggcaagccccucgaguucggggcgaccagcgccgcccugcagcccgaggaggagcaggaggaggacuggcuggacgacgacucccagcagaccgugggccagcaggacgggagcgaggacaaccagaccacgaccauccagaccaucguggagguccagccccagcucgagauggagcugaccccgguggugcagacgaucgaggucaacuccuucagcggcuaccugaagcucaccgacaacguguacaucaagaacgccgacaucguggaggaggcgaagaaggucaagcccaccgugguggucaacgccgccaacguguaccugaagcacgggggcggcguggccggggcccugaacaaggcgaccaacaacgccaugcaggucgaguccgacgacuacaucgccacgaacggcccccucaagguggggggcagcugcguccuguccggccacaaccuggccaagcacugccuccacgugguggggcccaacgucaacaagggcgaggacauccagcugcugaagagcgccuacgagaacuucaaccagcacgaggugcuccuggcgccgcugcucuccgccgggaucuucggcgccgaccccauccacagccugcgggugugcgucgacaccgugcgcaccaacguguaccuggccgucuucgacaagaaccucuacgacaagcugguguccagcuuccuggagaugaagagcgagaagcagguggagcagaagaucgccgagauccccaaggaggaggucaagcccuucaucaccgaguccaagccgagcguggagcagcggaagcaggacgacaagaagaucaaggcgugcguggaggaggucacgaccacccucgaggagaccaaguuccugacggagaaccugcuccuguacaucgacaucaacgggaaccugcaccccgacuccgccacccucgugagcgacaucgacaucaccuuccugaagaaggacgcccccuacaucgugggcgacgucgugcaggagggcgugcugaccgccgucgugauccccacgaagaaggccgggggcaccaccgagaugcucgcgaaggcccugcgcaaggugccgaccgacaacuacaucacgaccuaccccgggcagggccugaacggguacaccgucgaggaggccaagaccgugcucaagaagugcaaguccgccuucuacauccugcccagcaucaucuccaacgagaagcaggagauccugggcaccgugagcuggaaccuccgggagaugcuggcgcacgccgaggagacgcgcaagcugaugcccgucugcguggagaccaaggccaucguguccaccauccagcggaaguacaagggcaucaagauccaggagggggucguggacuacggcgcccgcuucuacuucuacaccagcaagacgaccguggccucccugaucaacacccucaacgaccugaacgagacccuggucacgaugccgcucggguacgugacccacggccugaaccuggaggaggcggcccgguacaugcgcagccucaaggugcccgccaccgucuccgugagcucccccgacgccgugaccgccuacaacggguaccugacgagcuccagcaagacccccgaggagcacuucaucgagaccaucucccuggcgggcagcuacaaggacuggagcuacuccggccagagcacccagcucgggaucgaguuccugaagcggggcgacaaguccgucuacuacacgagcaacccgaccaccuuccaccuggacggggaggugaucaccuucgacaaccucaagacgcugcugucccuccgcgaggugcggaccaucaaggucuucaccaccguggacaacaucaaccugcacacgcagguggucgacaugagcaugaccuacggccagcaguucggccccaccuaccuggacggggccgacgugaccaagaucaagccccacaacucccacgagggcaagacguucuacgugcucccgaacgacgacacccugcgcgucgaggccuucgaguacuaccacaccaccgaccccagcuuccuggggcgguacauguccgcccucaaccacacgaagaaguggaaguacccccaggugaacggccugaccagcaucaagugggccgacaacaacugcuaccuggcgaccgcccuccugacccugcagcagaucgagcucaaguucaaccccccggcccugcaggacgccuacuaccgcgcgcgggccggggaggccgccaacuucugcgcccugauccucgcguacugcaacaagacggugggcgagcugggcgacguccgcgagaccauguccuaccuguuccagcacgccaaccucgacagcugcaagcgggugcugaacgucgugugcaagaccugcgggcagcagcagaccacccugaagggcguggaggccgucauguacauggggacgcucuccuacgagcaguucaagaagggcgugcagauccccugcaccugcgggaagcaggccaccaaguaccuggugcagcaggagagccccuucgucaugauguccgcccccccggcgcaguacgagcugaagcacggcaccuucacgugcgccagcgaguacaccggcaacuaccagugcgggcacuacaagcacaucaccuccaaggagacccucuacugcaucgacggcgcccugcugacgaagagcagcgaguacaaggggcccaucaccgacguguucuacaaggagaacuccuacaccaccacgaucaagcccgugaccuacaagcucgacggcgucgugugcaccgagaucgaccccaagcuggacaacuacuacaagaaggacaacagcuacuucaccgagcagccgaucgaccuggugcccaaccagcccuaccccaacgccuccuucgacaacuucaaguucgucugcgacaacaucaaguucgccgacgaccucaaccagcugacgggguacaagaagccggcgagccgcgagcugaaggugaccuucuuccccgaccucaacggcgacguggucgccaucgacuacaagcacuacacccccuccuucaagaagggcgccaagcugcugcacaagcccaucguguggcacgugaacaacgccaccaacaaggcgacguacaagccgaacaccuggugcauccggugccucuggagcaccaagcccgucgagaccuccaacagcuucgacgugcugaaguccgaggacgcccaggggauggacaaccuggccugcgaggaccucaagcccgugagcgaggaggucguggagaaccccacgauccagaaggacgugcuggagugcaacgucaagaccaccgagguggugggcgacaucauccugaagccggccaacaacucccucaagaucaccgaggaggucgggcacacggaccugauggccgcguacguggacaacagcucccugaccaucaagaagcccaacgagcucagccgcgugcugggccugaagacccucgccacccacgggcuggccgccgucaacuccgugcccugggacacgaucgccaacuacgcgaagccguuccugaacaagguggucagcaccaccaccaacaucgugacgcgcugccucaaccgggugugcaccaacuacaugcccuacuucuucacccugcugcuccagcugugcaccuucacccgcuccacgaacagccggaucaaggccuccaugcccaccaccaucgccaagaacaccgucaagagcgugggcaaguucugccuggaggccagcuucaacuaccucaagucccccaacuucagcaagcugaucaacaucaucaucugguuccugcuccuguccgugugccugggcagccucaucuacuccacggccgcgcuggggguccugaugagcaaccucggcaugccguccuacugcaccggguaccgcgagggcuaccugaacagcaccaacgugaccaucgccacguacugcaccggcuccauccccugcagcgugugccuguccgggcucgacagccuggacaccuaccccucccuggagaccauccagaucacgaucagcuccuucaagugggaccucaccgccuucggccuggucgccgagugguuccuggccuacauccucuucacccgguucuucuacgugcuggggcuggcggccaucaugcagcucuucuucagcuacuucgccgugcacuucaucuccaacagcuggcugauguggcugaucaucaaccugguccagauggcccccaucuccgcgauggugcgcauguacaucuucuucgccagcuucuacuacguguggaagagcuacguccacgugguggacggcugcaacuccagcaccugcaugaugugcuacaagcggaaccgcgccacgcgggucgagugcaccaccaucgugaacgggguccgccgguccuucuacguguacgccaacggcggcaagggguucugcaagcuccacaacuggaacugcgugaacugcgacaccuucugcgccggcagcacguucaucuccgacgaggucgcgcgcgaccugagccugcaguucaagcggccgaucaaccccaccgaccaguccagcuacaucguggacaucgugaccgucaagaacggguccauccaccucuacuucgacaaggccggccagaagaccuacgagcgccacagccugucccacuucgugaaccuggacaaccuccgggccaacaacacgaaggggagccugcccaucaacgugaucgucuucgacggcaaguccaagugcgaggagagcuccgccaagagcgccuccguguacuacagccagcugaugugccagcccauccuccugcuggaccaggcgcucguguccgacgucggcgacagcgccgagguggccgugaagauguucgacgccuacgucaacaccuucagcuccaccuucaacgugccgauggagaagcugaagacccugguggccacggcggaggccgagcucgccaagaacgucagccuggacaacgugcuguccaccuucaucagcgccgcgcgccagggguucguggacuccgacgucgagaccaaggacgugguggagugccucaagcugagccaccaguccgacaucgaggucaccggcgacagcugcaacaacuacaugcugacguacaacaagguggagaacaugaccccccgggaccucggggccugcaucgacugcuccgcccgccacaucaacgcccagguggccaagagccacaacaucgcgcugaucuggaacgucaaggacuucaugucccugagcgagcagcuccggaagcagauccgcuccgccgccaagaagaacaaccugcccuucaagcugaccugcgccaccacgcgccagguggugaacgucgugaccaccaagaucgcccucaagggcgggugaggacuagucccuguucccagagcccacuuuuuuuucuuuuuuugaaauaaaauagccugucuuucagaucucaaaggcucuuuucagagccaccaaaaaaaaaaaaaaaaaaaaaaaaaaaaaaaaaaaaaaaaaaaaaaaaaaaaaaaaaaaaaaaaaaaaaaaaaaaaaaaaaaaaaaaaaaaaaaaaaaaaa

SEQ ID NO: 19585 - RNA, 6113 nt, Artificial Sequence
  SARS-CoV-2__MT873462.1__non-structural protein 3 (NSP3) mRNA gc
aggagagucccgcagucggcguccagcggcucugcuuguucgugugugugucguugcaggccuuauucaagcuuaccauggcccccaccaaggugaccuucggcgacgacacggucaucgaggugcagggguacaagagcgugaacaucaccuucgagcuggacgagcgcaucgacaagguccucaacgagaagugcuccgccuacaccguggagcugggcaccgaggugaacgaguucgcgugcgucguggccgacgccgugaucaagacgcugcagccggucagcgagcuccugaccccccuggggaucgaccucgacgagugguccauggccaccuacuaccuguucgacgagagcggcgaguucaagcuggccucccacauguacugcagcuucuacccccccgacgaggacgaggaggagggggacugcgaggaggaggaguucgagccguccacccaguacgaguacggcacggaggacgacuaccagggcaagccccucgaguucggggcgaccagcgccgcccugcagcccgaggaggagcaggaggaggacuggcuggacgacgacucccagcagaccgugggccagcaggacgggagcgaggacaaccagaccacgaccauccagaccaucguggagguccagccccagcucgagauggagcugaccccgguggugcagacgaucgaggucaacuccuucagcggcuaccugaagcucaccgacaacguguacaucaagaacgccgacaucguggaggaggcgaagaaggucaagcccaccgugguggucaacgccgccaacguguaccugaagcacgggggcggcguggccggggcccugaacaaggcgaccaacaacgccaugcaggucgaguccgacgacuacaucgccacgaacggcccccucaagguggggggcagcugcguccuguccggccacaaccuggccaagcacugccuccacgugguggggcccaacgucaacaagggcgaggacauccagcugcugaagagcgccuacgagaacuucaaccagcacgaggugcuccuggcgccgcugcucuccgccgggaucuucggcgccgaccccauccacagccugcgggugugcgucgacaccgugcgcaccaacguguaccuggccgucuucgacaagaaccucuacgacaagcugguguccagcuuccuggagaugaagagcgagaagcagguggagcagaagaucgccgagauccccaaggaggaggucaagcccuucaucaccgaguccaagccgagcguggagcagcggaagcaggacgacaagaagaucaaggcgugcguggaggaggucacgaccacccucgaggagaccaaguuccugacggagaaccugcuccuguacaucgacaucaacgggaaccugcaccccgacuccgccacccucgugagcgacaucgacaucaccuuccugaagaaggacgcccccuacaucgugggcgacgucgugcaggagggcgugcugaccgccgucgugauccccacgaagaaggccgggggcaccaccgagaugcucgcgaaggcccugcgcaaggugccgaccgacaacuacaucacgaccuaccccgggcagggccugaacggguacaccgucgaggaggccaagaccgugcucaagaagugcaaguccgccuucuacauccugcccagcaucaucuccaacgagaagcaggagauccugggcaccgugagcuggaaccuccgggagaugcuggcgcacgccgaggagacgcgcaagcugaugcccgucugcguggagaccaaggccaucguguccaccauccagcggaaguacaagggcaucaagauccaggagggggucguggacuacggcgcccgcuucuacuucuacaccagcaagacgaccguggccucccugaucaacacccucaacgaccugaacgagacccuggucacgaugccgcucggguacgugacccacggccugaaccuggaggaggcggcccgguacaugcgcagccucaaggugcccgccaccgucuccgugagcucccccgacgccgugaccgccuacaacggguaccugacgagcuccagcaagacccccgaggagcacuucaucgagaccaucucccuggcgggcagcuacaaggacuggagcuacuccggccagagcacccagcucgggaucgaguuccugaagcggggcgacaaguccgucuacuacacgagcaacccgaccaccuuccaccuggacggggaggugaucaccuucgacaaccucaagacgcugcugucccuccgcgaggugcggaccaucaaggucuucaccaccguggacaacaucaaccugcacacgcagguggucgacaugagcaugaccuacggccagcaguucugccccaccuaccuggacggcgccgacgugaccaagaucaagccccacaacucccacgaggggaagacguucuacgugcucccgaacgacgacacccugcgcgucgaggccuucgaguacuaccacaccaccgaccccagcuuccugggccgguacauguccgcccucaaccacacgaagaaguggaaguacccccaggugaacgggcugaccagcaucaagugggccgacaacaacugcuaccuggcgaccgcccuccugacccugcagcagaucgagcucaaguucaaccccccggcccugcaggacgccuacuaccgcgcgcgggccggcgaggccgccaacuucugcgcccugauccucgcguacugcaacaagacggugggggagcugggcgacguccgcgagaccauguccuaccuguuccagcacgccaaccucgacagcugcaagcgggugcugaacgucgugugcaagaccugcggccagcagcagaccacccugaaggggguggaggccgucauguacaugggcacgcucuccuacgagcaguucaagaagggggugcagauccccugcaccugcggcaagcaggccaccaaguaccuggugcagcaggagagccccuucgucaugauguccgcccccccggcgcaguacgagcugaagcacgggaccuucacgugcgccagcgaguacaccggcaacuaccagugcggccacuacaagcacaucaccuccaaggagacccucuacugcaucgacggggcccugcugacgaagagcagcgaguacaagggccccaucaccgacguguucuacaaggagaacuccuacaccaccacgaucaagcccgugaccuacaagcucgacggggucgugugcaccgagaucgaccccaagcuggacaacuacuacaagaaggacaacagcuacuucaccgagcagccgaucgaccuggugcccaaccagcccuaccccaacgccuccuucgacaacuucaaguucgucugcgacaacaucaaguucgccgacgaccucaaccagcugacgggcuacaagaagccggcgagccgcgagcugaaggugaccuucuuccccgaccucaacggggacguggucgccaucgacuacaagcacuacacccccuccuucaagaagggcgccaagcugcugcacaagcccaucguguggcacgugaacaacgccaccaacaaggcgacguacaagccgaacaccuggugcauccggugccucuggagcaccaagcccgucgagaccuccaacagcuucgacgugcugaaguccgaggacgcccagggcauggacaaccuggccugcgaggaccucaagcccgugagcgaggaggucguggagaaccccacgauccagaaggacgugcuggagugcaacgucaagaccaccgagguggugggggacaucauccugaagccggccaacaacucccucaagaucaccgaggaggucggccacacggaccugauggccgcguacguggacaacagcucccugaccaucaagaagcccaacgagcucagccgcgugcuggggcugaagacccucgccacccacggccuggccgccgucaacuccgugcccugggacacgaucgccaacuacgcgaagccguuccugaacaagguggucagcaccaccaccaacaucgugacgcgcugccucaaccgggugugcaccaacuacaugcccuacuucuucacccugcugcuccagcugugcaccuucacccgcuccacgaacagccggaucaaggccuccaugcccaccaccaucgccaagaacaccgucaagagcguggggaaguucugccuggaggccagcuucaacuaccucaagucccccaacuucagcaagcugaucaacaucaucaucugguuccugcuccuguccgugugccugggcagccucaucuacuccacggccgcgcugggcguccugaugagcaaccucgggaugccguccuacugcaccggcuaccgcgagggguaccugaacagcaccaacgugaccaucgccacguacugcaccggcuccauccccugcagcgugugccuguccggccucgacagccuggacaccuaccccucccuggagaccauccagaucacgaucagcuccuucaagugggaccucaccgccuucgggcuggucgccgagugguuccuggccuacauccucuucacccgguucuucuacgugcugggccuggcggccaucaugcagcucuucuucagcuacuucgccgugcacuucaucuccaacagcuggcugauguggcugaucaucaaccugguccagauggcccccaucuccgcgauggugcgcauguacaucuucuucgccagcuucuacuacguguggaagagcuacguccacgugguggacgggugcaacuccagcaccugcaugaugugcuacaagcggaaccgcgccacgcgggucgagugcaccaccaucgugaacggcguccgccgguccuucuacguguacgccaacgggggcaagggcuucugcaagcuccacaacuggaacugcgugaacugcgacaccuucugcgccgggagcacguucaucuccgacgaggucgcgcgcgaccugagccugcaguucaagcggccgaucaaccccaccgaccaguccagcuacaucguggacuccgugaccgucaagaacggcagcauccaccucuacuucgacaaggccgggcagaagaccuacgagcgccacucccugagccacuucgugaaccuggacaaccuccgggccaacaacacgaagggcucccugcccaucaacgugaucgucuucgacgggaagagcaagugcgaggaguccagcgccaaguccgccagcguguacuacucccagcugaugugccagcccauccuccugcuggaccaggcgcucgugagcgacgucggcgacagcgccgagguggccgugaagauguucgacgccuacgucaacaccuucuccagcaccuucaacgugccgauggagaagcugaagacccugguggccacggcggaggccgagcucgccaagaacgucucccuggacaacgugcugagcaccuucaucuccgccgcgcgccagggcuucguggacagcgacgucgagaccaaggacgugguggagugccucaagcugucccaccagagcgacaucgaggucaccggggacuccugcaacaacuacaugcugacguacaacaagguggagaacaugaccccccgggaccucggcgccugcaucgacugcagcgcccgccacaucaacgcccagguggccaagucccacaacaucgcgcugaucuggaacgucaaggacuucaugagccuguccgagcagcuccggaagcagauccgcagcgccgccaagaagaacaaccugcccuucaagcugaccugcgccaccacgcgccagguggugaacgucgugaccaccaagaucgcccucaaggggggcugaggacuagucccuguucccagagcccacuuuuuuuucuuuuuuugaaauaaaauagccugucuuucagaucucaaaggcucuuuucagagccaccaaaaaaaaaaaaaaaaaaaaaaaaaaaaaaaaaaaaaaaaaaaaaaaaaaaaaaaaaaaaaaaaaaaaaaaaaaaaaaaaaaaaaaaaaaaaaaaaaaaaa

SEQ ID NO: 19586 - RNA, 6113 nt, Artificial Sequence
  SARS-CoV-2__MT873500.1__non-structural protein 3 (NSP3) mRNA gc
aggagagucccgcagucggcguccagcggcucugcuuguucgugugugugucguugcaggccuuauucaagcuuaccauggcccccaccaaggugaccuucggcgacgacacggucaucgaggugcagggguacaagagcgugaacaucaccuucgagcuggacgagcgcaucgacaagguccucaacgagaagugcuccgccuacaccguggagcugggcaccgaggugaacgaguucgcgugcgucguggccgacgccgugaucaagacgcugcagccggucagcgagcuccugaccccccuggggaucgaccucgacgagugguccauggccaccuacuaccuguucgacgagagcggcgaguucaagcuggccucccacauguacugcagcuucuacccccccgacgaggacgaggaggagggggacugcgaggaggaggaguucgagccguccacccaguacgaguacggcacggaggacgacuaccagggcaagccccucgaguucggggcgaccagcgccgcccugcagcccgaggaggagcaggaggaggacuggcuggacgacgacucccagcagaccgugggccagcaggacgggagcgaggacaaccagaccacgaccauccagaccaucguggagguccagccccagcucgagauggagcugaccccgguggugcagacgaucgaggucaacuccuucagcggcuaccugaagcucaccgacaacguguacaucaagaacgccgacaucguggaggaggcgaagaaggucaagcccaccgugguggucaacgccgccaacguguaccugaagcacgggggcggcguggccggggcccugaacaaggcgaccaacaacgccaugcaggucgaguccgacgacuacaucgccacgaacggcccccucaagguggggggcagcugcguccuguccggccacaaccuggccaagcacugccuccacgugguggggcccaacgucaacaagggcgaggacauccagcugcugaagagcgccuacgagaacuucaaccagcacgaggugcuccuggcgccgcugcucuccgccgggaucuucggcgccgaccccauccacagccugcgggugugcgucgacaccgugcgcaccaacguguaccuggccgucuucgacaagaaccucuacgacaagcugguguccagcuuccuggagaugaagagcgagaagcagguggagcagaagaucgccgagauccccaaggaggaggucaagcccuucaucaccgaguccaagccgagcguggagcagcggaagcaggacgacaagaagaucaaggcgugcguggaggaggucacgaccacccucgaggagaccaaguuccugacggagaaccugcuccuguacaucgacaucaacgggaaccugcaccccgacuccgccacccucgugagcgacaucgacaucaccuuccugaagaaggacgcccccuacaucgugggcgacgucgugcaggagggcgugcugaccgccgucgugauccccacgaagaaggccgggggcaccaccgagaugcucgcgaaggcccugcgcaaggugccgaccgacaacuacaucacgaccuaccccgggcagggccugaacggguacaccgucgaggaggccaagaccgugcucaagaagugcaaguccgccuucuacauccugcccagcaucaucuccaacgagaagcaggagauccugggcaccgugagcuggaaccuccgggagaugcuggcgcacgccgaggagacgcgcaagcugaugcccgucugcguggagaccaaggccaucguguccaccauccagcggaaguacaagggcaucaagauccaggagggggucguggacuacggcgcccgcuucuacuucuacaccagcaagacgaccguggccucccugaucaacacccucaacgaccugaacgagacccuggucacgaugccgcucggguacgugacccacggccugaaccuggaggaggcggcccgguacaugcgcagccucaaggugcccgccaccgucuccgugagcucccccgacgccgugaccgccuacaacggguaccugacgagcuccagcaagacccccgaggagcacuucaucgagaccaucucccuggcgggcagcuacaaggacuggagcuacuccggccagagcacccagcucgggaucgaguuccugaagcggggcgacaaguccgucuacuacacgagcaacccgaccaccuuccaccuggacggggaggugaucaccuucgacaaccucaagacgcugcugucccuccgcgaggugcggaccaucaaggucuucaccaccguggacaacaucaaccugcacacgcagguggucgacaugagcaugaccuacggccagcaguucggccccaccuaccuggacggggccgacgugaccaagaucaagccccacaacucccacgagggcaagacguucuacgugcucccgaacgacgacacccugcgcgucgaggccuucgaguacuaccacaccaccgaccccagcuuccuggggcgguacauguccgcccucaaccacacgaagaaguggaaguacccccaggugaacggccugaccagcaucaagugggccgacaacaacugcuaccuggcgaccgcccuccugacccugcagcagaucgagcucaaguucaaccccccggcccugcaggacgccuacuaccgcgcgcgggccggggaggccgccaacuucugcgcccugauccucgcguacugcaacaagacggugggcgagcugggcgacguccgcgagaccauguccuaccuguuccagcacgccaaccucgacagcugcaagcgggugcugaacgucgugugcaagaccugcgggcagcagcagaccacccugaagggcguggaggccgucauguacauggggacgcucuccuacgagcaguucaagaagggcgugcagauccccugcaccugcgggaagcaggccaccaaguaccuggugcagcaggagagccccuucgucaugauguccgcccccccggcgcaguacgagcugaagcacggcaccuucacgugcgccagcgaguacaccggcaacuaccagugcgggcacuacaagcacaucaccuccaaggagacccucuacugcaucgacggcgcccugcugacgaagagcagcgaguacaaggggcccaucaccgacguguucuacaaggagaacuccuacaccaccacgaucaagcccgugaccuacaagcucgacggcgucgugugcaccgagaucgaccccaagcuggacaacuacuacaagaaggacaacagcuacuucaccgagcagccgaucgaccuggugcccaaccagcccuaccccaacgccuccuucgacaacuucaaguucgucugcgacaacaucaaguucgccgacgaccucaaccagcugacgggguacaagaagccggcgagccgcgagcugaaggugaccuucuuccccgaccucaacggcgacguggucgccaucgacuacaagcacuacacccccuccuucaagaagggcgccaagcugcugcacaagcccaucguguggcacgugaacaacgccaccaacaaggcgacguacaagccgaacaccuggugcauccggugccucuggagcaccaagcccgucgagaccuccaacagcuucgacgugcugaaguccgaggacgcccaggggauggacaaccuggccugcgaggaccucaagcccgugagcgaggaggucguggagaaccccacgauccagaaggacgugcuggagugcaacgucaagaccaccgagguggugggcgacaucauccugaagccggccaacaacucccucaagaucaccgaggaggucgggcacacggaccugauggccgcguacguggacaacagcucccugaccaucaagaagcccaacgagcucagccgcgugcugggccugaagacccucgccacccacgggcuggccgucgugaacuccgugcccugggacacgaucgccaacuacgccaagccguuccugaacaaggucgugagcaccaccaccaacaucgugacgcgcugccucaaccgggucugcaccaacuacaugcccuacuucuucacccugcugcuccagcugugcaccuucacccgcuccacgaacagccggaucaaggcguccaugcccaccaccaucgccaagaacaccgugaagagcgugggcaaguucugccuggaggccagcuucaacuaccucaagucccccaacuucagcaagcugaucaacaucaucaucugguuccugcuccuguccgucugccugggcagccucaucuacuccacggccgcccugggggugcugaugagcaaccucggcaugccguccuacugcaccggguaccgcgagggcuaccugaacagcaccaacgugaccaucgcgacguacugcaccggcuccauccccugcagcgucugccuguccgggcucgacagccuggacaccuaccccucccuggagaccauccagaucacgaucagcuccuucaagugggaccucaccgccuucggccugguggccgagugguuccuggccuacauccucuucacccgguucuucuacgugcuggggcuggccgcgaucaugcagcucuucuucagcuacuucgccguccacuucaucuccaacagcuggcugauguggcugaucaucaaccuggugcagauggcccccaucuccgccauggugcgcauguacaucuucuucgcgagcuucuacuacgucuggaagagcuacgugcacguggucgacggcugcaacuccagcaccugcaugaugugcuacaagcggaaccgcgccacgcggguggagugcaccaccaucgucaacggggugcgccgguccuucuacguguacgccaacggcggcaagggguucugcaagcuccacaacuggaacugcgucaacugcgacaccuucugcgccggcagcacguucaucuccgacgagguggcccgcgaccugagccugcaguucaagcggccgaucaaccccaccgaccaguccagcuacaucguggacuccgucaccgugaagaacgggagcauccaccucuacuucgacaaggcgggccagaagaccuacgagcgccacucccugagccacuucgugaaccuggacaaccuccgggccaacaacacgaaggggucccugcccaucaacgucaucguguucgacggcaagagcaagugcgaggaguccagcgccaaguccgccagcguguacuacucccagcugaugugccagcccauccuccugcuggaccaggcccucgucagcgacgugggcgacagcgcggagguggccgucaagauguucgacgccuacgugaacaccuucuccagcaccuucaacgugccgauggagaagcugaagacccuggucgccacggccgaggcggagcucgccaagaacgugucccuggacaacgugcugagcaccuucaucuccgccgcccgccagggguucgucgacagcgacguggagaccaaggacguggucgagugccucaagcugucccaccagagcgacaucgaggugaccggcgacuccugcaacaacuacaugcugacguacaacaagguggagaacaugaccccccgggaccucggggcgugcaucgacugcagcgcccgccacaucaacgcccaggucgccaagucccacaacaucgcccugaucuggaacgugaaggacuucaugagccuguccgagcagcuccggaagcagauccgcagcgcggccaagaagaacaaccugcccuucaagcugaccugcgccaccacgcgccagguggucaacguggugaccaccaagaucgcccucaagggcgggugaggacuagucccuguucccagagcccacuuuuuuuucuuuuuuugaaauaaaauagccugucuuucagaucucaaaggcucuuuucagagccaccaaaaaaaaaaaaaaaaaaaaaaaaaaaaaaaaaaaaaaaaaaaaaaaaaaaaaaaaaaaaaaaaaaaaaaaaaaaaaaaaaaaaaaaaaaaaaaaaaaaaa

SEQ ID NO: 19587 - RNA, 6113 nt, Artificial Sequence
  SARS-CoV-2__MT873506.1__non-structural protein 3 (NSP3) mRNA gc
aggagagucccgcagucggcguccagcggcucugcuuguucgugugugugucguugcaggccuuauucaagcuuaccauggcccccaccaaggugaccuucggcgacgacacggucaucgaggugcagggguacaagagcgugaacaucaccuucgagcuggacgagcgcaucgacaagguccucaacgagaagugcuccgccuacaccguggagcugggcaccgaggugaacgaguucgcgugcgucguggccgacgccgugaucaagacgcugcagccggucagcgagcuccugaccccccuggggaucgaccucgacgagugguccauggccaccuacuaccuguucgacgagagcggcgaguucaagcuggccucccacauguacugcagcuucuacccccccgacgaggacgaggaggagggggacugcgaggaggaggaguucgagccguccacccaguacgaguacggcacggaggacgacuaccagggcaagccccucgaguucggggcgaccagcgccgcccugcagcccgaggaggagcaggaggaggacuggcuggacgacgacucccagcagaccgugggccagcaggacgggagcgaggacaaccagaccacgaccauccagaccaucguggagguccagccccagcucgagauggagcugaccccgguggugcagacgaucgaggucaacuccuucagcggcuaccugaagcucaccgacaacguguacaucaagaacgccgacaucguggaggaggcgaagaaggucaagcccaccgugguggucaacgccgccaacguguaccugaagcacgggggcggcguggccggggcccugaacaaggcgaccaacaacgccaugcaggucgaguccgacgacuacaucgccacgaacggcccccucaagguggggggcagcugcguccuguccggccacaaccuggccaagcacugccuccacgugguggggcccaacgucaacaagggcgaggacauccagcugcugaagagcgccuacgagaacuucaaccagcacgaggugcuccuggcgccgcugcucuccgccgggaucuucggcgccgaccccauccacagccugcgggugugcgucgacaccgugcgcaccaacguguaccuggccgucuucgacaagaaccucuacgacaagcugguguccagcuuccuggagaugaagagcgagaagcagguggagcagaagaucgccgagauccccaaggaggaggucaagcccuucaucaccgaguccaagccgagcguggagcagcggaagcaggacgacaagaagaucaaggcgugcguggaggaggucacgaccacccucgaggagaccaaguuccugacggagaaccugcuccuguacaucgacaucaacgggaaccugcaccccgacuccgccacccucgugagcgacaucgacaucaccuuccugaagaaggacgcccccuacaucgugggcgacgucgugcaggagggcgugcugaccgccgucgugauccccacgaagaaggccgggggcaccaccgagaugcucgcgaaggcccugcgcaaggugccgaccgacaacuacaucacgaccuaccccgggcagggccugaacggguacaccgucgaggaggccaagaccgugcucaagaagugcaaguccgccuucuacauccugcccagcaucaucuccaacgagaagcaggagauccugggcaccgugagcuggaaccuccgggagaugcuggcgcacgccgaggagacgcgcaagcugaugcccgucugcguggagaccaaggccaucguguccaccauccagcggaaguacaagggcaucaagauccaggagggggucguggacuacggcgcccgcuucuacuucuacaccagcaagacgaccguggccucccugaucaacacccucaacgaccugaacgagacccuggucacgaugccgcucggguacgugacccacggccugaaccuggaggaggcggcccgguacaugcgcagccucaaggugcccgccaccgucuccgugagcucccccgacgccgugaccgccuacaacggguaccugacgagcuccagcaagacccccgaggagcacuucaucgagaccaucucccuggcgggcagcuacaaggacuggagcuacuccggccagagcacccagcucgggaucgaguuccugaagcggggcgacaaguccgucuacuacacgagcaacccgaccaccuuccaccuggacggggaggugaucaccuucgacaaccucaagacgcugcugucccuccgcgaggugcggaccaucaaggucuucaccaccguggacaacaucaaccugcacacgcagguggucgacaugagcaugaccuacggccagcaguucggccccaccuaccuggacggggccgacgugaccaagaucaagccccacaacucccacgagggcaagacguucuacgugcucccgaacgacgacacccugcgcgucgaggccuucgaguacuaccacaccaccgaccccagcuuccuggggcgguacauguccgcccucaaccacacgaagaaguggaaguacccccaggugaacggccugaccagcaucaagugggccgacaacaacugcuaccuggcgaccgcccuccugacccugcagcagaucgagcucaaguucaaccccccggcccugcaggacgccuacuaccgcgcgcgggccggggaggccgccaacuucugcgcccugauccucgcguacugcaacaagacggugggcgagcugggcgacguccgcgagaccauguccuaccuguuccagcacgccaaccucgacagcugcaagcgggugcugaacgucgugugcaagaccugcgggcagcagcagaccacccugaagggcguggaggccgucauguacauggggacgcucuccuacgagcaguucaagaagggcgugcagauccccugcaccugcgggaagcaggccaccaaguaccuggugcagcaggagagccccuucgucaugauguccgcccccccggcgcaguacgagcugaagcacggcaccuucacgugcgccagcgaguacaccggcaacuaccagugcgggcacuacaagcacaucaccuccaaggagacccucuacugcaucgacggcgcccugcugacgaagagcagcgaguacaaggggcccaucaccgacguguucuacaaggagaacuccuacaccaccacgaucaagcccgugaccuacaagcucgacggcgucgugugcaccgagaucgaccccaagcuggacaacuacuacaagaaggacaacagcuacuucaccgagcagccgaucgaccuggugcccaaccagcccuaccccaacgccuccuucgacaacuucaaguucgucugcgacaacaucaaguucgccgacgaccucaaccagcugacgggguacaagaagccggcgagccgcgagcugaaggugaccuucuuccccgaccucaacggcgacguggucgccaucgacuacaagcacuacacccccuccuucaagaagggcgccaagcugcugcacaagcccaucguguggcacgugaacaacgccaccaacaaggcgacguacaagccgaacaccuggugcauccggugccucuggagcaccaagcccgucgagaccuccaacagcuucgacgugcugaaguccgaggacgcccaggggauggacaaccuggccugcgaggaccucaagcccgugagcgaggaggucguggagaaccccacgauccagaaggacgugcuggagugcaacgucaagaccaccgagguggugggcgacaucauccugaagccggccaacaacucccucaagaucaccgaggaggucgggcacacggaccugauggccgcguacguggacaacagcucccugaccaucaagaagcccaacgagcucagccgcgugcugggccugaagacccucgccacccacgggcuggccgccgucaacuccgugcccugggacacgaucgccaacuacgcgaagccguuccugaacaagguggucagcaccaccaccaacaucgugacgcgcugccucaaccgggugugcaccaacuacaugcccuacuucuucacccugcugcuccagcugugcaccuucacccgcuccacgaacagccggaucaaggccuccaugcccaccaccaucgccaagaacaccgucaagagcgugggcaaguucugccuggaggccagcuucaacuaccucaagucccccaacuucagcaagcugaucaacaucaucaucugguuccugcuccuguccgugugccugggcagccucaucuacuccacggccgcgcuggggguccugaugagcaaccucggcaugccguccuacugcaccggguaccgcgagggcuaccugaacagcaccaacgugaccaucgccacguacugcaccggcuccauccccugcagcgugugccuguccgggcucgacagccuggacaccuaccccucccuggagaccauccagaucacgaucagcuccuucaagugggaccucaccgccuucggccuggucgccgagugguuccuggccuacauccucuucacccgguucuucuacgugcuggggcuggcggccaucaugcagcucuucuucagcuacuucgccgugcacuucaucuccaacagcuggcugauguggcugaucaucaaccugguccagauggcccccaucuccgcgauggugcgcauguacaucuucuucgccagcuucuacuacguguggaagagcuacguccacgugguggacggcugcaacuccagcaccugcaugaugugcuacaagcggaaccgcgccacgcgggucgagugcaccaccaucgugaacgggguccgccgguccuucuacguguacgccaacggcggcaagggguucugcaagcuccacaacuggaacugcgugaacugcgacaccuucugcgccggcagcacguucaucuccgacgaggucgcgcgcgaccugagccugcaguucaagcggccgaucaaccccaccgaccaguccagcuacaucguggacuccgugaccgucaagaacgggagcauccaccucuacuucgacaaggccggccagaagaccuacgagcgccacucccugagccacuucgugaaccuggacaaccuccgggccaacaacacgaaggggucccugcccaucaacgugaucgucuucgacggcaagagcaagugcgaggaguccagcgccaaguccgccagcguguacuacucccaccugaugugccagcccauccuccugcuggaccaggcgcucgugagcgacgucggcgacagcgccgagguggccgugaagauguucgacgccuacgucaacaccuucuccagcaccuucaacgugccgauggagaagcugaagacccugguggccacggcggaggccgagcucgccaagaacgucucccuggacaacgugcugagcaccuucaucuccgccgcgcgccagggguucguggacagcgacgucgagaccaaggacgugguggagugccucaagcugucccaccagagcgacaucgaggucaccggcgacuccugcaacaacuacaugcugacguacaacaagguggagaacaugaccccccgggaccucggggccugcaucgacugcagcgcccgccacaucaacgcccagguggccaagucccacaacaucgcgcugaucuggaacgucaaggacuucaugagccuguccgagcagcuccggaagcagauccgcagcgccgccaagaagaacaaccugcccuucaagcugaccugcgccaccacgcgccagguggugaacgucgugaccaccaagaucgcccucaagggcgggugaggacuagucccuguucccagagcccacuuuuuuuucuuuuuuugaaauaaaauagccugucuuucagaucucaaaggcucuuuucagagccaccaaaaaaaaaaaaaaaaaaaaaaaaaaaaaaaaaaaaaaaaaaaaaaaaaaaaaaaaaaaaaaaaaaaaaaaaaaaaaaaaaaaaaaaaaaaaaaaaaaaaa

SEQ ID NO: 19588 - RNA, 6113 nt, Artificial Sequence
  SARS-CoV-2__MT876527.1__non-structural protein 3 (NSP3) mRNA gc
aggagagucccgcagucggcguccagcggcucugcuuguucgugugugugucguugcaggccuuauucaagcuuaccauggcccccaccaaggugaccuucggcgacgacacggucaucgaggugcagggguacaagagcgugaacaucaccuucgagcuggacgagcgcaucgacaagguccucaacgagaagugcuccgccuacaccguggagcugggcaccgaggugaacgaguucgcgugcgucguggccgacgccgugaucaagacgcugcagccggucagcgagcuccugaccccccuggggaucgaccucgacgagugguccauggccaccuacuaccuguucgacgagagcggcgaguucaagcuggccucccacauguacugcagcuucuacccccccgacgaggacgaggaggagggggacugcgaggaggaggaguucgagccguccacccaguacgaguacggcacggaggacgacuaccagggcaagccccucgaguucggggcgaccagcgccgcccugcagcccgaggaggagcaggaggaggacuggcuggacgacgacucccagcagaccgugggccagcaggacgggagcgaggacaaccagaccacgaccauccagaccaucguggagguccagccccagcucgagauggagcugaccccgguggugcagacgaucgaggucaacuccuucagcggcuaccugaagcucaccgacaacguguacaucaagaacgccgacaucguggaggaggcgaagaaggucaagcccaccgugguggucaacgccgccaacguguaccugaagcacgggggcggcguggccggggcccugaacaaggcgaccaacaacgccaugcaggucgaguccgacgacuacaucgccacgaacggcccccucaagguggggggcagcugcguccuguccggccacaaccuggccaagcacugccuccacgugguggggcccaacgucaacaagggcgaggacauccagcugcugaagagcgccuacgagaacuucaaccagcacgaggugcuccuggcgccgcugcucuccgccgggaucuucggcgccgaccccauccacagccugcgggugugcgucgacaccgugcgcaccaacguguaccuggccgucuucgacaagaaccucuacgacaagcugguguccagcuuccuggagaugaagagcgagaagcagguggagcagaagaucgccgagauccccaaggaggaggucaagcccuucaucaccgaguccaagccgagcguggagcagcggaagcaggacgacaagaagaucaaggcgugcguggaggaggucacgaccacccucgaggagaccaaguuccugacggagaaccugcuccuguacaucgacaucaacgggaaccugcaccccgacuccgccacccucgugagcgacaucgacaucaccuuccugaagaaggacgcccccuacaucgugggcgacgucgugcaggagggcgugcugaccgccgucgugauccccacgaagaaggccgggggcaccaccgagaugcucgcgaaggcccugcgcaaggugccgaccgacaacuacaucacgaccuaccccgggcagggccugaacggguacaccgucgaggaggccaagaccgugcucaagaagugcaaguccgccuucuacauccugcccagcaucaucuccaacgagaagcaggagauccugggcaccgugagcuggaaccuccgggagaugcuggcgcacgccgaggagacgcgcaagcugaugcccgucugcguggagaccaaggccaucguguccaccauccagcggaaguacaagggcaucaagauccaggagggggucguggacuacggcgcccgcuucuacuucuacaccagcaagacgaccguggccucccugaucaacacccucaacgaccugaacgagacccuggucacgaugccgcucggguacgugacccacggccugaaccuggaggaggcggcccgguacaugcgcagccucaaggugcccgccaccgucuccgugagcucccccgacgccgugaccgccuacaacggguaccugacgagcuccagcaagacccccgaggagcacuucaucgagaccaucucccuggcgggcagcuacaaggacuggagcuacuccggccagagcacccagcucgggaucgaguuccugaagcggggcgacaaguccgucuacuacacgagcaacccgaccaccuuccaccuggacggggaggugaucaccuucgacaaccucaagacgcugcugucccuccgcgaggugcggaccaucaaggucuucaccaccguggacaacaucaaccugcacacgcagguggucgacaugagcaugaccuacggccagcaguucggccccaccuaccuggacggggccgacgugaccaagaucaagccccacaacucccacgagggcaagacguucuacgugcucccgaacgacgacacccugcgcgucgaggccuucgaguacuaccacaccaccgaccccagcuuccuggggcgguacauguccgcccucaaccacacgaagaaguggaaguacccccaggugaacggccugaccagcaucaagugggccgacaacaacugcuaccuggcgaccgcccuccugacccugcagcagaucgagcucaaguucaaccccccggcccugcaggacgccuacuaccgcgcgcgggccggggaggccgccaacuucugcgcccugauccucgcguacugcaacaagacggugggcgagcugggcgacguccgcgagaccauguccuaccuguuccagcacgccaaccucgacagcugcaagcgggugcugaacgucgugugcaagaccugcgggcagcagcagaccacccugaagggcguggaggccgucauguacauggggacgcucuccuacgagcaguucaagaagggcgugcagauccccugcaccugcgggaagcaggccaccaaguaccuggugcagcaggagagccccuucgucaugauguccgcccccccggcgcaguacgagcugaagcacggcaccuucacgugcgccagcgaguacaccggcaacuaccagugcgggcacuacaagcacaucaccuccaaggagacccucuacugcaucgacggcgcccugcugacgaagagcagcgaguacaaggggcccaucaccgacguguucuacaaggagaacuccuacaccaccacgaucaagcccgugaccuacaagcucgacggcgucgugugcaccgagaucgaccccaagcuggacaacuacuacaagaaggacaacagcuacuucaccgagcagccgaucgaccuggugcccaaccagcccuaccccaacgccuccuucgacaacuucaaguucgucugcgacaacaucaaguucgccgacgaccucaaccagcugacgggguacaagaagccggcgagccgcgagcugaaggugaccuucuuccccgaccucaacggcgacguggucgccaucgacuacaagcacuacacccccuccuucaagaagggcgccaagcugcugcacaagcccaucguguggcacgugaacaacgccaccaacaaggcgacguacaagccgaacaccuggugcauccggugccucuggagcaccaagcccgucgagaccuccaacagcuucgacgugcugaaguccgaggacgcccaggggauggacaaccuggccugcgaggaccucaagcccgugagcgaggaggucguggagaaccccacgauccagaaggacgugcuggagugcaacgucaagaccaccgagguggugggcgacaucauccugaagccggccaacaacucccucaagaucaccgaggaggucgggcacacggaccugauggccgcguacguggacaacagcucccugaccaucaagaagcccaacgagcucagccgcgugcugggccugaagacccucgccacccacgggcuggccgccgucaacuccgugcccugggacacgaucgccaacuacgcgaagccguuccugaacaagguggucagcaccaccaccaacaucgugacgcgcugccucaaccgggugugcaccaacuacaugcccuacuucuucacccugcugcuccagcugugcaccuucacccgcuccacgaacagccggaucaaggccuccaugcccaccaccaucgccaagaacaccgucaagagcgugggcaaguucugccuggaggccagcuucaacuaccucaagucccccaacuucagcaagcugaucaacaucaucaucugguuccugcuccuguccgugugccugggcagccucaucuacuccacggccgcgcuggggguccugaugagcaaccucggcaugccguccuacugcaccggguaccgcgagggcuaccugaacagcaccaacgugaccaucgccacguacugcaucggcuccauccccugcagcgugugccuguccgggcucgacagccuggacaccuaccccucccuggagaccauccagaucaccaucagcuccuucaagugggaccucacggccuucggccuggucgccgagugguuccuggccuacauccucuucacccgguucuucuacgugcuggggcuggcggccaucaugcagcucuucuucagcuacuucgccgugcacuucaucuccaacagcuggcugauguggcugaucaucaaccugguccagauggcccccaucuccgcgauggugcgcauguacaucuucuucgccagcuucuacuacguguggaagagcuacguccacgugguggacggcugcaacuccagcaccugcaugaugugcuacaagcggaaccgcgccacccgggucgagugcacgaccaucgugaacgggguccgccgguccuucuacguguacgccaacggcggcaagggguucugcaagcuccacaacuggaacugcgugaacugcgacaccuucugcgccggcagcaccuucaucuccgacgaggucgcgcgcgaccugagccugcaguucaagcggccgaucaaccccacggaccaguccagcuacaucguggacuccgugaccgucaagaacgggagcauccaccucuacuucgacaaggccggccagaagaccuacgagcgccacucccugagccacuucgugaaccuggacaaccuccgggccaacaacaccaaggggucccugcccaucaacgugaucgucuucgacggcaagagcaagugcgaggaguccagcgccaaguccgccagcguguacuacucccagcugaugugccagcccauccuccugcuggaccaggcgcucgugagcgacgucggcgacagcgccgagguggccgugaagauguucgacgccuacgucaacacguucuccagcaccuucaacgugccgauggagaagcugaagacccugguggccaccgcggaggccgagcucgccaagaacgucucccuggacaacgugcugagcacguucaucuccgccgcgcgccagggguucguggacagcgacgucgagaccaaggacgugguggagugccucaagcugucccaccagagcgacaucgaggucaccggcgacuccugcaacaacuacaugcugaccuacaacaagguggagaacaugacgccccgggaccucggggccugcaucgacugcagcgcccgccacaucaacgcccagguggccaagucccacaacaucgcgcugaucuggaacgucaaggacuucaugagccuguccgagcagcuccggaagcagauccgcagcgccgccaagaagaacaaccugcccuucaagcugaccugcgccaccacccgccagguggugaacgucgugacgaccaagaucgcccucaagggcgggugaggacuagucccuguucccagagcccacuuuuuuuucuuuuuuugaaauaaaauagccugucuuucagaucucaaaggcucuuuucagagccaccaaaaaaaaaaaaaaaaaaaaaaaaaaaaaaaaaaaaaaaaaaaaaaaaaaaaaaaaaaaaaaaaaaaaaaaaaaaaaaaaaaaaaaaaaaaaaaaaaaaaa

SEQ ID NO: 19589 - RNA, 6113 nt, Artificial Sequence
  SARS-CoV-2__MT876547.1__non-structural protein 3 (NSP3) mRNA gc
aggagagucccgcagucggcguccagcggcucugcuuguucgugugugugucguugcaggccuuauucaagcuuaccauggcccccaccaaggugaccuucggcgacgacacggucaucgaggugcagggguacaagagcgugaacaucaccuucgagcuggacgagcgcaucgacaagguccucaacgagaagugcuccgccuacaccguggagcugggcaccgaggugaacgaguucgcgugcgucguggccgacgccgugaucaagacgcugcagccggucagcgagcuccugaccccccuggggaucgaccucgacgagugguccauggccaccuacuaccuguucgacgagagcggcgaguucaagcuggccucccacauguacugcagcuucuacccccccgacgaggacgaggaggagggggacugcgaggaggaggaguucgagccguccacccaguacgaguacggcacggaggacgacuaccagggcaagccccucgaguucggggcgaccagcgccgcccugcagcccgaggaggagcaggaggaggacuggcuggacgacgacucccagcagaccgugggccagcaggacgggagcgaggacaaccagaccacgaccauccagaccaucguggagguccagccccagcucgagauggagcugaccccgguggugcagacgaucgaggucaacuccuucagcggcuaccugaagcucaccgacaacguguacaucaagaacgccgacaucguggaggaggcgaagaaggucaagcccaccgugguggucaacgccgccaacguguaccugaagcacgggggcggcguggccggggcccugaacaaggcgaccaacaacgccaugcaggucgaguccgacgacuacaucgccacgaacggcccccucaagguggggggcagcugcguccuguccggccacaaccuggccaagcacugccuccacgugguggggcccaacgucaacaagggcgaggacauccagcugcugaagagcgccuacgagaacuucaaccagcacgaggugcuccuggcgccgcugcucuccgccgggaucuucggcgccgaccccauccacagccugcgggugugcgucgacaccgugcgcaccaacguguaccuggccgucuucgacaagaaccucuacgacaagcugguguccagcuuccuggagaugaagagcgagaagcagguggagcagaagaucgccgagauccccaaggaggaggucaagcccuucaucaccgaguccaagccgagcguggagcagcggaagcaggacgacaagaagaucaaggcgugcguggaggaggucacgaccacccucgaggagaccaaguuccugacggagaaccugcuccuguacaucgacaucaacgggaaccugcaccccgacuccgccacccucgugagcgacaucgacaucaccuuccugaagaaggacgcccccuacaucgugggcgacgucgugcaggagggcgugcugaccgccgucgugauccccacgaagaaggccgggggcaccaccgagaugcucgcgaaggcccugcgcaaggugccgaccgacaacuacaucacgaccuaccccgggcagggccugaacggguacaccgucgaggaggccaagaccgugcucaagaagugcaaguccgccuucuacauccugcccagcaucaucuccaacgagaagcaggagauccugggcaccgugagcuggaaccuccgggagaugcuggcgcacgccgaggagacgcgcaagcugaugcccgucugcguggagaccaaggccaucguguccaccauccagcggaaguacaagggcaucaagauccaggagggggucguggacuacggcgcccgcuucuacuucuacaccagcaagacgaccguggccucccugaucaacacccucaacgaccugaacgagacccuggucacgaugccgcucggguacgugacccacggccugaaccuggaggaggcggcccgguacaugcgcagccucaaggugcccgccaccgucuccgugagcucccccgacgccgugaccgccuacaacggguaccugacgagcuccagcaagacccccgaggagcacuucaucgagaccaucucccuggcgggcagcuacaaggacuggagcuacuccggccagagcacccagcucgggaucgaguuccugaagcggggcgacaaguccgucuacuacacgagcaacccgaccaccuuccaccuggacggggaggugaucaccuucgacaaccucaagacgcugcugucccuccgcgaggugcggaccaucaaggucuucaccaccguggacaacaucaaccugcacacgcagguggucgacaugagcaugaccuacggccagcaguucggccccaccuaccuggacggggccgacgugaccaagaucaagccccacaacucccacgagggcaagacguucuacgugcucccgaacgacgacacccugcgcgucgaggccuucgaguacuaccacaccaccgaccccagcuuccuggggcgguacauguccgcccucaaccacacgaagaaguggaaguacccccaggugaacggccugaccagcaucaagugggccgacaacaacugcuaccuggcgaccgcccuccugacccugcagcagaucgagcucaaguucaaccccccggcccugcaggacgccuacuaccgcgcgcgggccggggaggccgccaacuucugcgcccugauccucgcguacugcaacaagacggugggcgagcugggcgacguccgcgagaccauguccuaccuguuccagcacgccaaccucgacagcugcaagcgggugcugaacgucgugugcaagaccugcgggcagcagcagaccacccugaagggcguggaggccgucauguacauggggacgcucuccuacgagcaguucaagaagggcgugcagauccccugcaccugcgggaagcaggccaccaaguaccuggugcagcaggagagccccuucgucaugauguccgcccccccggcgcaguacgagcugaagcacggcaccuucacgugcgccagcgaguacaccggcaacuaccagugcgggcacuacaagcacaucaccuccaaggagacccucuacugcaucgacggcgcccugcugacgaagagcagcgaguacaaggggcccaucaccgacguguucuacaaggagaacuccuacaccaccacgaucaagcccgugaccuacaagcucgacggcgucgugugcaccgagaucgaccccaagcuggacaacuacuacaagaaggacaacagcuacuucaccgagcagccgaucgaccuggugcccaaccagcccuaccccaacgccuccuucgacaacuucaaguucgucugcgacaacaucaaguucgccgacgaccucaaccagcugacgggguacaagaagccggcgagccgcgagcugaaggugaccuucuuccccgaccucaacggcgacguggucgccaucgacuacaagcacuacacccccuccuucaagaagggcgccaagcugcugcacaagcccaucguguggcacgugaacaacgccaccaacaaggcgacguacaagccgaacaccuggugcauccggugccucuggagcaccaagcccgucgagaccuccaacagcuucgacgugcugaaguccgaggacgcccaggggauggacaaccuggccugcgaggaccucaagcccgugagcgaggaggucguggagaaccccacgauccagaaggacgugcuggagugcaacgucaagaccaccgagguggugggcgacaucauccugaagccggccaacaacucccucaagaucaccgaggaggucgggcacacggaccugauggccgcguacguggacaacagcucccugaccaucaagaagcccaacgagcucagccgcgugcugggccugaagacccucgccacccacgggcuggccgccgucaacuccgugcccugggacacgaucgccaacuacgcgaagccguuccugaacaagguggucagcaccaccaccaacaucgugacgcgcugccucaaccgggugugcaccaacuacaugcccuacuucuucacccugcugcuccagcugugcaucuucacccgcuccaccaacagccggaucaaggccuccaugcccacgaccaucgccaagaacaccgucaagagcgugggcaaguucugccuggaggccagcuucaacuaccucaagucccccaacuucagcaagcugaucaacaucaucaucugguuccugcuccuguccgugugccugggcagccucaucuacuccaccgccgcgcuggggguccugaugagcaaccucggcaugccguccuacugcacgggguaccgcgagggcuaccugaacagcaccaacgugaccaucgccaccuacugcacgggcuccauccccugcagcgugugccuguccgggcucgacagccuggacaccuaccccucccuggagaccauccagaucaccaucagcuccuucaagugggaccucacggccuucggccuggucgccgagugguuccuggccuacauccucuucacccgguucuucuacgugcuggggcuggcggccaucaugcagcucuucuucagcuacuucgccgugcacuucaucuccaacagcuggcugauguggcugaucaucaaccugguccagauggcccccaucuccgcgauggugcgcauguacaucuucuucgccagcuucuacuacguguggaagagcuacguccacgugguggacggcugcaacuccagcaccugcaugaugugcuacaagcggaaccgcgccacccgggucgagugcacgaccaucgugaacgggguccgccgguccuucuacguguacgccaacggcggcaagggguucugcaagcuccacaacuggaacugcgugaacugcgacaccuucugcgccggcagcaccuucaucuccgacgaggucgcgcgcgaccugagccugcaguucaagcggccgaucaaccccacggaccaguccagcuacaucguggacuccgugaccgucaagaacgggagcauccaccucuacuucgacaaggccggccagaagaccuacgagcgccacucccugagccacuucgugaaccuggacaaccuccgggccaacaacaccaaggggucccugcccaucaacgugaucgucuucgacggcaagagcaagugcgaggaguccagcgccaaguccgccagcguguacuacucccagcugaugugccagcccauccuccugcuggaccaggcgcucgugagcgacgucggcgacagcgccgagguggccgugaagauguucgacgccuacgucaacacguucuccagcaccuucaacgugccgauggagaagcugaagacccugguggccaccgcggaggccgagcucgccaagaacgucucccuggacaacgugcugagcacguucaucuccgccgcgcgccagggguucguggacagcgacgucgagaccaaggacgugguggagugccucaagcugucccaccagagcgacaucgaggucaccggcgacuccugcaacaacuacaugcugaccuacaacaagguggagaacaugacgccccgggaccucggggccugcaucgacugcagcgcccgccacaucaacgcccagguggccaagucccacaacaucgcgcugaucuggaacgucaaggacuucaugagccuguccgagcagcuccggaagcagauccgcagcgccgccaagaagaacaaccugcccuucaagcugaccugcgccaccacccgccagguggugaacgucgugacgaccaagaucgcccucaagggcgggugaggacuagucccuguucccagagcccacuuuuuuuucuuuuuuugaaauaaaauagccugucuuucagaucucaaaggcucuuuucagagccaccaaaaaaaaaaaaaaaaaaaaaaaaaaaaaaaaaaaaaaaaaaaaaaaaaaaaaaaaaaaaaaaaaaaaaaaaaaaaaaaaaaaaaaaaaaaaaaaaaaaaa

SEQ ID NO: 19590 - RNA, 6113 nt, Artificial Sequence
  SARS-CoV-2__MT876555.1__non-structural protein 3 (NSP3) mRNA gc
aggagagucccgcagucggcguccagcggcucugcuuguucgugugugugucguugcaggccuuauucaagcuuaccauggcccccaccaaggugaccuucggcgacgacacggucaucgaggugcagggguacaagagcgugaacaucaccuucgagcuggacgagcgcaucgacaagguccucaacgagaagugcuccgccuacaccguggagcugggcaccgaggugaacgaguucgcgugcgucguggccgacgccgugaucaagauccugcagccggucagcgagcuccugacgccccuggggaucgaccucgacgagugguccauggccaccuacuaccuguucgacgagagcggcgaguucaagcuggccucccacauguacugcagcuucuacccccccgacgaggacgaggaggagggggacugcgaggaggaggaguucgagccguccacccaguacgaguacggcaccgaggacgacuaccagggcaagccccucgaguucggggcgacgagcgccgcccugcagcccgaggaggagcaggaggaggacuggcuggacgacgacucccagcagaccgugggccagcaggacgggagcgaggacaaccagaccaccacgauccagaccaucguggagguccagccccagcucgagauggagcugaccccgguggugcagaccaucgaggucaacuccuucagcggcuaccugaagcucacggacaacguguacaucaagaacgccgacaucguggaggaggcgaagaaggucaagcccaccgugguggucaacgccgccaacguguaccugaagcacgggggcggcguggccggggcccugaacaaggcgaccaacaacgccaugcaggucgaguccgacgacuacaucgccaccaacggcccccucaagguggggggcagcugcguccuguccggccacaaccuggccaagcacugccuccacgugguggggcccaacgucaacaagggcgaggacauccagcugcugaagagcgccuacgagaacuucaaccagcacgaggugcuccuggcgccgcugcucuccgccgggaucuucggcgccgaccccauccacagccugcgggugugcgucgacacggugcgcaccaacguguaccuggccgucuucgacaagaaccucuacgacaagcugguguccagcuuccuggagaugaagagcgagaagcagguggagcagaagaucgccgagauccccaaggaggaggucaagcccuucaucaccgaguccaagccgagcguggagcagcggaagcaggacgacaagaagaucaaggcgugcguggaggaggucaccacgacccucgaggagaccaaguuccugaccgagaaccugcuccuguacaucgacaucaacgggaaccugcaccccgacuccgccacgcucgugagcgacaucgacaucaccuuccugaagaaggacgcccccuacaucgugggcgacgucgugcaggagggcgugcugaccgccgucgugauccccaccaagaaggccgggggcacgaccgagaugcucgcgaaggcccugcgcaaggugccgaccgacaacuacaucaccacguaccccgggcagggccugaacggguacaccgucgaggaggccaagaccgugcucaagaagugcaaguccgccuucuacauccugcccagcaucaucuccaacgagaagcaggagauccugggcaccgugagcuggaaccuccgggagaugcuggcgcacgccgaggagacccgcaagcugaugcccgucugcguggagacgaaggccaucguguccaccauccagcggaaguacaagggcaucaagauccaggagggggucguggacuacggcgcccgcuucuacuucuacaccagcaagaccacgguggccucccugaucaacacccucaacgaccugaacgagacccuggucaccaugccgcucggguacgugacgcacggccugaaccuggaggaggcggcccgguacaugcgcagccucaaggugcccgccaccgucuccgugagcucccccgacgccgugaccgccuacaacggguaccugaccagcuccagcaagacgcccgaggagcacuucaucgagaccaucucccuggcgggcagcuacaaggacuggagcuacuccggccagagcacccagcucgggaucgaguuccugaagcggggcgacaaguccgucuacuacaccagcaacccgacgaccuuccaccuggacggggaggugaucaccuucgacaaccucaagacccugcugucccuccgcgaggugcggacgaucaaggucuucaccaccguggacaacaucaaccugcacacccagguggucgacaugagcaugacguacggccagcaguucggccccaccuaccuggacggggccgacgugaccaagaucaagccccacaacucccacgagggcaagaccuucuacgugcucccgaacgacgacacgcugcgcgucgaggccuucgaguacuaccacaccaccgaccccagcuuccuggggcgguacauguccgcccucaaccacaccaagaaguggaaguacccccaggugaacggccugacgagcaucaagugggccgacaacaacugcuaccuggcgaccgcccuccugacccugcagcagaucgagcucaaguucaaccccccggcccugcaggacgccuacuaccgcgcgcgggccggggaggccgccaacuucugcgcccugauccucgcguacugcaacaagaccgugggcgagcugggcgacguccgcgagacgauguccuaccuguuccagcacgccaaccucgacagcugcaagcgggugcugaacgucgugugcaagaccugcgggcagcagcagaccacccugaagggcguggaggccgucauguacauggggacccucuccuacgagcaguucaagaagggcgugcagauccccugcacgugcgggaagcaggccaccaaguaccuggugcagcaggagagccccuucgucaugauguccgcccccccggcgcaguacgagcugaagcacggcaccuucaccugcgccagcgaguacacgggcaacuaccagugcgggcacuacaagcacaucaccuccaaggagacccucuacugcaucgacggcgcccugcugaccaagagcagcgaguacaaggggcccaucacggacguguucuacaaggagaacuccuacaccaccaccaucaagcccgugacguacaagcucgacggcgucgugugcaccgagaucgaccccaaccuggacaacuacuacaagaaggacaacagcuacuucaccgagcagccgaucgaccuggugcccaaccagcccuaccccaacgccuccuucgacaacuucaaguucgucugcgacaacaucaaguucgccgacgaccucaaccagcugaccggguacaagaagccggcgagccgcgagcugaaggugacguucuuccccgaccucaacggcgacguggucgccaucgacuacaagcacuacacccccuccuucaagaagggcgccaagcugcugcacaagcccaucguguggcacgugaacaacgccaccaacaaggcgaccuacaagccgaacacguggugcauccggugccucuggagcaccaagcccgucgagaccuccaacagcuucgacgugcugaaguccgaggacgcccaggggauggacaaccuggccugcgaggaccucaagcccgugagcgaggaggucguggagaaccccaccauccagaaggacgugcuggagugcaacgucaagacgaccgagguggugggcgacaucauccugaagccggccaacaacucccucaagaucaccgaggaggucgggcacaccgaccugauggccgcguacguggacaacagcucccugacgaucaagaagcccaacgagcucagccgcgugcugggccugaagacccucgccacccacgggcuggccgccgucaacuccgugcccugggacaccaucgccaacuacgcgaagccguuccugaacaagguggucagcacgaccaccaacaucgugacccgcugccucaaccgggugugcacgaacuacaugcccuacuucuucacccugcugcuccagcugugcaccuucacccgcuccaccaacagccggaucaaggccuccaugcccacgaccaucgccaagaacaccgucaagagcgugggcaaguucugccuggaggccagcuucaacuaccucaagucccccaacuucagcaagcugaucaacaucaucaucugguuccugcuccuguccgugugccugggcagccucaucuacuccaccgccgcgcuggggguccugaugagcaaccucggcaugccguccuacugcacgggguaccgcgagggcuaccugaacagcaccaacgugaccaucgccaccuacugcacgggcuccauccccugcagcgugugccuguccgggcucgacagccuggacaccuaccccucccuggagaccauccagaucaccaucagcuccuucaagugggaccucacggccuucggccuggucgccgagugguuccuggccuacauccucuucacccgguucuucuacgugcuggggcuggcggccaucaugcagcucuucuucagcuacuucgccgugcacuucaucuccaacagcuggcugauguggcugaucaucaaccugguccagauggcccccaucuccgcgauggugcgcauguacaucuucuucgccagcuucuacuacguguggaagagcuacguccacgugguggacggcugcaacuccagcaccugcaugaugugcuacaagcggaaccgcgccacccgggucgagugcacgaccaucgugaacgggguccgccgguccuucuacguguacgccaacggcggcaagggguucugcaagcuccacaacuggaacugcgugaacugcgacaccuucugcgccggcagcaccuucaucuccgacgaggucgcgcgcgaccugagccugcaguucaagcggccgaucaaccccacggaccaguccagcuacaucguggacuccgugaccgucaagaacgggagcauccaccucuacuucgacaaggccggccagaagaccuacgagcgccacucccugagccacuucgugaaccuggacaaccuccgggccaacaacaccaaggggucccugcccaucaacgugaucgucuucgacggcaagagcaagugcgaggaguccagcgccaaguccgccagcguguacuacucccagcugaugugccagcccauccuccugcuggaccaggcgcucgugagcgacgucggcgacagcgccgagguggccgugaagauguucgacgccuacgucaacacguucuccagcaccuucaacgugccgauggagaagcugaagacccugguggccaccgcggaggccgagcucgccaagaacgucucccuggacaacgugcugagcacguucaucuccgccgcgcgccagggguucguggacagcgacgucgagaccaaggacgugguggagugccucaagcugucccaccagagcgacaucgaggucaccggcgacuccugcaacaacuacaugcugaccuacaacaagguggagaacaugacgccccgggaccucggggccugcaucgacugcagcgcccgccacaucaacgcccagguggccaagucccacaacaucgcgcugaucuggaacgucaaggacuucaugagccuguccgagcagcuccggaagcagauccgcagcgccgccaagaagaacaaccugcccuucaagcugaccugcgccaccacccgccagguggugaacgucgugacgaccaagaucgcccucaagggcgggugaggacuagucccuguucccagagcccacuuuuuuuucuuuuuuugaaauaaaauagccugucuuucagaucucaaaggcucuuuucagagccaccaaaaaaaaaaaaaaaaaaaaaaaaaaaaaaaaaaaaaaaaaaaaaaaaaaaaaaaaaaaaaaaaaaaaaaaaaaaaaaaaaaaaaaaaaaaaaaaaaaaaa

SEQ ID NO: 19591 - RNA, 6113 nt, Artificial Sequence
  SARS-CoV-2__MT876556.1__non-structural protein 3 (NSP3) mRNA gc
aggagagucccgcagucggcguccagcggcucugcuuguucgugugugugucguugcaggccuuauucaagcuuaccauggcccccaccaaggugaccuucggcgacgacacggucaucgaggugcagggguacaagagcgugaacaucaccuucgagcuggacgcccgcaucgacaagguccucaacgagaagugcuccgcguacaccguggagcugggcaccgaggugaacgaguucgccugcgucguggccgacgccgugaucaagacgcugcagccggucagcgagcuccugaccccccuggggaucgaccucgacgagugguccauggccaccuacuaccuguucgacgagagcggcgaguucaagcuggcgucccacauguacugcagcuucuacccccccgacgaggacgaggaggagggggacugcgaggaggaggaguucgagccguccacccaguacgaguacggcacggaggacgacuaccagggcaagccccucgaguucggggccaccagcgccgcccugcagcccgaggaggagcaggaggaggacuggcuggacgacgacucccagcagaccgugggccagcaggacgggagcgaggacaaccagaccacgaccauccagaccaucguggagguccagccccagcucgagauggagcugaccccgguggugcagacgaucgaggucaacuccuucagcggcuaccugaagcucaccgacaacguguacaucaagaacgcggacaucguggaggaggccaagaaggucaagcccaccgugguggucaacgccgccaacguguaccugaagcacgggggcggcguggccggggcgcugaacaaggccaccaacaacgccaugcaggucgaguccgacgacuacaucgccacgaacggcccccucaagguggggggcagcugcguccuguccggccacaaccuggccaagcacugccuccacgugguggggcccaacgucaacaagggcgaggacauccagcugcugaagagcgcguacgagaacuucaaccagcacgaggugcuccuggccccgcugcucuccgccgggaucuucggcgccgaccccauccacagccugcgggugugcgucgacaccgugcgcaccaacguguaccuggccgucuucgacaagaaccucuacgacaagcugguguccagcuuccuggagaugaagagcgagaagcagguggagcagaagaucgcggagauccccaaggaggaggucaagcccuucaucaccgaguccaagccgagcguggagcagcggaagcaggacgacaagaagaucaaggccugcguggaggaggucacgaccacccucgaggagaccaaguuccugacggagaaccugcuccuguacaucgacaucaacgggaaccugcaccccgacuccgccacccucgugagcgacaucgacaucaccuuccugaagaaggacgcccccuacaucgugggcgacgucgugcaggagggcgugcugaccgccgucgugauccccacgaagaaggcggggggcaccaccgagaugcucgccaaggcccugcgcaaggugccgaccgacaacuacaucacgaccuaccccgggcagggccugaacggguacaccgucgaggaggccaagaccgugcucaagaagugcaaguccgcguucuacauccugcccagcaucaucuccaacgagaagcaggagauccugggcaccgugagcuggaaccuccgggagaugcuggcccacgccgaggagacgcgcaagcugaugcccgucugcguggagaccaaggccaucguguccaccauccagcggaaguacaagggcaucaagauccaggagggggucguggacuacggcgcccgcuucuacuucuacaccagcaagacgaccguggcgucccugaucaacacccucaacgaccugaacgagacccuggucacgaugccgcucggguacgugacccacggccugaaccuggaggaggccgcccgguacaugcgcagccucaaggugcccgccaccgucuccgugagcucccccgacgccgugaccgcguacaacggguaccugacgagcuccagcaagacccccgaggagcacuucaucgagaccaucucccuggccggcagcuacaaggacuggagcuacuccggccagagcacccagcucgggaucgaguuccugaagcggggcgacaaguccgucuacuacacgagcaacccgaccaccuuccaccuggacggggaggugaucaccuucgacaaccucaagacgcugcugucccuccgcgaggugcggaccaucaaggucuucaccaccguggacaacaucaaccugcacacgcagguggucgacaugagcaugaccuacggccagcaguucggccccaccuaccuggacggggccgacgugaccaagaucaagccccacaacucccacgagggcaagacguucuacgugcucccgaacgacgacacccugcgcgucgaggccuucgaguacuaccacaccaccgaccccagcuuccuggggcgguacauguccgcccucaaccacacgaagaaguggaaguacccccaggugaacggccugaccagcaucaagugggcggacaacaacugcuaccuggccaccgcccuccugacccugcagcagaucgagcucaaguucaaccccccggcccugcaggacgcguacuaccgcgcccgggccggggaggccgccaacuucugcgcgcugauccucgccuacugcaacaagacggugggcgagcugggcgacguccgcgagaccauguccuaccuguuccagcacgccaaccucgacagcugcaagcgggugcugaacgucgugugcaagaccugcgggcagcagcagaccacccugaagggcguggaggccgucauguacauggggacgcucuccuacgagcaguucaagaagggcgugcagauccccugcaccugcgggaagcaggccaccaaguaccuggugcagcaggagagccccuucgucaugauguccgcgcccccggcccaguacgagcugaagcacggcaccuucacgugcgccagcgaguacaccggcaacuaccagugcgggcacuacaagcacaucaccuccaaggagacccucuacugcaucgacggcgcccugcugacgaagagcagcgaguacaaggggcccaucaccgacguguucuacaaggagaacuccuacaccaccacgaucaagcccgugaccuacaagcucgacggcgucgugugcaccgagaucgaccccaagcuggacaacuacuacaagaaggacaacagcuacuucaccgagcagccgaucgaccuggugcccaaccagcccuaccccaacgccuccuucgacaacuucaaguucgucugcgacaacaucaaguucgcggacgaccucaaccagcugacgggguacaagaagccggccagccgcgagcugaaggugaccuucuuccccgaccucaacggcgacguggucgccaucgacuacaagcacuacacccccuccuucaagaagggcgccaagcugcugcacaagcccaucguguggcacgugaacaacgcgaccaacaaggccacguacaagccgaacaccuggugcauccggugccucuggagcaccaagcccgucgagaccuccaacagcuucgacgugcugaaguccgaggacgcccaggggauggacaaccuggccugcgaggaccucaagcccgugagcgaggaggucguggagaaccccacgauccagaaggacgugcuggagugcaacgucaagaccaccgagguggugggcgacaucauccugaagccggccaacaacucccucaagaucaccgaggaggucgggcacacggaccugauggcggccuacguggacaacagcucccugaccaucaagaagcccaacgagcucagccgcgugcugggccugaagacccucgccacccacgggcuggccgccgucaacuccgugcccugggacacgaucgcgaacuacgccaagccguuccugaacaagguggucagcaccaccaccaacaucgugacgcgcugccucaaccgggugugcaccaacuacaugcccuacuucuucacccugcugcuccagcugugcaccuucacccgcuccacgaacagccggaucaaggccuccaugcccaccaccaucgccaagaacaccgucaagagcgugggcaaguucugccuggaggccagcuucaacuaccucaagucccccaacuucagcaagcugaucaacaucaucaucugguuccugcuccuguccgugugccugggcagccucaucuacuccacggcggcccuggggguccugaugagcaaccucggcaugccguccuacugcaccggguaccgcgagggcuaccugaacagcaccaacgugaccaucgccacguacugcaccggcuccauccccugcagcgugugccuguccgggcucgacagccuggacaccuaccccucccuggagaccauccagaucacgaucagcuccuucaagugggaccucaccgccuucggccuggucgccgagugguuccuggcguacauccucuucacccgguucuucuacgugcuggggcuggccgccaucaugcagcucuucuucagcuacuucgccgugcacuucaucuccaacagcuggcugauguggcugaucaucaaccugguccagauggcgcccaucuccgccauggugcgcauguacaucuucuucgccagcuucuacuacguguggaagagcuacguccacgugguggacggcugcaacuccagcaccugcaugaugugcuacaagcggaaccgcgccacgcgggucgagugcaccaccaucgugaacgggguccgccgguccuucuacguguacgccaacggcggcaagggguucugcaagcuccacaacuggaacugcgugaacugcgacaccuucugcgcgggcagcacguucaucuccgacgaggucgcccgcgaccugagccugcaguucaagcggccgaucaaccccaccgaccaguccagcuacaucguggacuccgugaccgucaagaacgggagcauccaccucuacuucgacaaggccggccagaagaccuacgagcgccacucccugagccacuucgugaaccuggacaaccuccgggccaacaacacgaaggggucccugcccaucaacgugaucgucuucgacggcaagagcaagugcgaggaguccagcgccaaguccgcgagcguguacuacucccagcugaugugccagcccauccuccugcuggaccaggcccucgugagcgacgucggcgacagcgccgagguggccgugaagauguucgacgccuacgucaacaccuucuccagcaccuucaacgugccgauggagaagcugaagacccugguggcgacggccgaggccgagcucgccaagaacgucucccuggacaacgugcugagcaccuucaucuccgcggcccgccagggguucguggacagcgacgucgagaccaaggacgugguggagugccucaagcugucccaccagagcgacaucgaggucaccggcgacuccugcaacaacuacaugcugacguacaacaagguggagaacaugaccccccgggaccucggggccugcaucgacugcagcgcccgccacaucaacgcccagguggcgaagucccacaacaucgcccugaucuggaacgucaaggacuucaugagccuguccgagcagcuccggaagcagauccgcagcgccgccaagaagaacaaccugcccuucaagcugaccugcgccaccacgcgccagguggugaacgucgugaccaccaagaucgcgcucaagggcgggugaggacuagucccuguucccagagcccacuuuuuuuucuuuuuuugaaauaaaauagccugucuuucagaucucaaaggcucuuuucagagccaccaaaaaaaaaaaaaaaaaaaaaaaaaaaaaaaaaaaaaaaaaaaaaaaaaaaaaaaaaaaaaaaaaaaaaaaaaaaaaaaaaaaaaaaaaaaaaaaaaaaaa

SEQ ID NO: 19592 - RNA, 6113 nt, Artificial Sequence
  SARS-CoV-2__MT876598.1__non-structural protein 3 (NSP3) mRNA gc
aggagagucccgcagucggcguccagcggcucugcuuguucgugugugugucguugcaggccuuauucaagcuuaccauggcccccaccaaggugaccuucggcgacgacacggucaucgaggugcagggguacaagagcgugaacaucaccuucgagcuggacgagcgcaucgacaagguccucaacgagaagugcuccgccuacaccguggagcugggcaccgaggugaacgaguucgcgugcgucguggccgacgccgugaucaagacgcugcagccggucagcgagcuccugaccccccuggggaucgaccucgacgagugguccauggccaccuacuaccuguucgacgagagcggcgaguucaagcuggccucccacauguacugcagcuucuacccccccgacgaggacgaggaggagggggacugcgaggaggaggaguucgagccguccacccaguacgaguacggcacggaggacgacuaccagggcaagccccucgaguucggggcgaccagcgccgcccugcagcccgaggaggagcaggaggaggacuggcuggacgacgacucccagcagaccgugggccagcaggacgggagcgaggacaaccagaccacgaccauccagaccaucguggagguccagccccagcucgagauggagcugaccccgguggugcagacgaucgaggucaacuccuucagcggcuaccugaagcucaccgacaacguguacaucaagaacgccgacaucguggaggaggcgaagaaggucaagcccaccgugguggucaacgccgccaacguguaccugaagcacgggggcggcguggccggggcccugaacaaggcgaccaacaacgccaugcaggucgaguccgacgacuacaucgccacgaacggcccccucaagguggggggcagcugcguccuguccggccacaaccuggccaagcacugccuccacgugguggggcccaacgucaacaagggcgaggacauccagcugcugaagagcgccuacgagaacuucaaccagcacgaggugcuccuggcgccgcugcucuccgccgggaucuucggcgccgaccccauccacagccugcgggugugcgucgacaccgugcgcaccaacguguaccuggccgucuucgacaagaaccucuacgacaagcugguguccagcuuccuggagaugaagagcgagaagcagguggagcagaagaucgccgagauccccaaggaggaggucaagcccuucaucaccgaguccaagccgagcguggagcagcggaagcaggacgacaagaagaucaaggcgugcguggaggaggucacgaccacccucgaggagaccaaguuccugacggagaaccugcuccuguacaucgacaucaacgggaaccugcaccccgacuccgccacccucgugagcgacaucgacaucaccuuccugaagaaggacgcccccuacaucgugggcgacgucgugcaggagggcgugcugaccgccgucgugauccccacgaagaaggccgggggcaccaccgagaugcucgcgaaggcccugcgcaaggugccgaccgacaacuacaucacgaccuaccccgggcagggccugaacggguacaccgucgaggaggccaagaccgugcucaagaagugcaaguccgccuucuacauccugcccagcaucaucuccaacgagaagcaggagauccugggcaccgugagcuggaaccuccgggagaugcuggcgcacgccgaggagacgcgcaagcugaugcccgucugcguggagaccaaggccaucguguccaccauccagcggaaguacaagggcaucaagauccaggagggggucguggacuacggcgcccgcuucuacuucuacaccagcaagacgaccguggccucccugaucaacacccucaacgaccugaacgagacccuggucacgaugccgcucggguacgugacccacggccugaaccuggaggaggcggcccgguacaugcgcagccucaaggugcccgccaccgucuccgugagcucccccgacgccgugaccgccuacaacggguaccugacgagcuccagcaagacccccgaggagcacuucaucgagaccgucucccuggcgggcagcuacaaggacuggagcuacuccggccagagcacccagcucgggaucgaguuccugaagcggggcgacaaguccguguacuacacgagcaacccgaccaccuuccaccuggacggggaggugaucaccuucgacaaccucaagacgcugcugucccuccgcgagguccggaccaucaagguguucaccaccguggacaacaucaaccugcacacgcaggucguggacaugagcaugaccuacggccagcaguucggccccaccuaccuggacggggccgacgugaccaagaucaagccccacaacucccacgagggcaagacguucuacguccucccgaacgacgacacccugcgcguggaggccuucgaguacuaccacaccaccgaccccagcuuccuggggcgguacauguccgcccucaaccacacgaagaaguggaaguacccccaggugaacggccugaccagcaucaagugggccgacaacaacugcuaccuggcgaccgcccuccugacccugcagcagaucgagcucaaguucaaccccccggcccugcaggacgccuacuaccgcgcgcgggccggggaggccgccaacuucugcgcccugauccucgcguacugcaacaagacggucggcgagcugggcgacgugcgcgagaccauguccuaccuguuccagcacgccaaccucgacagcugcaagcggguccugaacguggugugcaagaccugcgggcagcagcagaccacccugaagggcgucgaggccgugauguacauggggacgcucuccuacgagcaguucaagaagggcgugcagauccccugcaccugcgggaagcaggccaccaaguaccugguccagcaggagagccccuucgugaugauguccgcccccccggcgcaguacgagcugaagcacggcaccuucacgugcgccagcgaguacaccggcaacuaccagugcgggcacuacaagcacaucaccuccaaggagacccucuacugcaucgacggcgcccugcugacgaagagcagcgaguacaaggggcccaucaccgacguguucuacaaggagaacuccuacaccaccacgaucaagcccgucaccuacaagcucgacggcguggugugcaccgagaucgaccccaagcuggacaacuacuacaagaaggacaacagcuacuucaccgagcagccgaucgaccugguccccaaccagcccuaccccaacgccuccuucgacaacuucaaguucgugugcgacaacaucaaguucgccgacgaccucaaccagcugacgggguacaagaagccggcgagccgcgagcugaaggugaccuucuuccccgaccucaacggcgacgucguggccaucgacuacaagcacuacacccccuccuucaagaagggcgccaagcugcugcacaagcccaucguguggcacgucaacaacgccaccaacaaggcgacguacaagccgaacaccuggugcauccggugccucuggagcaccaagcccguggagaccuccaacagcuucgacgugcugaaguccgaggacgcccaggggauggacaaccuggccugcgaggaccucaagcccgucagcgaggaggugguggagaaccccacgauccagaaggacguccuggagugcaacgugaagaccaccgagguggucggcgacaucauccugaagccggccaacaacucccucaagaucaccgaggagguggggcacacggaccugauggccgcguacguggacaacagcucccugaccaucaagaagcccaacgagcucagccgcguccugggccugaagacccucgccacccacgggcuggccgccgugaacuccgugcccugggacacgaucgccaacuacgcgaagccguuccugaacaaggucgugagcaccaccaccaacaucgugacgcgcugccucaaccgggucugcaccaacuacaugcccuacuucuucacccugcugcuccagcugugcaccuucacccgcuccacgaacagccggaucaaggccuccaugcccaccaccaucgccaagaacaccgugaagagcgugggcaaguucugccuggaggccagcuucaacuaccucaagucccccaacuucagcaagcugaucaacaucaucaucugguuccugcuccuguccgucugccugggcagccucaucuacuccacggccgcgcugggggugcugaugagcaaccucggcaugccguccuacugcaccggguaccgcgagggcuaccugaacagcaccaacgugaccaucgccacguacugcaccggcuccauccccugcagcgucugccuguccgggcucgacagccuggacaccuaccccucccuggagaccauccagaucacgaucagcuccuucaagugggaccucaccgccuucggccugguggccgagugguuccuggccuacauccucuucacccgguucuucuacgugcuggggcuggcggccaucaugcagcucuucuucagcuacuucgccguccacuucaucuccaacagcuggcugauguggcugaucaucaaccuggugcagauggcccccaucuccgcgauggugcgcauguacaucuucuucgccagcuucuacuacgucuggaagagcuacgugcacguggucgacggcugcaacuccagcaccugcaugaugugcuacaagcggaaccgcgccacgcggguggagugcaccaccaucgucaacggggugcgccgguccuucuacguguacgccaacggcggcaagggguucugcaagcuccacaacuggaacugcgucaacugcgacaccuucugcgccggcagcacguucaucuccgacgagguggcgcgcgaccugagccugcaguucaagcggccgaucaaccccaccgaccaguccagcuacaucguggacuccgucaccgugaagaacgggagcauccaccucuacuucgacaaggccggccagaagaccuacgagcgccacucccugagccacuucgugaaccuggacaaccuccgggccaacaacacgaaggggucccugcccaucaacgucaucguguucgacggcaagagcaagugcgaggaguccagcgccaaguccgccagcguguacuacucccagcugaugugccagcccauccuccugcuggaccaggcgcucgucagcgacgugggcgacagcgccgagguggccgucaagauguucgacgccuacgugaacaccuucuccagcaccuucaacgugccgauggagaagcugaagacccuggucgccacggcggaggccgagcucgccaagaacgugucccuggacaacgugcugagcaccuucaucuccgccgcgcgccagggguucgucgacagcgacguggagaccaaggacguggucgagugccucaagcugucccaccagagcgacaucgaggugaccggcgacuccugcaacaacuacaugcugacguacaacaagguggagaacaugaccccccgggaccucggggccugcaucgacugcagcgcccgccacaucaacgcccaggucgccaagucccacaacaucgcgcugaucuggaacgugaaggacuucaugagccuguccgagcagcuccggaagcagauccgcagcgccgccaagaagaacaaccugcccuucaagcugaccugcgccaccacgcgccagguggucaacguggugaccaccaagaucgcccucaagggcgggugaggacuagucccuguucccagagcccacuuuuuuuucuuuuuuugaaauaaaauagccugucuuucagaucucaaaggcucuuuucagagccaccaaaaaaaaaaaaaaaaaaaaaaaaaaaaaaaaaaaaaaaaaaaaaaaaaaaaaaaaaaaaaaaaaaaaaaaaaaaaaaaaaaaaaaaaaaaaaaaaaaaaa

SEQ ID NO: 19593 - RNA, 6113 nt, Artificial Sequence
  SARS-CoV-2__MT876599.1__non-structural protein 3 (NSP3) mRNA gc
aggagagucccgcagucggcguccagcggcucugcuuguucgugugugugucguugcaggccuuauucaagcuuaccauggcccccaccaaggugaccuucggcgacgacacggucaucgaggugcagggguacaagagcgugaacaucaccuucgagcuggacgagcgcaucgacaagguccucaacgagaagugcuccgccuacaccguggagcugggcaccgaggugaacgaguucgcgugcgucguggccgacgccgugaucaagacgcugcagccggucagcgagcuccugaccccccuggggaucgaccucgacgagugguccauggccaccuacuaccuguucgacgagagcggcgaguucaagcuggccucccacauguacugcagcuucuacccccccgacgaggacgaggaggagggggacugcgaggaggaggaguucgagccguccacccaguacgaguacggcacggaggacgacuaccagggcaagccccucgaguucggggcgaccagcgccgcccugcagcccgaggaggagcaggaggaggacuggcuggacgacgacucccagcagaccgugggccagcaggacgggagcgaggacaaccagaccacgaccauccagaccaucguggagguccagccccagcucgagauggagcugaccccgguggugcagacgaucgaggucaacuccuucagcggcuaccugaagcucaccgacaacguguacaucaagaacgccgacaucguggaggaggcgaagaaggucaagcccaccgugguggucaacgccgccaacguguaccugaagcacgggggcggcguggccggggcccugaacaaggcgaccaacaacgccaugcaggucgaguccgacgacuacaucgccacgaacggcccccucaagguggggggcagcugcguccuguccggccacaaccuggccaagcacugccuccacgugguggggcccaacgucaacaagggcgaggacauccagcugcugaagagcgccuacgagaacuucaaccagcacgaggugcuccuggcgccgcugcucuccgccgggaucuucggcgccgaccccauccacagccugcgggugugcgucgacaccgugcgcaccaacguguaccuggccgucuucgacaagaaccucuacgacaagcugguguccagcuuccuggagaugaagagcgagaagcagguggagcagaagaucgccgagauccccaaggaggaggucaagcccuucaucaccgaguccaagccgagcguggagcagcggaagcaggacgacaagaagaucaaggcgugcguggaggaggucacgaccacccucgaggagaccaaguuccugacggagaaccugcuccuguacaucgacaucaacgggaaccugcaccccgacuccgccacccucgugagcgacaucgacaucaccuuccugaagaaggacgcccccuacaucgugggcgacgucgugcaggagggcgugcugaccgccgucgugauccccacgaagaaggccgggggcaccaccgagaugcucgcgaaggcccugcgcaaggugccgaccgacaacuacaucacgaccuaccccgggcagggccugaacggguacaccgucgaggaggccaagaccgugcucaagaagugcaaguccgccuucuacauccugcccagcaucaucuccaacgagaagcaggagauccugggcaccgugagcuggaaccuccgggagaugcuggcgcacgccgaggagacgcgcaagcugaugcccgucugcguggagaccaaggccaucguguccaccauccagcggaaguacaagggcaucaagauccaggagggggucguggacuacggcgcccgcuucuacuucuacaccagcaagacgaccguggccucccugaucaacacccucaacgaccugaacgagacccuggucacgaugccgcucggguacgugacccacggccugaaccuggaggaggcggcccgguacaugcgcagccucaaggugcccgccaccgucuccgugagcucccccgacgccgugaccgccuacaacggguaccugacgagcuccagcaagacccccgaggagcacuucaucgagaccaucucccuggcgggcagcuacaaggacuggagcuacuccggccagagcacccagcucgggaucgaguuccugaagcggggcgacaaguccgucuacuacacgagcaacccgaccaccuuccaccuggacggggaggugaucaccuucgacaaccucaagacgcugcugucccuccgcgaggugcggaccaucaaggucuucaccaccguggacaacaucaaccugcacacgcagguggucgacaugagcaugaccuacgcccagcaguucggccccaccuaccuggacggcgccgacgugaccaagaucaagccccacaacucccacgaggggaagacguucuacgugcucccgaacgacgacacccugcgcgucgaggccuucgaguacuaccacaccaccgaccccagcuuccugggccgguacauguccgcccucaaccacacgaagaaguggaaguacccccaggugaacgggcugaccagcaucaagugggcggacaacaacugcuaccuggccaccgcccuccugacccugcagcagaucgagcucaaguucaaccccccggcccugcaggacgcguacuaccgcgcccgggccggcgaggccgccaacuucugcgcgcugauccucgccuacugcaacaagacggugggggagcugggcgacguccgcgagaccauguccuaccuguuccagcacgccaaccucgacagcugcaagcgggugcugaacgucgugugcaagaccugcggccagcagcagaccacccugaaggggguggaggccgucauguacaugggcacgcucuccuacgagcaguucaagaagggggugcagauccccugcaccugcggcaagcaggccaccaaguaccuggugcagcaggagagccccuucgucaugauguccgcgcccccggcccaguacgagcugaagcacgggaccuucacgugcgccagcgaguacaccggcaacuaccagugcggccacuacaagcacaucaccuccaaggagacccucuacugcaucgacggggcccugcugacgaagagcagcgaguacaagggccccaucaccgacguguucuacaaggagaacuccuacaccaccacgaucaagcccgugaccuacaagcucgacggggucgugugcaccgagaucgaccccaagcuggacaacuacuacaagaaggacaacagcuacuucaccgagcagccgaucgaccuggugcccaaccagcccuaccccaacgccuccuucgacaacuucaaguucgucugcgacaacaucaaguucgcggacgaccucaaccagcugacgggcuacaagaagccggccagccgcgagcugaaggugaccuucuuccccgaccucaacggggacguggucgccaucgacuacaagcacuacacccccuccuucaagaagggcgccaagcugcugcacaagcccaucguguggcacgugaacaacgcgaccaacaaggccacguacaagccgaacaccuggugcauccggugccucuggagcaccaagcccgucgagaccuccaacagcuucgacgugcugaaguccgaggacgcccagggcauggacaaccuggccugcgaggaccucaagcccgugagcgaggaggucguggagaaccccacgauccagaaggacgugcuggagugcaacgucaagaccaccgagguggugggggacaucauccugaagccggccaacaacucccucaagaucaccgaggaggucggccacacggaccugauggcggccuacguggacaacagcucccugaccaucaagaagcccaacgagcucagccgcgugcuggggcugaagacccucgccacccacggccuggccgccgucaacuccgugcccugggacacgaucgcgaacuacgccaagccguuccugaacaagguggucagcaccaccaccaacaucgugacgcgcugccucaaccgggugugcaccaacuacaugcccuacuucuucacccugcugcuccagcugugcaccuucacccgcuccacgaacagccggaucaaggccuccaugcccaccaccaucgccaagaacaccgucaagagcguggggaaguucugccuggaggccagcuucaacuaccucaagucccccaacuucagcaagcugaucaacaucaucaucugguuccugcuccuguccgugugccugggcagccucaucuacuccacggcggcccugggcguccugaugagcaaccucgggaugccguccuacugcaccggcuaccgcgagggguaccugaacagcaccaacgugaccaucgccacguacugcaccggcuccauccccugcagcgugugccuguccggccucgacagccuggacaccuaccccucccuggagaccauccagaucacgaucagcuccuucaagugggaccucaccgccuucgggcuggucgccgagugguuccuggcguacauccucuucacccgguucuucuacgugcugggccuggccgccaucaugcagcucuucuucagcuacuucgccgugcacuucaucuccaacagcuggcugauguggcugaucaucaaccugguccagauggcgcccaucuccgccauggugcgcauguacaucuucuucgccagcuucuacuacguguggaagagcuacguccacgugguggacgggugcaacuccagcaccugcaugaugugcuacaagcggaaccgcgccacgcgggucgagugcaccaccaucgugaacggcguccgccgguccuucuacguguacgccaacgggggcaagggcuucugcaagcuccacaacuggaacugcgugaacugcgacaccuucugcgcggggagcacguucaucuccgacgaggucgcccgcgaccugagccugcaguucaagcggccgaucaaccccaccgaccaguccagcuacaucguggacuccgugaccgucaagaacggcagcauccaccucuacuucgacaaggccgggcagaagaccuacgagcgccacucccugagccacuucgugaaccuggacaaccuccgggccaacaacacgaagggcucccugcccaucaacgugaucgucuucgacgggaagagcaagugcgaggaguccagcgccaaguccgcgagcguguacuacucccagcugaugugccagcccauccuccugcuggaccaggcccucgugagcgacgucggcgacagcgccgagguggccgugaagauguucgacgccuacgucaacaccuucuccagcaccuucaacgugccgauggagaagcugaagacccugguggcgacggccgaggccgagcucgccaagaacgucucccuggacaacgugcuggcgaccuucaucagcgccgcccgccagggcuucguggacuccgacgucgagaccaaggacgugguggagugccucaagcugagccaccaguccgacaucgaggucaccggggacagcugcaacaacuacaugcugacguacaacaagguggagaacaugaccccccgggaccucggcgccugcaucgacugcuccgcccgccacaucaacgcgcagguggccaagagccacaacaucgcccugaucuggaacgucaaggacuucaugucccugagcgagcagcuccggaagcagauccgcuccgccgccaagaagaacaaccugcccuucaagcugaccugcgcgaccacgcgccagguggugaacgucgugaccaccaagaucgcccucaaggggggcugaggacuagucccuguucccagagcccacuuuuuuuucuuuuuuugaaauaaaauagccugucuuucagaucucaaaggcucuuuucagagccaccaaaaaaaaaaaaaaaaaaaaaaaaaaaaaaaaaaaaaaaaaaaaaaaaaaaaaaaaaaaaaaaaaaaaaaaaaaaaaaaaaaaaaaaaaaaaaaaaaaaaa

SEQ ID NO: 19594 - RNA, 6113 nt, Artificial Sequence
  SARS-CoV-2__MT876607.1__non-structural protein 3 (NSP3) mRNA gc
aggagagucccgcagucggcguccagcggcucugcuuguucgugugugugucguugcaggccuuauucaagcuuaccauggcccccaccaaggugaccuucggcgacgacacggucaucgaggugcagggguacaagagcgugaacaucaccuucgagcuggacgagcgcaucgacaagguccucaacgagaagugcuccgccuacaccguggagcugggcaccgaggugaacgaguucgcgugcgucguggccgacgccgugaucaagacgcugcagccggucagcgagcuccugaccccccuggggaucgaccucgacgagugguccauggccaccuacuaccuguucgacgagagcggcgaguucaagcuggccucccacauguacugcagcuucuacccccccgacgaggacgaggaggagggggacugcgaggaggaggaguucgagccguccacccaguacgaguacggcacggaggacgacuaccagggcaagccccucgaguucggggcgaccagcgccgcccugcagcccgaggaggagcaggaggaggacuggcuggacgacgacucccagcagaccgugggccagcaggacgggagcgaggacaaccagaccacgaccauccagaccaucguggagguccagccccagcucgagauggagcugaccccgguggugcagacgaucgaggucaacuccuucagcggcuaccugaagcucaccgacaacguguacaucaagaacgccgacaucguggaggaggcgaagaaggucaagcccaccgugguggucaacgccgccaacguguaccugaagcacgggggcggcguggccggggcccugaacaaggcgaccaacaacgccaugcaggucgaguccgacgacuacaucgccacgaacggcccccucaagguggggggcagcugcguccuguccggccacaaccuggccaagcacugccuccacgugguggggcccaacgucaacaagggcgaggacauccagcugcugaagagcgccuacgagaacuucaaccagcacgaggugcuccuggcgccgcugcucuccgccgggaucuucggcgccgaccccauccacagccugcgggugugcgucgacaccgugcgcaccaacguguaccuggccgucuucgacaagaaccucuacgacaagcugguguccagcuuccuggagaugaagagcgagaagcagguggagcagaagaucgccgagauccccaaggaggaggucaagcccuucaucaccgaguccaagccgagcguggagcagcggaagcaggacgacaagaagaucaaggcgugcguggaggaggucacgaccacccucgaggagaccaaguuccugacggagaaccugcuccuguacaucgacaucaacgggaaccugcaccccgacuccgccacccucgugagcgacaucgacaucaccuuccugaagaaggacgugcccuacaucgucggcgacguggugcaggagggcguccugaccgccguggugauccccacgaagaaggccgggggcaccaccgagaugcucgccaaggcgcugcgcaaggucccgaccgacaacuacaucacgaccuaccccgggcagggccugaacggguacaccguggaggaggccaagaccgugcucaagaagugcaaguccgccuucuacauccugcccagcaucaucuccaacgagaagcaggagauccugggcaccgucagcuggaaccuccgggagaugcuggcccacgcggaggagacgcgcaagcugaugcccgugugcguggagaccaaggccaucgucuccaccauccagcggaaguacaagggcaucaagauccaggagggggugguggacuacggcgcccgcuucuacuucuacaccagcaagacgaccgucgccucccugaucaacacccucaacgaccugaacgagacccuggugacgaugccgcucggguacgugacccacggccugaaccuggaggaggccgcgcgguacaugcgcagccucaagguccccgccaccguguccgugagcucccccgacgccgucaccgccuacaacggguaccugacgagcuccagcaagacccccgaggagcacuucaucgagaccaucucccuggccggcagcuacaaggacuggagcuacuccggccagagcacccagcucgggaucgaguuccugaagcggggcgacaaguccguguacuacacgagcaacccgaccaccuuccaccuggacggggaggugaucaccuucgacaaccucaagacgcugcugucccuccgcgagguccggaccaucaagguguucaccaccguggacaacaucaaccugcacacgcaggucguggacaugagcaugaccuacggccagcaguucggccccaccuaccuggacggggcggacgugaccaagaucaagccccacaacucccacgagggcaagacguucuacguccucccgaacgacgacacccugcgcguggaggccuucgaguacuaccacaccaccgaccccagcuuccuggggcgguacauguccgcccucaaccacacgaagaaguggaaguacccccaggugaacggccugaccagcaucaagugggccgacaacaacugcuaccuggccaccgcgcuccugacccugcagcagaucgagcucaaguucaaccccccggcccugcaggacgccuacuaccgcgcccgggcgggggaggccgccaacuucugcgcccugauccucgccuacugcaacaagacggucggcgagcugggcgacgugcgcgagaccauguccuaccuguuccagcacgcgaaccucgacagcugcaagcggguccugaacguggugugcaagaccugcgggcagcagcagaccacccugaagggcgucgaggccgugauguacauggggacgcucuccuacgagcaguucaagaagggcgugcagauccccugcaccugcgggaagcaggccaccaaguaccugguccagcaggagagccccuucgugaugauguccgcccccccggcccaguacgagcugaagcacggcaccuucacgugcgcgagcgaguacaccggcaacuaccagugcgggcacuacaagcacaucaccuccaaggagacccucuacugcaucgacggcgcccugcugacgaagagcagcgaguacaaggggcccaucaccgacguguucuacaaggagaacuccuacaccaccacgaucaagcccgucaccuacaagcucgacggcguggugugcaccgagaucgaccccaagcuggacaacuacuacaagaaggacaacagcuacuucaccgagcagccgaucgaccugguccccaaccagcccuaccccaacgccuccuucgacaacuucaaguucgugugcgacaacaucaaguucgccgacgaccucaaccagcugacgggguacaagaagccggccagccgcgagcugaaggugaccuucuuccccgaccucaacggcgacgucguggcgaucgacuacaagcacuacacccccuccuucaagaagggcgccaagcugcugcacaagcccaucguguggcacgucaacaacgccaccaacaaggccacguacaagccgaacaccuggugcauccggugccucuggagcaccaagcccguggagaccuccaacagcuucgacgugcugaaguccgaggacgcgcaggggauggacaaccuggccugcgaggaccucaagcccgucagcgaggaggugguggagaaccccacgauccagaaggacguccuggagugcaacgugaagaccaccgagguggucggcgacaucauccugaagccggccaacaacucccucaagaucaccgaggagguggggcacacggaccugauggccgccuacguggacaacagcucccugaccaucaagaagcccaacgagcucagccgcguccugggccugaagacccucgcgacccacgggcuggccgccgugaacuccgugcccugggacacgaucgccaacuacgccaagccguuccugaacaaggucgugagcaccaccaccaacaucgugacgcgcugccucaaccgggucugcaccaacuacaugcccuacuucuucacccugcugcuccagcugugcaccuucacccgcuccacgaacagccggaucaaggcguccaugcccaccaccaucgccaagaacaccgugaagagcgugggcaaguucugccuggaggccagcuucaacuaccucaagucccccaacuucagcaagcugaucaacaucaucaucugguuccugcuccuguccgucugccugggcagccucaucuacuccacggccgcccugggggugcugaugagcaaccucggcaugccguccuacugcaccggguaccgcgagggcuaccugaacagcaccaacgugaccaucgcgacguacugcaccggcuccauccccugcagcgucugccuguccgggcucgacagccuggacaccuaccccucccuggagaccauccagaucacgaucagcuccuucaagugggaccucaccgccuucggccugguggccgagugguuccuggccuacauccucuucacccgguucuucuacgugcuggggcuggccgcgaucaugcagcucuucuucagcuacuucgccguccacuucaucuccaacagcuggcugauguggcugaucaucaaccuggugcagauggcccccaucuccgccauggugcgcauguacaucuucuucgcgagcuucuacuacgucuggaagagcuacgugcacguggucgacggcugcaacuccagcaccugcaugaugugcuacaagcggaaccgcgccacgcggguggagugcaccaccaucgucaacggggugcgccgguccuucuacguguacgccaacggcggcaagggguucugcaagcuccacaacuggaacugcgucaacugcgacaccuucugcgccggcagcacguucaucuccgacgagguggcccgcgaccugagccugcaguucaagcggccgaucaaccccaccgaccaguccagcuacaucguggacuccgucaccgugaagaacgggagcauccaccucuacuucgacaaggcgggccagaagaccuacgagcgccacucccugagccacuucgugaaccuggacaaccuccgggccaacaacacgaaggggucccugcccaucaacgucaucguguucgacggcaagagcaagugcgaggaguccagcgccaaguccgccagcguguacuacucccagcugaugugccagcccauccuccugcuggaccaggcccucgucagcgacgugggcgacagcgcggagguggccgucaagauguucgacgccuacgugaacaccuucuccagcaccuucaacgugccgauggagaagcugaagacccuggucgccacggccgaggcggagcucgccaagaacgugucccuggacaacgugcugagcaccuucaucuccgccgcccgccagggguucgucgacagcgacguggagaccaaggacguggucgagugccucaagcugucccaccagagcgacaucgaggugaccggcgacuccugcaacaacuacaugcugacguacaacaagguggagaacaugaccccccgggaccucggggcgugcaucgacugcagcgcccgccacaucaacgcccaggucgccaagucccacaacaucgcccugaucuggaacgugaaggacuucaugagccuguccgagcagcuccggaagcagauccgcagcgcggccaagaagaacaaccugcccuucaagcugaccugcgccaccacgcgccagguggucaacguggugaccaccaagaucgcccucaagggcgggugaggacuagucccuguucccagagcccacuuuuuuuucuuuuuuugaaauaaaauagccugucuuucagaucucaaaggcucuuuucagagccaccaaaaaaaaaaaaaaaaaaaaaaaaaaaaaaaaaaaaaaaaaaaaaaaaaaaaaaaaaaaaaaaaaaaaaaaaaaaaaaaaaaaaaaaaaaaaaaaaaaaaa

SEQ ID NO: 19595 - RNA, 6113 nt, Artificial Sequence
  SARS-CoV-2__MT877304.1__non-structural protein 3 (NSP3) mRNA gc
aggagagucccgcagucggcguccagcggcucugcuuguucgugugugugucguugcaggccuuauucaagcuuaccauggcccccaccaaggugaccuucggcgacgacacggucaucgaggugcagggguacaagagcgugaacaucaccuucgagcuggacgagcgcaucgacaagguccucaacgagaagugcuccgccuacaccguggagcugggcaccgaggugaacgaguucgcgugcgucguggccgacgccgugaucaagacgcugcagccggucagcgagcuccugaccccccuggggaucgaccucgacgagugguccauggccaccuacuaccuguucgacgagagcggcgaguucaagcuggccucccacauguacugcagcuucuacccccccgacgaggacgaggaggagggggacugcgaggaggaggaguucgagccguccacccaguacgaguacggcacggaggacgacuaccagggcaagccccucgaguucggggcgaccagcgccgcccugcagcccgaggaggagcaggaggaggacuggcuggacgacgacucccagcagaccgugggccagcaggacgggagcgaggacaaccagaccacgaccauccagaccaucguggagguccagccccagcucgagauggagcugaccccgguggugcagacgaucgaggucaacuccuucagcggcuaccugaagcucaccgacaacguguacaucaagaacgccgacaucguggaggaggcgaagaaggucaagcccaccgugguggucaacgccgccaacguguaccugaagcacgggggcggcguggccggggcccugaacaaggcgaccaacaacgccaugcaggucgaguccgacgacuacaucgccacgaacggcccccucaagguggggggcagcugcguccuguccggccacaaccuggccaagcacugccuccacgugguggggcccaacgucaacaagggcgaggacauccagcugcugaagagcgccuacgagaacuucaaccagcacgaggugcuccuggcgccgcugcucuccgccgggaucuucggcgccgaccccauccacagccugcgggugugcgucgacaccgugcgcaccaacguguaccuggccgucuucgacaagaaccucuacgacaagcugguguccagcuuccuggagaugaagagcgagaagcagguggagcagaagaucgccgagauccccaaggaggaggucaagcccuucaucaccgaguccaagccgagcguggagcagcggaagcaggacgacaagaagaucaaggcgugcguggaggaggucacgaccacccucgaggagaccaaguuccugacggagaaccugcuccuguacaucgacaucaacgggaaccugcaccccgacuccgccacccucgugagcgacaucgacaucaccuuccugaagaaggacgcccccuacaucgugggcgacgucgugcaggagggcgugcugaccgccgucgugauccccacgaagaaggccgggggcaccaccgagaugcucgcgaaggcccugcgcaaggugccgaccgacaacuacaucacgaccuaccccgggcagggccugaacggguacaccgucgaggaggccaagaccgugcucaagaagugcaaguccgccuucuacauccugcccagcaucaucuccaacgagaagcaggagauccugggcaccgugagcuggaaccuccgggagaugcuggcgcacgccgaggagacgcgcaagcugaugcccgucugcguggagaccaaggccaucguguccaccauccagcggaaguacaagggcaucaagauccaggagggggucguggacuacggcgcccgcuucuacuucuacaccagcaagacgaccguggccucccugaucaacacccucaacgaccugaacgagacccuggucacgaugccgcucggguacgugacccacggccugaaccuggaggaggcggcccgguacaugcgcagccucaaggugcccgccaccgucuccgugagcucccccgacgccgugaccgccuacaacggguaccugacgagcuccagcaagacccccgaggagcacuucaucgagaccaucucccuggcgggcagcuacaaggacuggagcuacuccggccagagcacccagcucgggaucgaguuccugaagcggggcgacaaguccgucuacuacacgagcaacccgaccaccuuccaccuggacggggaggugaucaccuucgacaaccucaagacgcugcugucccuccgcgaggugcggaccaucaaggucuucaccaccguggacaacaucaaccugcacacgcagguggucgacaugagcaugaccuacggccagcaguucggccccaccuaccuggacggggccgacgugaccaagaucaagccccacaacucccacgagggcaagacguucuacgugcucccgaacgacgacacccugcgcgucgaggccuucgaguacuaccacaccaccgaccccagcuuccuggggcgguacauguccgcccucaaccacacgaagaaguggaaguacccccaggugaacggccugaccagcaucaagugggccgacaacaacugcuaccuggcgaccgcccuccugacccugcagcagaucgagcucaaguucaaccccccggcccugcaggacgccuacuaccgcgcgcgggccggggaggccgccaacuucugcgcccugauccucgcguacugcaacaagacggugggcgagcugggcgacguccgcgagaccauguccuaccuguuccagcacgccaaccucgacagcugcaagcgggugcugaacgucgugugcaagaccugcgggcagcagcagaccacccugaagggcguggaggccgucauguacauggggacgcucuccuacgagcaguucaagaagggcgugcagauccccugcaccugcgggaagcaggccaccaaguaccuggugcagcaggagagccccuucgucaugauguccgcccccccggcgcaguacgagcugaagcacggcaccuucacgugcgccagcgaguacaccggcaacuaccagugcgggcacuacaagcacaucaccuccaaggagacccucuacugcaucgacggcgcccugcugacgaagagcagcgaguacaaggggcccaucaccgacguguucuacaaggagaacuccuacaccaccacgaucaagcccgugaccuacaagcucgacggcgucgugugcaccgagaucgaccccaagcuggacaacuacuacaagaaggacaacagcuacuucaccgagcagccgaucgaccuggugcccaaccagcccuaccccaacgccuccuucgacaacuucaaguucgucugcgacaacaucaaguucgccgacgaccucaaccagcugacgggguacaagaagccggcgagccgcgagcugaaggugaccuucuuccccgaccucaacggcgacguggucgccaucgacuacaagcacuacacccccuccuucaagaagggcgccaagcugcugcacaagcccaucguguggcacgugaacaacgccaccaacaaggcgacguacaagccgaacaccuggugcauccggugccucuggagcaccaagcccgucgagaccuccaacagcuucgacgugcugaaguccgaggacgcccaggggauggacaaccuggccugcgaggaccucaagcccgugagcgaggaggucguggagaaccccacgauccagaaggacgugcuggagugcaacgucaagaccaccgagguggugggcgacaucauccugaagccggccaacaacucccucaagaucaccgaggaggucgggcacacggaccugauggccgcguacguggacaacagcucccugaccaucaagaagcccaacgagcucagccgcgugcugggccugaagacccucgccacccacgggcuggccgccgucaacuccgugcccugggacacgaucgccaacuacgcgaagccguuccugaacaagguggucagcaccaccaccaacaucgugacgcgcugccucaaccgggugugcaccaacuacaugcccuacuucuucacccugcugcuccagcugugcaccuucacccgcuccacgaacagccggaucaaggccuccaugcccaccaccaucgccaagaacaccgucaagagcgugggcaaguucugccuggaggccagcuucaacuaccucaagucccccaacuucagcaagcugaucaacaucaucaucugguuccugcuccuguccgugugccugggcagccucaucuacuccacggccgcgcuggggguccugaugagcaaccucggcaugccguccuacugcaccggguaccgcgagggcuaccugaacagcaccaacgugaccaucgccacguacugcaccggcuccauccccugcagcgugugccuguccgggcucgacagccuggacaccuaccccucccuggagaccauccagaucacgaucagcuccuucaagugggaccucaccgccuucggccuggucgccgagugguuccuggccuacauccucuucacccgguucuucuacgugcuggggcuggcggccaucaugcagcucuucuucagcuacuucgccauccacuucaucuccaacagcuggcugauguggcugaucaucaaccuggugcagauggcccccaucuccgcgaugguccgcauguacaucuucuucgccagcuucuacuacguguggaagagcuacgugcacgucguggacggcugcaacuccagcaccugcaugaugugcuacaagcggaaccgcgccacgcggguggagugcaccaccaucgucaacggggugcgccgguccuucuacgucuacgccaacggcggcaagggguucugcaagcuccacaacuggaacugcgugaacugcgacaccuucugcgccggcagcacguucaucuccgacgagguggcgcgcgaccugagccugcaguucaagcggccgaucaaccccaccgaccaguccagcuacaucgucgacuccgugaccgugaagaacgggagcauccaccucuacuucgacaaggccggccagaagaccuacgagcgccacucccugagccacuucgucaaccuggacaaccuccgggccaacaacacgaaggggucccugcccaucaacgugaucguguucgacggcaagagcaagugcgaggaguccagcgccaaguccgccagcgucuacuacucccagcugaugugccagcccauccuccugcuggaccaggcgcucgugagcgacgugggcgacagcgccgaggucgccgugaagauguucgacgccuacgugaacaccuucuccagcaccuucaacgucccgauggagaagcugaagacccugguggccacggcggaggccgagcucgccaagaacgugucccuggacaacguccugagcaccuucaucuccgccgcgcgccagggguucguggacagcgacguggagaccaaggacgucguggagugccucaagcugucccaccagagcgacaucgaggugaccggcgacuccugcaacaacuacaugcugacguacaacaaggucgagaacaugaccccccgggaccucggggccugcaucgacugcagcgcccgccacaucaacgcccagguggccaagucccacaacaucgcgcugaucuggaacgugaaggacuucaugagccuguccgagcagcuccggaagcagauccgcagcgccgccaagaagaacaaccugcccuucaagcugaccugcgccaccacgcgccaggucgugaacguggucaccaccaagaucgcccucaagggcgggugaggacuagucccuguucccagagcccacuuuuuuuucuuuuuuugaaauaaaauagccugucuuucagaucucaaaggcucuuuucagagccaccaaaaaaaaaaaaaaaaaaaaaaaaaaaaaaaaaaaaaaaaaaaaaaaaaaaaaaaaaaaaaaaaaaaaaaaaaaaaaaaaaaaaaaaaaaaaaaaaaaaaa

SEQ ID NO: 19596 - RNA, 6113 nt, Artificial Sequence
  SARS-CoV-2__MT877315.1__non-structural protein 3 (NSP3) mRNA gc
aggagagucccgcagucggcguccagcggcucugcuuguucgugugugugucguugcaggccuuauucaagcuuaccauggcccccaccaaggugaccuucggcgacgacacggucaucgaggugcagggguacaagagcgugaacaucaccuucgagcuggacgagcgcaucgacaagguccucaacgagaagugcuccgccuacaccguggagcugggcaccgaggugaacgaguucgcgugcgucguggccgacgccgugaucaagacgcugcagccggucagcgagcuccugaccccccuggggaucgaccucgacgagugguccauggccaccuacuaccuguucgacgagagcggcgaguucaagcuggccucccacauguacugcagcuucuacccccccgacgaggacgaggaggagggggacugcgaggaggaggaguucgagccguccacccaguacgaguacggcacggaggacgacuaccagggcaagccccucgaguucggggcgaccagcgccgcccugcagcccgaggaggagcaggaggaggacuggcuggacgacgacucccagcagaccgugggccagcaggacgggagcgaggacaaccagaccacgaccauccagaccaucguggagguccagccccagcucgagauggagcugaccccgguggugcagacgaucgaggucaacuccuucagcggcuaccugaagcucaccgacaacguguacaucaagaacgccgacaucguggaggaggcgaagaaggucaagcccaccgugguggucaacgccgccaacguguaccugaagcacgggggcggcguggccggggcccugaacaaggcgaccaacaacgccaugcaggucgaguccgacgacuacaucgccacgaacggcccccucaagguggggggcagcugcguccuguccggccacaaccuggccaagcacugccuccacgugguggggcccaacgucaacaagggcgaggacauccagcugcugaagagcgccuacgagaacuucaaccagcacgaggugcuccuggcgccgcugcucuccgccgggaucuucggcgccgaccccauccacagccugcgggugugcgucgacaccgugcgcaccaacguguaccuggccgucuucgacaagaaccucuacgacaagcugguguccagcuuccuggagaugaagagcgagaagcagguggagcagaagaucgccgagauccccaaggaggaggucaagcccuucaucaccgaguccaagccgagcguggagcagcggaagcaggacgacaagaagaucaaggcgugcguggaggaggucacgaccacccucgaggagaccaaguuccugacggagaaccugcuccuguacaucgacaucaacgggaaccugcaccccgacuccgccacccucgugagcgacaucgacaucaccuuccugaagaaggacgcccccuacaucgugggcgacgucgugcaggagggcgugcugaccgccgucgugauccccacgaagaaggccgggggcaccaccgagaugcucgcgaaggcccugcgcaaggugccgaccgacaacuacaucacgaccuaccccgggcagggccugaacggguacaccgucgaggaggccaagaccgugcucaagaagugcaaguccgccuucuacauccugcccagcaucaucuccaacgagaagcaggagauccugggcaccgugagcuggaaccuccgggagaugcuggcgcacgccgaggagacgcgcaagcugaugcccgucugcguggagaccaaggccaucguguccaccauccagcggaaguacaagggcaucaagauccaggagggggucguggacuacggcgcccgcuucuacuucuacaccagcaagacgaccguggccucccugaucaacacccucaacgaccugaacgagacccuggucacgaugccgcucggguacgugacccacggccugaaccuggaggaggcggcccgguacaugcgcagccucaaggugcccgccaccgucuccgugagcucccccgacgccgugaccgccuacaacggguaccugacgagcuccagcaagacccccgaggagcacuucaucgagaccaucucccuggcgggcagcuacaaggacuggagcuacuccggccagagcacccagcucgggaucgaguuccugaagcggggcgacaaguccgucuacuacacgagcaacccgaccaccuuccaccuggacggggaggugaucaccuucgacaaccucaagacgcugcugucccuccgcgaggugcggaccaucaaggucuucaccaccguggacaacaucaaccugcacacgcagguggucgacaugagcaugaccuacggccagcaguucggccccaccuaccuggacggggccgacgugaccaagaucaagccccacaacucccacgagggcaagacguucuacgugcucccgaacgacgacacccugcgcgucgaggccuucgaguacuaccacaccaccgaccccagcuuccuggggcgguacauguccgcccucaaccacacgaagaaguggaaguacccccaggugaacggccugaccagcaucaagugggccgacaacaacugcuaccuggcgaccgcccuccugacccugcagcagaucgagcucaaguucaaccccccggcccugcaggacgccuacuaccgcgcgcgggccggggaggccgccaacuucugcgcccugauccucgcguacugcaacaagacggugggcgagcugggcgacguccgcgagaccauguccuaccuguuccagcacgccaaccucgacagcugcaagcgggugcugaacgucgugugcaagaccugcgggcagcagcagaccacccugaagggcguggaggccgucauguacauggggacgcucuccuacgagcaguucaagaagggcgugcagauccccugcaccugcgggaagcaggccaccaaguaccuggugcagcaggagagccccuucgucaugauguccgcccccccggcgcaguacgagcugaagcacggcaccuucacgugcgccagcgaguacaccggcaacuaccagugcgggcacuacaagcacaucaccuccaaggagacccucuacugcaucgacggcgcccugcugacgaagagcagcgaguacaaggggcccaucaccgacguguucuacaaggagaacuccuacaccaccacgaucaagcccgugaccuacaagcucgacggcgucgugugcaccgagaucgaccccaagcuggacaacuacuacaagaaggacaacagcuacuucaccgagcagccgaucgaccuggugcccaaccagcccuaccccaacgccuccuucgacaacuucaaguucgucugcgacaacaucaaguucgccgacgaccucaaccagcugacgggguacaagaagccggcgagccgcgagcugaaggugaccuucuuccccgaccucaacggcgacguggucgccaucgacuacaagcacuacacccccuccuucaagaagggcgccaagcugcugcacaagcccaucguguggcacgugaacaacgccaccaacaaggcgacguacaagccgaacaccuggugcauccggugccucuggagcaccaagcccgucgagaccuccaacagcuucgacgugcugaaguccgaggacgcccaggggauggacaaccuggccugcgaggaccucaagcccgugagcgaggaggucguggagaaccccacgauccagaaggacgugcuggagugcaacgucaagaccaccgagguggugggcgacaucauccugaagccggccaacaacucccucaagaucaccgaggaggucgggcacacggaccugauggccgcguacguggacaacagcucccugaccaucaagaagcccaacgagcucagccgcgugcugggccugaagacccucgccacccacgggcuggccgccgucaacuccgugcccugggacacgaucgccaacuacgcgaagccguuccugaacaagguggucagcaccaccaccaacaucgugacgcgcugccucaaccgggugugcaccaacuacaugcccuacuucuucacccugcugcuccagcugugcaccuucacccgcuccacgaacagccggaucaaggccuccaugcccaccaccaucgccaagaacaccgucaagagcgccggcaaguucugccuggaggccagcuucaacuaccucaagucccccaacuucagcaagcugaucaacaucaucaucugguuccugcuccuguccgugugccugggcagccucaucuacuccacggcggcccugggggugcugaugagcaaccucggcaugccguccuacugcaccggguaccgcgagggcuaccugaacagcaccaacgucaccaucgccacguacugcaccggcuccauccccugcagcgugugccuguccgggcucgacagccuggacaccuaccccucccuggagaccauccagaucacgaucagcuccuucaagugggaccucaccgccuucggccugguggccgagugguuccuggcguacauccucuucacccgguucuucuacguccuggggcuggccgccaucaugcagcucuucuucagcuacuucgccgugcacuucaucuccaacagcuggcugauguggcugaucaucaaccuggugcagauggcgcccaucuccgccaugguccgcauguacaucuucuucgccagcuucuacuacguguggaagagcuacgugcacgucguggacggcugcaacuccagcaccugcaugaugugcuacaagcggaaccgcgccacgcggguggagugcaccaccaucgucaacggggugcgccgguccuucuacgucuacgccaacggcggcaagggguucugcaagcuccacaacuggaacugcgugaacugcgacaccuucugcgcgggcagcacguucaucuccgacgagguggcccgcgaccugagccugcaguucaagcggccgaucaaccccaccgaccaguccagcuacaucgucgacuccgugaccgugaagaacgggagcauccaccucuacuucgacaaggccggccagaagaccuacgagcgccacucccugagccacuucgucaaccuggacaaccuccgggccaacaacacgaaggggucccugcccaucaacgugaucguguucgacggcaagagcaagugcgaggaguccagcgccaaguccgcgagcgucuacuacucccagcugaugugccagcccauccuccugcuggaccaggcccucgugagcgacgugggcgacagcgccgaggucgccgugaagauguucgacgccuacgugaacaccuucuccagcaccuucaacgucccgauggagaagcugaagacccugguggcgacggccgaggccgagcucgccaagaacgugucccuggacaacguccugagcaccuucaucuccgcggcccgccagggguucguggacagcgacguggagaccaaggacgucguggagugccucaagcugucccaccagagcgacaucgaggugaccggcgacuccugcaacaacuacaugcugacguacaacaaggucgagaacaugaccccccgggaccucggggccugcaucgacugcagcgcccgccacaucaacgcccagguggcgaagucccacaacaucgcccugaucuggaacgugaaggacuucaugagccuguccgagcagcuccggaagcagauccgcagcgccgccaagaagaacaaccugcccuucaagcugaccugcgccaccacgcgccaggucgugaacguggucaccaccaagaucgcgcucaagggcgggugaggacuagucccuguucccagagcccacuuuuuuuucuuuuuuugaaauaaaauagccugucuuucagaucucaaaggcucuuuucagagccaccaaaaaaaaaaaaaaaaaaaaaaaaaaaaaaaaaaaaaaaaaaaaaaaaaaaaaaaaaaaaaaaaaaaaaaaaaaaaaaaaaaaaaaaaaaaaaaaaaaaaa

SEQ ID NO: 19597 - RNA, 6113 nt, Artificial Sequence
  SARS-CoV-2__MT877324.1__non-structural protein 3 (NSP3) mRNA gc
aggagagucccgcagucggcguccagcggcucugcuuguucgugugugugucguugcaggccuuauucaagcuuaccauggcccccaccaaggugaccuucggcgacgacacggucaucgaggugcagggguacaagagcgugaacaucaccuucgagcuggacgagcgcaucgacaagguccucaacgagaagugcuccgccuacaccguggagcugggcaccgaggugaacgaguucgcgugcgucguggccgacgccgugaucaagacgcugcagccggucagcgagcuccugaccccccuggggaucgaccucgacgagugguccauggccaccuacuaccuguucgacgagagcggcgaguucaagcuggccucccacauguacugcagcuucuacccccccgacgaggacgaggaggagggggacugcgaggaggaggaguucgagccguccacccaguacgaguacggcacggaggacgacuaccagggcaagccccucgaguucggggcgaccagcgccgcccugcagcccgaggaggagcaggaggaggacuggcuggacgacgacucccagcagaccgugggccagcaggacgggagcgaggacaaccagaccacgaccauccagaccaucguggagguccagccccagcucgagauggagcugaccccgguggugcagacgaucgaggucaacuccuucagcggcuaccugaagcucaccgacaacguguacaucaagaacgccgacaucguggaggaggcgaagaaggucaagcccaccgugguggucaacgccgccaacguguaccugaagcacgggggcggcguggccggggcccugaacaaggcgaccaacaacgccaugcaggucgaguccgacgacuacaucgccacgaacggcccccucaagguggggggcagcugcguccuguccggccacaaccuggccaagcacugccuccacgugguggggcccaacgucaacaagggcgaggacauccagcugcugaagagcgccuacgagaacuucaaccagcacgaggugcuccuggcgccgcugcucuccgccgggaucuucggcgccgaccccauccacagccugcgggugugcgucgacaccgugcgcaccaacguguaccuggccgucuucgacaagaaccucuacgacaagcugguguccagcuuccuggagaugaagagcgagaagcagguggagcagaagaucgccgagauccccaaggaggaggucaagcccuucaucaccgaguccaagccgagcguggagcagcggaagcaggacgacaagaagaucaaggcgugcguggaggaggucacgaccacccucgaggagaccaaguuccugacggagaaccugcuccuguacaucgacaucaacgggaaccugcaccccgacuccgccacccucgugagcgacaucgacaucaccuuccugaagaaggacgcccccuacaucgugggcgacgucgugcaggagggcgugcugaccgccgucgugauccccacgaagaaggccgggggcaccaccgagaugcucgcgaaggcccugcgcaaggugccgaccgacaacuacaucacgaccuaccccgggcagggccugaacggguacaccgucgaggaggccaagaccgugcucaagaagugcaaguccgccuucuacauccugcccagcaucaucuccaacgagaagcaggagauccugggcaccgugagcuggaaccuccgggagaugcuggcgcacgccgaggagacgcgcaagcugaugcccgucugcguggagaccaaggccaucguguccaccauccagcggaaguacaagggcaucaagauccaggagggggucguggacuacggcgcccgcuucuacuucuacaccagcaagacgaccguggccucccugaucaacacccucaacgaccugaacgagacccuggucacgaugccgcucggguacgugacccacggccugaaccuggaggaggcggcccgguacaugcgcagccucaaggugcccgccaccgucuccgugagcucccccgacgccgugaccgccuacaacggguaccugacgagcuccagcaagacccccgaggagcacuucaucgagaccaucucccuggcgggcagcuacaaggacuggagcuacuccggccagagcacccagcucgggaucgaguuccugaagcggggcgacaaguccgucuacuacacgagcaacccgaccaccuuccaccuggacggggaggugaucaccuucgacaaccucaagacgcugcugucccuccgcgaggugcggaccaucaaggucuucaccaccguggacaacaucaaccugcacacgcagguggucgacaugagcaugaccuacggccagcaguucggccccaccuaccuggacggggccgacgugaccaagaucaagccccacaacucccacgagggcaagacguucuacgugcucccgaacgacgacacccugcgcgucgaggccuucgaguacuaccacaccaccgaccccagcuuccuggggcgguacauguccgcccucaaccacacgaagaaguggaaguacccccaggugaacggccugaccagcaucaagugggccgacaacaacugcuaccuggcgaccgcccuccugacccugcagcagaucgagcucaaguucaaccccccggcccugcaggacgccuacuaccgcgcgcgggccggggaggccgccaacuucugcgcccugauccucgcguacugcaacaagacggugggcgagcugggcgacguccgcgagaccauguccuaccuguuccagcacgccaaccucgacagcugcaagcgggugcugaacgucgugugcaagaccugcgggcagcagcagaccacccugaagggcguggaggccgucauguacauggggacgcucuccuacgagcaguucaagaagggcgugcagauccccugcaccugcgggaagcaggccaccaaguaccuggugcagcaggagagccccuucgucaugauguccgcccccccggcgcaguacgagcugaagcacggcaccuucacgugcgccagcgaguacaccggcaacuaccagugcgggcacuacaagcacaucaccuccaaggagacccucuacugcaucgacggcgcccugcugacgaagagcagcgaguacaaggggcccaucaccgacguguucuacaaggagaacuccuacaccaccacgaucaagcccgugaccuacaagcucgacggcgucgugugcaccgagaucgaccccaagcuggacaacuacuacaagaaggacaacagcuacuucaccgagcagccgaucgaccuggugcccaaccagcccuacuccaacgccagcuucgacaacuucaaguucgucugcgacaacaucaaguucgccgacgaccucaaccagcugacgggguacaagaagcccgcgucccgcgagcugaaggugaccuucuucccggaccucaacggcgacguggucgccaucgacuacaagcacuacacccccagcuucaagaagggcgccaagcugcugcacaagcccaucguguggcacgugaacaacgccaccaacaaggcgacguacaagcccaacaccuggugcauccggugccucugguccaccaagccggucgagaccagcaacuccuucgacgugcugaagagcgaggacgcccaggggauggacaaccuggccugcgaggaccucaagcccguguccgaggaggucguggagaaccccacgauccagaaggacgugcuggagugcaacgucaagaccaccgagguggugggcgacaucauccugaagcccgccaacaacagccucaagaucaccgaggaggucgggcacacggaccugauggccgcguacguggacaacuccagccugaccaucaagaagccgaacgagcucucccgcgugcugggccugaagacccucgccacccacgggcuggccgccgucaacagcgugcccugggacacgaucgccaacuacgcgaagcccuuccugaacaagguggucuccaccaccaccaacaucgugacgcgcugccucaaccgggugugcaccaacuacaugccguacuucuucacccugcugcuccagcugugcaccuucacccgcagcacgaacucccggaucaaggccagcaugcccaccaccaucgccaagaacaccgucaagagcgugggcaaguucugccuggaggccuccuucaacuaccucaagagccccaacuucuccaagcugaucaacaucaucaucugguuccugcuccugagcgugugccugggcucccucaucuacagcacggccgcgcuggggguccugauguccaaccucggcaugcccagcuacugcaccggguaccgcgagggcuaccugaacuccaccaacgugaccaucgccacguacugcaccggcagcaucccgugcuccgugugccugagcgggcucgacucccuggacaccuaccccagccuggagaccauccagaucacgaucuccagcuucaagugggaccucaccgccuucggccuggucgccgagugguuccuggccuacauccucuucacccgguucuucuacgugcuggggcuggcggccaucaugcagcucuucuucuccuacuucgccgugcacuucaucagcaacuccuggcugauguggcugaucaucaaccugguccagauggcccccaucagcgcgauggugcgcauguacaucuucuucgccagcuucuacuacguguggaaguccuacguccacgugguggacggcugcaacagcuccaccugcaugaugugcuacaagcggaaccgcgccacgcgggucgagugcaccaccaucgugaacgggguccgccggagcuucuacguguacgccaacggcggcaagggguucugcaagcuccacaacuggaacugcgugaacugcgacaccuucugcgccggcuccacguucaucagcgacgaggucgcgcgcgaccugucccugcaguucaagcggcccaucaacccgaccgaccagagcuccuacaucguggacagcgugaccgucaagaacggguccauccaccucuacuucgacaaggccggccagaagaccuacgagcgccacagccugucccacuucgugaaccuggacaaccuccgggccaacaacacgaaggggagccugcccaucaacgugaucgucuucgacggcaaguccaagugcgaggagagcuccgccaagagcgccuccguguacuacagccagcugaugugccagcccauccuccugcuggaccaggcgcucgugagcgacgucggcgacuccgccgagguggccgugaagauguucgacgccuacgucaacaccuucagcuccaccuucaacgugcccauggagaagcugaagacccugguggccacggcggaggccgagcucgccaagaacgucagccuggacaacgugcuguccaccuucaucagcgccgcgcgccagggguucguggacuccgacgucgagaccaaggacgugguggagugccucaagcugagccaccaguccgacaucgaggucaccggcgacagcugcaacaacuacaugcugacguacaacaagguggagaacaugaccccgcgggaccucggggccugcaucgacugcuccgcccgccacaucaacgcccagguggccaagagccacaacaucgcgcugaucuggaacgucaaggacuucaugucccugagcgagcagcuccggaagcagauccgcuccgccgccaagaagaacaaccugcccuucaagcugaccugcgccaccacgcgccagguggugaacgucgugaccaccaagaucgcccucaagggcgggugaggacuagucccuguucccagagcccacuuuuuuuucuuuuuuugaaauaaaauagccugucuuucagaucucaaaggcucuuuucagagccaccaaaaaaaaaaaaaaaaaaaaaaaaaaaaaaaaaaaaaaaaaaaaaaaaaaaaaaaaaaaaaaaaaaaaaaaaaaaaaaaaaaaaaaaaaaaaaaaaaaaaa

SEQ ID NO: 19598 - RNA, 6113 nt, Artificial Sequence
  SARS-CoV-2__MT877379.1__non-structural protein 3 (NSP3) mRNA gc
aggagagucccgcagucggcguccagcggcucugcuuguucgugugugugucguugcaggccuuauucaagcuuaccauggcccccaccaaggugaccuucggcgacgacacggucaucgaggugcagggguacaagagcgugaacaucaccuucgagcuggacgagcgcaucgacaagguccucaacgagaagugcuccgccuacaccguggagcugggcaccgaggugaacgaguucgcgugcgucguggccgacgccgugaucaagacgcugcagccggucagcgagcuccugaccccccuggggaucgaccucgacgagugguccauggccaccuacuaccuguucgacgagagcggcgaguucaagcuggccucccacauguacugcagcuucuacccccccgacgaggacgaggaggagggggacugcgaggaggaggaguucgagccguccacccaguacgaguacggcacggaggacgacuaccagggcaagccccucgaguucggggcgaccagcgccgcccugcagcccgaggaggagcaggaggaggacuggcuggacgacgacucccagcagaccgugggccagcaggacgggagcgaggacaaccagaccacgaccauccagaccaucguggagguccagccccagcucgagauggagcugaccccgguggugcagacgaucgaggucaacuccuucagcggcuaccugaagcucaccgacaacguguacaucaagaacgccgacaucguggaggaggcgaagaaggucaagcccaccgugguggucaacgccgccaacguguaccugaagcacgggggcggcguggccggggcccugaacaaggcgaccaacaacgccaugcaggucgaguccgacgacuacaucgccacgaacggcccccucaagguggggggcagcugcguccuguccggccacaaccuggccaagcacugccuccacgugguggggcccaacgucaacaagggcgaggacauccagcugcugaagagcgccuacgagaacuucaaccagcacgaggugcuccuggcgccgcugcucuccgccgggaucuucggcgccgaccccauccacagccugcgggugugcgucgacaccgugcgcaccaacguguaccuggccgucuucgacaagaaccucuacgacaagcugguguccagcuuccuggacaugaagagcgagaagcagguggagcagaagaucgccgagauccccaaggaggaggucaagcccuucaucaccgaguccaagccgagcguggagcagcggaagcaggacgacaagaagaucaaggcgugcguggaggaggucacgaccacccucgaggagaccaaguuccugacggagaaccugcuccuguacaucgacaucaacgggaaccugcaccccgacuccgccacccucgugagcgacaucgacaucaccuuccugaagaaggacgcccccuacaucgugggcgacgucgugcaggagggcgugcugaccgccgucgugauccccacgaagaaggccgggggcaccaccgagaugcucgcgaaggcccugcgcaaggugccgaccgacaacuacaucacgaccuaccccgggcagggccugaacggguacaccgucgaggaggccaagaccgugcucaagaagugcaaguccgccuucuacauccugcccagcaucaucuccaacgagaagcaggagauccugggcaccgugagcuggaaccuccgggagaugcuggcgcacgccgaggagacgcgcaagcugaugcccgucugcguggagaccaaggccaucguguccaccauccagcggaaguacaagggcaucaagauccaggagggggucguggacuacggcgcccgcuucuacuucuacaccagcaagacgaccguggccucccugaucaacacccucaacgaccugaacgagacccuggucacgaugccgcucggguacgugacccacggccugaaccuggaggaggcggcccgguacaugcgcagccucaaggugcccgccaccgucuccgugagcucccccgacgccgugaccgccuacaacggguaccugacgagcuccagcaagacccccgaggagcacuucaucgagaccaucucccuggcgggcagcuacaaggacuggagcuacuccggccagagcacccagcucgggaucgaguuccugaagcggggcgacaaguccgucuacuacacgagcaacccgaccaccuuccaccuggacggggaggugaucaccuucgacaaccucaagacgcugcugucccuccgcgaggugcggaccaucaaggucuucaccaccguggacaacaucaaccugcacacgcagguggucgacaugagcaugaccuacggccagcaguucggccccaccuaccuggacggggccgacgugaccaagaucaagccccacaacucccacgagggcaagacguucuacgugcucccgaacgacgacacccugcgcgucgaggccuucgaguacuaccacaccaccgaccccagcuuccuggggcgguacauguccgcccucaaccacacgaagaaguggaaguacccccaggugaacggccugaccagcaucaagugggccgacaacaacugcuaccuggcgaccgcccuccugacccugcagcagaucgagcucaaguucaaccccccggcccugcaggacgccuacuaccgcgcgcgggccggggaggccgccaacuucugcgcccugauccucgcguacugcaacaagacggugggcgagcugggcgacguccgcgagaccauguccuaccuguuccagcacgccaaccucgacagcugcaagcgggugcugaacgucgugugcaagaccugcgggcagcagcagaccacccugaagggcguggaggccgucauguacauggggacgcucuccuacgagcaguucaagaagggcgugcagauccccugcaccugcgggaagcaggccaccaaguaccuggugcagcaggagagccccuucgucaugauguccgcccccccggcgcaguacgagcugaagcacggcaccuucacgugcgccagcgaguacaccggcaacuaccagugcgggcacuacaagcacaucaccuccaaggagacccucuacugcaucgacggcgcccugcugacgaagagcagcgaguacaaggggcccaucaccgacguguucuacaaggagaacuccuacaccaccacgaucaagcccgugaccuacaagcucgacggcgucgugugcaccgagaucgaccccaagcuggacaacuacuacaagaaggacaacagcuacuucaccgagcagccgaucgaccuggugcccaaccagcccuaccccaacgccuccuucgacaacuucaaguucgucugcgacaacaucaaguucgccgacgaccucaaccagcugacgggguacaagaagccggcgagccgcgagcugaaggugaccuucuuccccgaccucaacggcgacguggucgccaucgacuacaagcacuacacccccuccuucaagaagggcgccaagcugcugcacaagcccaucguguggcacgugaacaacgccaccaacaaggcgacguacaagccgaacaccuggugcauccggugccucuggagcaccaagcccgucgagaccuccaacagcuucgacgugcugaaguccgaggacgcccaggggauggacaaccuggccugcgaggaccucaagcccgugagcgaggaggucguggagaaccccacgauccagaaggacgugcuggagugcaacgucaagaccaccgagguggugggcgacaucauccugaagccggccaacaaccgccucaagaucaccgaggaggucgggcacacggaccugauggccgcguacguggacaacuccagccugaccaucaagaagcccaacgagcucucccgcgugcugggccugaagacccucgccacccacgggcuggccgccgucaacagcgugcccugggacacgaucgccaacuacgcgaagccguuccugaacaagguggucuccaccaccaccaacaucgugacgcggugccucaaccgcgugugcaccaacuacaugcccuacuucuucacccugcugcuccagcugugcaccuucacccggagcacgaacucccgcaucaaggccagcaugcccaccaccaucgccaagaacaccgucaaguccgugggcaaguucugccuggaggccagcuucaacuaccucaagagccccaacuucuccaagcugaucaacaucaucaucugguuccugcuccugagcgugugccugggcucccucaucuacagcacggccgcgcuggggguccugauguccaaccucggcaugccgagcuacugcaccggguaccgggagggcuaccugaacuccaccaacgugaccaucgccacguacugcaccggcagcauccccugcuccgugugccugagcgggcucgacucccuggacaccuaccccagccuggagaccauccagaucacgaucuccagcuucaagugggaccucaccgccuucggccuggucgccgagugguuccuggccuacauccucuucacccgcuucuucuacgugcuggggcuggcggccaucaugcagcucuucuucuccuacuucgccgugcacuucaucagcaacuccuggcugauguggcugaucaucaaccugguccagauggcccccaucagcgcgauggugcggauguacaucuucuucgccuccuucuacuacguguggaagagcuacguccacgugguggacggcugcaacagcuccaccugcaugaugugcuacaagcgcaaccgggccacgcgcgucgagugcaccaccaucgugaacgggguccggcgcagcuucuacguguacgccaacggcggcaagggguucugcaagcuccacaacuggaacugcgugaacugcgacaccuucugcgccggcuccacguucaucagcgacgaggucgcgcgggaccugucccugcaguucaagcgcccgaucaaccccaccgaccagagcuccuacaucguggacagcgugaccgucaagaacggguccauccaccucuacuucgacaaggccggccagaagaccuacgagcggcacagccugucccacuucgugaaccuggacaaccuccgcgccaacaacacgaaggggagccugcccaucaacgugaucgucuucgacggcaaguccaagugcgaggagagcuccgccaagagcgccuccguguacuacagccagcugaugugccagcccauccuccugcuggaccaggcgcucguguccgacgucggcgacagcgccgagguggccgugaagauguucgacgccuacgucaacaccuucagcuccaccuucaacgugccgauggagaagcugaagacccugguggccacggcggaggccgagcucgccaagaacgucagccuggacaacgugcuguccaccuucaucagcgccgcgcggcagggguucguggacuccgacgucgagaccaaggacgugguggagugccucaagcugagccaccaguccgacaucgaggucaccggcgacagcugcaacaacuacaugcugacguacaacaagguggagaacaugaccccccgcgaccucggggccugcaucgacugcuccgcccggcacaucaacgcccagguggccaagagccacaacaucgcgcugaucuggaacgucaaggacuucaugucccugagcgagcagcuccgcaagcagauccgcuccgccgccaagaagaacaaccugcccuucaagcugaccugcgccaccacgcggcagguggugaacgucgugaccaccaagaucgcccucaagggcgggugaggacuagucccuguucccagagcccacuuuuuuuucuuuuuuugaaauaaaauagccugucuuucagaucucaaaggcucuuuucagagccaccaaaaaaaaaaaaaaaaaaaaaaaaaaaaaaaaaaaaaaaaaaaaaaaaaaaaaaaaaaaaaaaaaaaaaaaaaaaaaaaaaaaaaaaaaaaaaaaaaaaaa

SEQ ID NO: 19599 - RNA, 6113 nt, Artificial Sequence
  SARS-CoV-2__MT877409.1__non-structural protein 3 (NSP3) mRNA gc
aggagagucccgcagucggcguccagcggcucugcuuguucgugugugugucguugcaggccuuauucaagcuuaccauggcccccaccaaggugaccuucggcgacgacacggucaucgaggugcagggguacaagagcgugaacaucaccuucgagcuggacgagcgcaucgacaagguccucaacgagaagugcuccgccuacaccguggagcugggcaccgaggugaacgaguucgcgugcgucguggccgacgccgugaucaagacgcugcagccggucagcgagcuccugaccccccuggggaucgaccucgacgagugguccauggccaccuacuaccuguucgacgagagcggcgaguucaagcuggccucccacauguacugcagcuucuacccccccgacgaggacgaggaggagggggacugcgaggaggaggaguucgagccguccacccaguacgaguacggcacggaggacgacuaccagggcaagccccucgaguucggggcgaccagcgccgcccugcagcccgaggaggagcaggaggaggacuggcuggacgacgacucccagcagaccgugggccagcaggacgggagcgaggacaaccagaccacgaccauccagaccaucguggagguccagccccagcucgagauggagcugaccccgguggugcagacgaucgaggucaacuccuucagcggcuaccugaagcucaccgacaacguguacaucaagaacgccgacaucguggaggaggcgaagaaggucaagcccaccgugguggucaacgccgccaacguguaccugaagcacgggggcggcguggccggggcccugaacaaggcgaccaacaacgccaugcaggucgaguccgacgacuacaucgccacgaacggcccccucaagguggggggcagcugcguccuguccggccacaaccuggccaagcacugccuccacgugguggggcccaacgucaacaagggcgaggacauccagcugcugaagagcgccuacgagaacuucaaccagcacgaggugcuccuggcgccgcugcucuccgccgggaucuucggcgccgaccccauccacagccugcgggugugcgucgacaccgugcgcaccaacguguaccuggccgucuucgacaagaaccucuacgacaagcugguguccagcuuccuggagaugaagagcgagaagcagguggagcagaagaucgccgagauccccaaggaggaggucaagcccuucaucaccgaguccaagccgagcguggagcagcggaagcaggacgacaagaagaucaaggcgugcguggaggaggucacgaccacccucgaggagaccaaguuccugacggagaaccugcuccuguacaucgacaucaacgggaaccugcaccccgacuccgccacccucgugagcgacaucgacaucaccuuccugaagaaggacgcccccuacaucgugggcgacgucgugcaggagggcgugcugaccgccgucgugauccccacgaagaaggccgggggcaccaccgagaugcucgcgaaggcccugcgcaaggugccgaccgacaacuacaucacgaccuaccccgggcagggccugaacggguacaccgucgaggaggccaagaccgugcucaagaagugcaaguccgccuucuacauccugcccagcaucaucuccaacgagaagcaggagauccugggcaccgugagcuggaaccuccgggagaugcuggcgcacgccgaggagacgcgcaagcugaugcccgucugcguggagaccaaggccaucguguccaccauccagcggaaguacaagggcaucaagauccaggagggggucguggacuacggcgcccgcuucuacuucuacaccagcaagacgaccguggccucccugaucaacacccucaacgaccugaacgagacccuggucacgaugccgcucggguacgugacccacggccugaaccuggaggaggcggcccgguacaugcgcagccucaaggugcccgccaccgucuccgugagcucccccgacgccgugaccgccuacaacggguaccugacgagcuccagcaagacccccgaggagcacuucaucgagaccaucucccuggcgggcagcuacaaggacuggagcuacuccggccagagcacccagcucgggaucgaguuccugaagcggggcgacaaguccgucuacuacacgagcaacccgaccaccuuccaccuggacggggaggugaucaccuucgacaaccucaagacgcugcugucccuccgcgaggugcggaccaucaaggucuucaccaccguggacaacaucaaccugcacacgcagguggucgacaugagcaugaccuacggccagcaguucggccccaccuaccuggacggggccgacgugaccaagaucaagccccacaacucccacgagggcaagacguucuacgugcucccgaacgacgacacccugcgcgucgaggccuucgaguacuaccacaccaccgaccccagcuuccuggggcgguacauguccgcccucaaccacacgaagaaguggaaguacccccaggugaacggccugaccagcaucaagugggccgacaacaacugcuaccuggcgaccgcccuccugacccugcagcagaucgagcucaaguucaaccccccggcccugcaggacgccuacuaccgcgcgcgggccggggaggccgccaacuucugcgcccugauccucgcguacugcaacaagacggugggcgagcugggcgacguccgcgagaccauguccuaccuguuccagcacgccaaccucgacagcugcaagcgggugcugaacgucgugugcaagaccugcgggcagcagcagaccacccugaagggcguggaggccgucauguacauggggacgcucuccuacgagcaguucaagaagggcgugcagauccccugcaccugcgggaagcaggccaccaaguaccuggugcagcaggagagccccuucgucaugauguccgcccccccggcgcaguacgagcugaagcacggcaccuucacgugcgccagcgaguacaccggcaacuaccagugcgggcacuacaagcacaucaccuccaaggagacccucuacugcaucgacggcgcccugcugacgaagagcagcgaguacaaggggcccaucaccgacguguucuacaaggagaacuccuacaccaccacgaucaagcccgugaccuacaagcucgacggcgucgugugcaccgagaucgaccccaagcuggacaacuacuacaagaaggacaacagcuacuucaccgagcagccgaucgaccuggugcccaaccagcccuaccccaacgccuccuucgacaacuucaaguucgucugcgacaacaucaaguucgccgacgaccucaaccagcugacgggguacaagaagccggcgagccgcgagcugaaggugaccuucuuccccgaccucaacggcgacguggucgccaucgacuacaagcacuacacccccuccuucaagaagggcgccaagcugcugcacaagcccaucguguggcacgugaacaacgccaccaacaaggcgacguacaagccgaacaccuggugcauccggugccucuggagcaccaagcccgucgagaccuccaacagcuucgacgugcugaaguccgaggacgcccaggggauggacaaccuggccugcgaggaccucaagcccgugagcgaggaggucguggagaaccccacgauccagaaggacgugcuggagugcaacgucaagaccaccgagguggugggcgacaucauccugaagccggccaacaaccgccucaagaucaccgaggaggucgggcacacggaccugauggccgcguacguggacaacuccagccugaccaucaagaagcccaacgagcucucccgcgugcugggccugaagacccucgccacccacgggcuggccgccgucaacagcgugcccugggacacgaucgccaacuacgcgaagccguuccugaacaagguggucuccaccaccaccaacaucgugacgcggugccucaaccgcgugugcaccaacuacaugcccuacuucuucacccugcugcuccagcugugcaccuucacccggagcacgaacucccgcaucaaggccagcaugcccaccaccaucgccaagaacaccgucaaguccgugggcaaguucugccuggaggccagcuucaacuaccucaagagccccaacuucuccaagcugaucaacaucaucaucugguuccugcuccugagcgugugccugggcucccucaucuacagcacggccgcgcuggggguccugauguccaaccucggcaugccgagcuacugcaccggguaccgggagggcuaccugaacuccaccaacgugaccaucgccacguacugcaccggcagcauccccugcuccgugugccugagcgggcucgacucccuggacaccuaccccagccuggagaccauccagaucacgaucuccagcuucaagugggaccucaccgccuucggccuggucgccgagugguuccuggccuacauccucuucacccgcuucuucuacgugcuggggcuggcggccaucaugcagcucuucuucuccuacuucgccgugcacuucaucagcaacuccuggcugauguggcugaucaucaaccugguccagauggcccccaucagcgcgauggugcggauguacaucuucuucgccuccuucuacuacguguggaagagcuacguccacgugguggacggcugcaacagcuccaccugcaugaugugcuacaagcgcaaccgggccacgcgcgucgagugcaccaccaucgugaacgggguccggcgcagcuucuacguguacgccaacggcggcaagggguucugcaagcuccacaacuggaacugcguguccugcgacaccuucugcgccggcagcacguucaucuccgacgaggucgcgcgggaccugagccugcaguucaagcgcccgaucaaccccaccgaccaguccagcuacaucguggacuccgugaccgucaagaacgggagcauccaccucuacuucgacaaggccggccagaagaccuacgagcggcacucccugagccacuucgugaaccuggacaaccuccgcgccaacaacacgaaggggucccugcccaucaacgugaucgucuucgacggcaagagcaagugcgaggaguccagcgccaaguccgccagcguguacuacucccagcugaugugccagcccauccuccugcuggaccaggcgcucgugagcgacgucggcgacagcgccgagguggccgugaagauguucgacgccuacgucaacaccuucuccagcaccuucaacgugccgauggagaagcugaagacccugguggccacggcggaggccgagcucgccaagaacgucucccuggacaacgugcugagcaccuucaucuccgccgcgcggcagggguucguggacagcgacgucgagaccaaggacgugguggagugccucaagcugucccaccagagcgacaucgaggucaccggcgacuccugcaacaacuacaugcugacguacaacaagguggagaacaugaccccccgcgaccucggggccugcaucgacugcagcgcccggcacaucaacgcccagguggccaagucccacaacaucgcgcugaucuggaacgucaaggacuucaugagccuguccgagcagcuccgcaagcagauccgcagcgccgccaagaagaacaaccugcccuucaagcugaccugcgccaccacgcggcagguggugaacgucgugaccaccaagaucgcccucaagggcgggugaggacuagucccuguucccagagcccacuuuuuuuucuuuuuuugaaauaaaauagccugucuuucagaucucaaaggcucuuuucagagccaccaaaaaaaaaaaaaaaaaaaaaaaaaaaaaaaaaaaaaaaaaaaaaaaaaaaaaaaaaaaaaaaaaaaaaaaaaaaaaaaaaaaaaaaaaaaaaaaaaaaaa

SEQ ID NO: 19600 - RNA, 6113 nt, Artificial Sequence
  SARS-CoV-2__MT872497.1__non-structural protein 3 (NSP3) mRNA gc
aggagagucccgcagucggcguccagcggcucugcuuguucgugugugugucguugcaggccuuauucaagcuuaccauggcccccaccaaggugaccuucggcgacgacacggucaucgaggugcagggguacaagagcgugaacaucaccuucgagcuggacgagcgcaucgacaagguccucaacgagaagugcuccgccuacaccguggagcugggcaccgaggugaacgaguucgcgugcgucguggccgacgccgugaucaagacgcugcagccggucagcgagcuccugaccccccuggggaucgaccucgacgagugguccauggccaccuacuaccuguucgacgagagcggcgaguucaagcuggccucccacauguacugcagcuucuacccccccgacgaggacgaggaggagggggacugcgaggaggaggaguucgagccguccacccaguacgaguacggcacggaggacgacuaccagggcaagccccucgaguucggggcgaccagcgccgcccugcagcccgaggaggagcaggaggaggacuggcuggacgacgacucccagcagaccgugggccagcaggacgggagcgaggacaaccagaccacgaccauccagaccaucguggagguccagccccagcucgagauggagcugaccccgguggugcagacgaucgaggucaacuccuucagcggcuaccugaagcucaccgacaacguguacaucaagaacgccgacaucguggaggaggcgaagaaggucaagcccaccgugguggucaacgccgccaacguguaccugaagcacgggggcggcguggccggggcccugaacaaggcgaccaacaacgccaugcaggucgaguccgacgacuacaucgccacgaacggcccccucaagguggggggcagcugcguccuguccggccacaaccuggccaagcacugccuccacgugguggggcccaacgucaacaagggcgaggacauccagcugcugaagagcgccuacgagaacuucaaccagcacgaggugcuccuggcgccgcugcucuccgccgggaucuucggcgccgaccccauccacagccugcgggugugcgucgacaccgugcgcaccaacguguaccuggccgucuucgacaagaaccucuacgacaagcugguguccagcuuccuggagaugaagagcgagaagcagguggagcagaagaucgccgagauccccaaggaggaggucaagcccuucaucaccgaguccaagccgagcguggagcagcggaagcaggacgacaagaagaucaaggcgugcguggaggaggucacgaccacccucgaggagaccaaguuccugacggagaaccugcuccuguacaucgacaucaacgggaaccugcaccccgacuccgccacccucgugagcgacaucgacaucaccuuccugaagaaggacgcccccuacaucgugggcgacgucgugcaggagggcgugcugaccgccgucgugauccccacgaagaaggccgggggcaccaccgagaugcucgcgaaggcccugcgcaaggugccgaccgacaacuacaucacgaccuaccccgggcagggccugaacggguacaccgucgaggaggccaagaccgugcucaagaagugcaaguccgccuucuacauccugcccagcaucaucuccaacgagaagcaggagauccugggcaccgugagcuggaaccuccgggagaugcuggcgcacgccgaggagacgcgcaagcugaugcccgucugcguggagaccaaguccaucgugagcaccauccagcggaaguacaagggcaucaagauccaggagggggucguggacuacggcgcccgcuucuacuucuacaccuccaagacgaccguggccagccugaucaacacccucaacgaccugaacgagacccuggucacgaugccgcucggguacgugacccacggccugaaccuggaggaggccgcgcgguacaugcgcucccucaaggugcccgccaccgucagcguguccagccccgacgccgugaccgccuacaacggguaccugacguccagcuccaagacccccgaggagcacuucaucgagaccaucagccuggccggcagcuacaaggacugguccuacagcggccaguccacccagcucgggaucgaguuccugaagcggggcgacaagagcgucuacuacacguccaacccgaccaccuuccaccuggacggggaggugaucaccuucgacaaccucaagacgcugcugagccuccgcgaggugcggaccaucaaggucuucaccaccguggacaacaucaaccugcacacgcagguggucgacauguccaugaccuacggccagcaguucggccccaccuaccuggacggggcggacgugaccaagaucaagccccacaacagccacgagggcaagacguucuacgugcucccgaacgacgacacccugcgcgucgaggccuucgaguacuaccacaccaccgaccccuccuuccuggggcgguacaugagcgcccucaaccacacgaagaaguggaaguacccccaggugaacggccugaccuccaucaagugggccgacaacaacugcuaccuggccaccgcgcuccugacccugcagcagaucgagcucaaguucaaccccccggcccugcaggacgccuacuaccgcgcccgggcgggggaggccgccaacuucugcgcccugauccucgccuacugcaacaagacggugggcgagcugggcgacguccgcgagaccaugagcuaccuguuccagcacgcgaaccucgacuccugcaagcgggugcugaacgucgugugcaagaccugcgggcagcagcagaccacccugaagggcguggaggccgucauguacauggggacgcucagcuacgagcaguucaagaagggcgugcagauccccugcaccugcgggaagcaggccaccaaguaccuggugcagcaggagucccccuucgucaugaugagcgcccccccggcccaguacgagcugaagcacggcaccuucacgugcgcguccgaguacaccggcaacuaccagugcgggcacuacaagcacaucaccagcaaggagacccucuacugcaucgacggcgcccugcugacgaagagcuccgaguacaaggggcccaucaccgacguguucuacaaggagaacagcuacaccaccacgaucaagcccgugaccuacaagcucgacggcgucgugugcaccgagaucgaccccaagcuggacaacuacuacaagaaggacaacuccuacuucaccgagcagccgaucgaccuggugcccaaccagcccuaccccaacgccagcuucgacaacuucaaguucgucugcgacaacaucaaguucgccgacgaccucaaccagcugacgggguacaagaagccggccucccgcgagcugaaggugaccuucuuccccgaccucaacggcgacguggucgcgaucgacuacaagcacuacacccccagcuucaagaagggcgccaagcugcugcacaagcccaucguguggcacgugaacaacgccaccaacaaggccacguacaagccgaacaccuggugcauccggugccucugguccaccaagcccgucgagaccagcaacuccuucgacgugcugaagagcgaggacgcgcaggggauggacaaccuggccugcgaggaccucaagcccguguccgaggaggucguggagaaccccacgauccagaaggacgugcuggagugcaacgucaagaccaccgagguggugggcgacaucauccugaagccggccaacaacagccucaagaucaccgaggaggucgggcacacggaccugauggccgccuacguggacaacuccagccugaccaucaagaagcccaacgagcucucccgcgugcugggccugaagacccucgcgacccacgggcuggccgccgucaacagcgugcccugggacacgaucgccaacuacgccaagccguuccugaacaagguggucuccaccaccaccaacaucgugacgcgcugccucaaccgggugugcaccaacuacaugcccuacuucuucacccugcugcuccagcugugcaccuucacccgcagcacgaacucccggaucaaggcgagcaugcccaccaccaucgccaagaacaccgucaagagcgugggcaaguucugccuggaggccuccuucaacuaccucaagagccccaacuucuccaagcugaucaacaucaucaucugguuccugcuccugagcgugugccugggcucccucaucuacagcacggccgcccuggggguccugauguccaaccucggcaugccgagcuacugcaccggguaccgcgagggcuaccugaacuccaccaacgugaccaucgcgacguacugcaccggcagcauccccugcuccgugugccugagcgggcucgacucccuggacaccuaccccagccuggagaccauccagaucacgaucuccagcuucaagugggaccucaccgccuucggccuggucgccgagugguuccuggccuacauccucuucacccgguucuucuacgugcuggggcuggccgcgaucaugcagcucuucuucuccuacuucgccgugcacuucaucagcaacuccuggcugauguggcugaucaucaaccugguccagauggcccccaucagcgccauggugcgcauguacaucuucuucgcgagcuucuacuacguguggaaguccuacguccacgugguggacggcugcaacagcuccaccugcaugaugugcuacaagcggaaccgcgccacgcgggucgagugcaccaccaucgugaacgggguccgccggagcuucuacguguacgccaacggcggcaagggguucugcaagcuccacaacuggaacugcgugaacugcgacaccuucugcgccggcuccacguucaucagcgacgaggucgcccgcgaccugucccugcaguucaagcggccgaucaaccccaccgaccagagcuccuacaucguggacagcgugaccgucaagaacggguccauccaccucuacuucgacaaggcgggccagaagaccuacgagcgccacagccugucccacuucgugaaccuggacaaccuccgggccaacaacacgaaggggagccugcccaucaacgugaucgucuucgacggcaaguccaagugcgaggagagcuccgccaagagcgccuccguguacuacagccagcugaugugccagcccauccuccugcuggaccaggcccucgugagcgacgucggcgacuccgcggagguggccgugaagauguucgacgccuacgucaacaccuucagcuccaccuucaacgugccgauggagaagcugaagacccugguggccacggccgaggcggagcucgccaagaacgucagccuggacaacgugcuguccaccuucaucagcgccgcccgccagggguucguggacuccgacgucgagaccaaggacgugguggagugccucaagcugagccaccaguccgacaucgaggucaccggcgacagcugcaacaacuacaugcugacguacaacaagguggagaacaugaccccccgggaccucggggcgugcaucgacugcuccgcccgccacaucaacgcccagguggccaagagccacaacaucgcccugaucuggaacgucaaggacuucaugucccugagcgagcagcuccggaagcagauccgcuccgcggccaagaagaacaaccugcccuucaagcugaccugcgccaccacgcgccagguggugaacgucgugaccaccaagaucgcccucaagggcgggugaggacuagucccuguucccagagcccacuuuuuuuucuuuuuuugaaauaaaauagccugucuuucagaucucaaaggcucuuuucagagccaccaaaaaaaaaaaaaaaaaaaaaaaaaaaaaaaaaaaaaaaaaaaaaaaaaaaaaaaaaaaaaaaaaaaaaaaaaaaaaaaaaaaaaaaaaaaaaaaaaaaaa

SEQ ID NO: 19601 - RNA, 6113 nt, Artificial Sequence
  SARS-CoV-2__MT873807.1__non-structural protein 3 (NSP3) mRNA gc
aggagagucccgcagucggcguccagcggcucugcuuguucgugugugugucguugcaggccuuauucaagcuuaccauggcccccaccaaggugaccuucggcgacgacacggucaucgaggugcagggguacaagagcgugaacaucaccuucgagcuggacgagcgcaucgacaagguccucaacgagaagugcuccgccuacaccguggagcugggcaccgaggugaacgaguucgcgugcgucguggccgacgccgugaucaagacgcugcagccggucagcgagcuccugaccccccuggggaucgaccucgacgagugguccauggccaccuacuaccuguucgacgagagcggcgaguucaagcuggccucccacauguacugcagcuucuacccccccgacgaggacgaggaggagggggacugcgaggaggaggaguucgagccguccacccaguacgaguacggcacggaggacgacuaccagggcaagccccucgaguucggggcgaccagcgccgcccugcagcccgaggaggagcaggaggaggacuggcuggacgacgacucccagcagaccgugggccagcaggacgggagcgaggacaaccagaccacgaccauccagaccaucguggagguccagccccagcucgagauggagcugaccccgguggugcagacgaucgaggucaacuccuucagcggcuaccugaagcucaccgacaacguguacaucaagaacgccgacaucguggaggaggcgaagaaggucaagcccaccgugguggucaacgccgccaacguguaccugaagcacgggggcggcguggccggggcccugaacaaggcgaccaacaacgccaugcaggucgaguccgacgacuacaucgccacgaacggcccccucaagguggggggcagcugcguccuguccggccacaaccuggccaagcacugccuccacgugguggggcccaacgucaacaagggcgaggacauccagcugcugaagagcgccuacgagaacuucaaccagcacgaggugcuccuggcgccgcugcucuccgccgggaucuucggcgccgaccccauccacagccugcgggugugcgucgacaccgugcgcaccaacguguaccuggccgucuucgacaagaaccucuacgacaagcugguguccagcuuccuggagaugaagagcgagaagcagguggagcagaagaucgccgagauccccaaggaggaggucaagcccuucaucaccgaguccaagccgagcguggagcagcggaagcaggacgacaagaagaucaaggcgugcguggaggaggucacgaccacccucgaggagaccaaguuccugacggagaaccugcuccuguacaucgacaucaacgggaaccugcaccccgacuccgccacccucgugagcgacaucgacaucaccuuccugaagaaggacgcccccuacaucgugggcgacgucgugcaggagggcgugcugaccgccgucgugauccccacgaagaaggccgggggcaccaccgagaugcucgcgaaggcccugcgcaaggugccgaccgacaacuacaucacgaccuaccccgggcagggccugaacggguacaccgucgaggaggccaagaccgugcucaagaagugcaaguccgccuucuacauccugcccagcaucaucuccaacgagaagcaggagauccugggcaccgugagcuggaaccuccgggagaugcuggcgcacgccgaggagacgcgcaagcugaugcccgucugcguggagaccaaggccaucguguccaccauccagcggaaguacaagggcaucaagauccaggagggggucguggacuacggcgcccgcuucuacuucuacaccagcaagacgaccguggccucccugaucaacacccucaacgaccugaacgagacccuggucacgaugccgcucggguacgugacccacggccugaaccuggaggaggcggcccgguacaugcgcagccucaaggugcccgccaccgucuccgugagcucccccgacgccgugaccgccuacaacggguaccugacgagcuccagcaagacccccgaggagcacuucaucgagaccaucucccuggcgggcagcuacaaggacuggagcuacuccggccagagcacccagcucgggaucgaguuccugaagcggggcgacaaguccgucuacuacaucagcaacccgacgaccuuccaccuggacggggaggugaucaccuucgacaaccucaagacccugcugucccuccgcgaggugcggacgaucaaggucuucaccaccguggacaacaucaaccugcacacccagguggucgacaugagcaugacguacggccagcaguucggccccaccuaccuggacggggccgacgugaccaagaucaagccccacaacucccacgagggcaagaccuucuacgugcucccgaacgacgacacgcugcgcgucgaggccuucgaguacuaccacaccaccgaccccagcuuccuggggcgguacauguccgcccucaaccacaccaagaaguggaaguacccccaggugaacggccugacgagcaucaagugggccgacaacaacugcuaccuggcgaccgcccuccugacccugcagcagaucgagcucaaguucaaccccccggcccugcaggacgccuacuaccgcgcgcgggccggggaggccgccaacuucugcgcccugauccucgcguacugcaacaagaccgugggcgagcugggcgacguccgcgagacgauguccuaccuguuccagcacgccaaccucgacagcugcaagcgggugcugaacgucgugugcaagaccugcgggcagcagcagaccacccugaagggcguggaggccgucauguacauggggacccucuccuacgagcaguucaagaagggcgugcagauccccugcacgugcgggaagcaggccaccaaguaccuggugcagcaggagagccccuucgucaugauguccgcccccccggcgcaguacgagcugaagcacggcaccuucaccugcgccagcgaguacacgggcaacuaccagugcgggcacuacaagcacaucaccuccaaggagacccucuacugcaucgacggcgcccugcugaccaagagcagcgaguacaaggggcccaucacggacguguucuacaaggagaacuccuacaccaccaccaucaagcccgugacguacaagcucgacggcgucgugugcaccgagaucgaccccaagcuggacaacuacuacaagaaggacaacagcuacuucaccgagcagccgaucgaccuggugcccaaccagcccuaccccaacgccuccuucgacaacuucaaguucgucugcgacaacaucaaguucgccgacgaccucaaccagcugaccggguacaagaagccggcgagccgcgagcugaaggugacguucuuccccgaccucaacggcgacguggucgccaucgacuacaagcacuacacccccuccuucaagaagggcgccaagcugcugcacaagcccaucguguggcacgugaacaacgccaccaacaaggcgaccuacaagccgaacacguggugcauccggugccucuggagcaccaagcccgucgagaccuccaacagcuucgacgugcugaaguccgaggacgcccaggggauggacaaccuggccugcgaggaccucaagcccgugagcgaggaggucguggagaaccccaccauccagaaggacgugcuggagugcaacgucaagacgaccgagguggugggcgacaucauccugaagccggccaacaacucccucaagaucaccgaggaggucgggcacaccgaccugauggccgcguacguggacaacagcucccugacgaucaagaagcccaacgagcucagccgcgugcugggccugaagacccucgccacccacgggcuggccgccgucaacuccgugcccugggacaccaucgccaacuacgcgaagccguuccugaacaagguggucagcacgaccaccaacaucgugacccgcugccucaaccgggugugcacgaacuacaugcccuacuucuucacccugcugcuccagcugugcaccuucacccgcuccaccaacagccggaucaaggccuccaugcccacgaccaucgccaagaacaccgucaagagcgugggcaaguucugccuggaggccagcuucaacuaccucaagucccccaacuucagcaagcugaucaacaucaucaucugguuccugcuccuguccgugugccugggcagccucaucuacuccaccgccgcgcuggggguccugaugagcaaccucggcaugccguccuacugcacgggguaccgcgagggcuaccugaacagcaccaacgugaccaucgccaccuacugcacgggcuccauccccugcagcgugugccuguccgggcucgacagccuggacaccuaccccucccuggagaccauccagaucaccaucagcuccuucaagugggaccucacggccuucggccuggucgccgagugguuccuggccuacauccucuucacccgguucuucuacgugcuggggcuggcggccaucaugcagcucuucuucagcuacuucgccgugcacuucaucuccaacagcuggcugauguggcugaucaucaaccugguccagauggcccccaucuccgcgauggugcgcauguacaucuucuucgccagcuucuacuacguguggaagagcuacguccacgugguggacggcugcaacuccagcaccugcaugaugugcuacaagcggaaccgcgccacccgggucgagugcacgaccaucgugaacgggguccgccgguccuucuacguguacgccaacggcggcaagggguucugcaagcuccacaacuggaacugcgugaacugcgacaccuucugcgccggcagcaccuucaucuccgacgaggucgcgcgcgaccugagccugcaguucaagcggccgaucaaccccacggaccaguccagcuacaucguggacuccgugaccgucaagaacgggagcauccaccucuacuucgacaaggccggccagaagaccuacgagcgccacucccugagccacuucgugaaccuggacaaccuccgggccaacaacaccaaggggucccugcccaucaacgugaucgucuucgacggcaagagcaagugcgaggaguccagcgccaaguccgccagcguguacuacucccagcugaugugccagcccauccuccugcuggaccaggcgcucgugagcgacgucggcgacagcgccgagguggccgugaagauguucgacgccuacgucaacacguucuccagcaccuucaacgugccgauggagaagcugaagacccugguggccaccgcggaggccgagcucgccaagaacgucucccuggacaacgugcugagcacguucaucuccgccgcgcgccagggguucguggacagcgacgucgagaccaaggacgugguggagugccucaagcugucccaccagagcgacaucgaggucaccggcgacuccugcaacaacuacaugcugaccuacaacaagguggagaacaugacgccccgggaccucggggccugcaucgacugcagcgcccgccacaucaacgcccagguggccaagucccacaacaucgcgcugaucuggaacgucaaggacuucaugagccuguccgagcagcuccggaagcagauccgcagcgccgccaagaagaacaaccugcccuucaagcugaccugcgccaccacccgccagguggugaacgucgugacgaccaagaucgcccucaagggcgggugaggacuagucccuguucccagagcccacuuuuuuuucuuuuuuugaaauaaaauagccugucuuucagaucucaaaggcucuuuucagagccaccaaaaaaaaaaaaaaaaaaaaaaaaaaaaaaaaaaaaaaaaaaaaaaaaaaaaaaaaaaaaaaaaaaaaaaaaaaaaaaaaaaaaaaaaaaaaaaaaaaaaa

SEQ ID NO: 19602 - RNA, 6113 nt, Artificial Sequence
  SARS-CoV-2__MT856452.1__non-structural protein 3 (NSP3) mRNA gc
aggagagucccgcagucggcguccagcggcucugcuuguucgugugugugucguugcaggccuuauucaagcuuaccauggcccccaccaaggugaccuucggcgacgacacggucaucgaggugcagggguacaagagcgugaacaucaccuucgagcuggacgagcgcaucgacaagguccucaacgagaagugcuccgccuacaccguggagcugggcaccgaggugaacgaguucgcgugcgucguggccgacgccgugaucaagacgcugcagccggucagcgagcuccugaccccccuggggaucgaccucgacgagugguccauggccaccuacuaccuguucgacgagagcggcgaguucaagcuggccucccacauguacugcagcuucuacccccccgacgaggacgaggaggagggggacugcgaggaggaggaguucgagccguccacccaguacgaguacggcacggaggacgacuaccagggcaagccccucgaguucggggcgaccagcgccgcccugcagcccgaggaggagcaggaggaggacuggcuggacgacgacucccagcagaccgugggccagcaggacgggagcgaggacaaccagaccacgaccauccagaccaucguggagguccagccccagcucgagauggagcugaccccgguggugcagacgaucgaggucaacuccuucagcggcuaccugaagcucaccgacaacguguacaucaagaacgccgacaucguggaggaggcgaagaaggucaagcccaccgugguggucaacgccgccaacguguaccugaagcacgggggcggcguggccggggcccugaacaaggcgaccaacaacgccaugcaggucgaguccgacgacuacaucgccacgaacggcccccucaagguggggggcagcugcguccuguccggccacaaccuggccaagcacugccuccacgugguggggcccaacgucaacaagggcgaggacauccagcugcugaagagcgccuacgagaacuucaaccagcacgaggugcuccuggcgccgcugcucuccgccgggaucuucggcgccgaccccauccacagccugcgggugugcgucgacaccgugcgcaccaacguguaccuggccgucuucgacaagaaccucuacgacaagcugguguccagcuuccuggagaugaagagcgagaagcagguggagcagaagaucgccgagauccccaaggaggaggucaagcccuucaucaccgaguccaagccgagcguggagcagcggaagcaggacgacaagaagaucaaggcgugcguggaggaggucacgaccacccucgaggagaccaaguuccugacggagaaccugcuccuguacaucgacaucaacgggaaccugcaccccgacuccgccacccucgugagcgacaucgacaucaccuuccugcgcaaggacgcccccuacaucgugggcgacgucgugcaggagggcgugcugaccgccgucgugauccccacgaagaaggccgggggcaccaccgagaugcucgcgaaggcccugcggaaggugccgaccgacaacuacaucacgaccuaccccgggcagggccugaacggguacaccgucgaggaggccaagaccgugcucaagaagugcaaguccgccuucuacauccugcccagcaucaucuccaacgagaagcaggagauccugggcaccgugagcuggaaccuccgcgagaugcuggcgcacgccgaggagacgcggaagcugaugcccgucugcguggagaccaaggccaucguguccaccauccagcgcaaguacaagggcaucaagauccaggagggggucguggacuacggcgcccgguucuacuucuacaccagcaagacgaccguggccucccugaucaacacccucaacgaccugaacgagacccuggucacgaugccgcucggguacgugacccacggccugaaccuggaggaggcggcccgcuacaugcggagccucaaggugcccgccaccgucuccgugagcucccccgacgccgugaccgccuacaacggguaccugacgagcuccagcaagacccccgaggagcacuucaucgagaccaucucccuggcgggcagcuacaaggacuggagcuacuccggccagagcacccagcucgggaucgaguuccugaagcgcggcgacaaguccgucuacuacacgagcaacccgaccaccuuccaccuggacggggaggugaucaccuucgacaaccucaagacgcugcugucccuccgggaggugcgcaccaucaaggucuucaccaccguggacaacaucaaccugcacacgcagguggucgacaugagcaugaccuacggccagcaguucggccccaccuaccuggacggggccgacgugaccaagaucaagccccacaacucccacgagggcaagacguucuacgugcucccgaacgacgacacccugcgggucgaggccuucgaguacuaccacaccaccgaccccagcuuccuggggcgcuacauguccgcccucaaccacacgaagaaguggaaguacccccaggugaacggccugaccagcaucaagugggccgacaacaacugcuaccuggcgaccgcccuccugacccugcagcagaucgagcucaaguucaaccccccggcccugcaggacgccuacuaccgggcgcgcgccggggaggccgccaacuucugcgcccugauccucgcguacugcaacaagacggugggcgagcugggcgacguccgggagaccauguccuaccuguuccagcacgccaaccucgacagcugcaagcgcgugcugaacgucgugugcaagaccugcgggcagcagcagaccacccugaagggcguggaggccgucauguacauggggacgcucuccuacgagcaguucaagaagggcgugcagauccccugcaccugcgggaagcaggccaccaaguaccuggugcagcaggagagccccuucgucaugauguccgcccccccggcgcaguacgagcugaagcacggcaccuucacgugcgccagcgaguacaccggcaacuaccagugcgggcacuacaagcacaucaccuccaaggagacccucuacugcaucgacggcgcccugcugacgaagagcagcgaguacaaggggcccaucaccgacguguucuacaaggagaacuccuacaccaccacgaucaagcccgugaccuacaagcucgacggcgucgugugcaccgagaucgaccccaagcuggacaacuacuacaagaaggacaacagcuacuucaccgagcagccgaucgaccuggugcccaaccagcccuaccccaacgccuccuucgacaacuucaaguucgucugcgacaacaucaaguucgccgacgaccucaaccagcugacgggguacaagaagccggcgagccgggagcugaaggugaccuucuuccccgaccucaacggcgacguggucgccaucgacuacaagcacuacacccccuccuucaagaagggcgccaagcugcugcacaagcccaucguguggcacgugaacaacgccaccaacaaggcgacguacaagccgaacaccuggugcauccgcugccucuggagcaccaagcccgucgagaccuccaacagcuucgacgugcugaaguccgaggacgcccaggggauggacaaccuggccugcgaggaccucaagcccgugagcgaggaggucguggagaaccccacgauccagaaggacgugcuggagugcaacgucaagaccaccgagguggugggcgacaucauccugaagccggccaacaacucccucaagaucaccgaggaggucgggcacacggaccugauggccgcguacguggacaacagcucccugaccaucaagaagcccaacgagcucagccgcgugcugggccugaagacccucgccacccacgggcuggccgccgucaacuccgugcccugggacacgaucgccaacuacgcgaagccguuccugaacaagguggucagcaccaccaccaacaucgugacgcggugccucaaccgcgugugcaccaacuacaugcccuacuucuucacccugcugcuccagcugugcaccuucacccgguccacgaacagccgcaucaaggccuccaugcccaccaccaucgccaagaacaccgucaagagcgugggcaaguucugccuggaggccagcuucaacuaccucaagucccccaacuucagcaagcugaucaacaucaucaucugguuccugcuccuguccgugugccugggcagccucaucuacuccacggccgcgcuggggguccugaugagcaaccucggcaugccguccuacugcaccggguaccgggagggcuaccugaacagcaccaacgugaccaucgccacguacugcaccggcuccauccccugcagcgugugccuguccgggcucgacagccuggacaccuaccccucccuggagaccauccagaucacgaucagcuccuucaagugggaccucaccgccuucggccuggucgccgagugguuccuggccuacauccucuucacccgcuucuucuacgugcuggggcuggcggccaucaugcagcucuucuucagcuacuucgccgugcacuucaucuccaacagcuggcugauguggcugaucaucaaccugguccagauggcccccaucuccgcgauggugcggauguacaucuucuucgccagcuucuacuacguguggaagagcuacguccacgugguggacggcugcaacuccagcaccugcaugaugugcuacaagcgcaaccgggccacgcgcgucgagugcaccaccaucgugaacgggguccggcgcuccuucuacguguacgccaacggcggcaagggguucugcaagcuccacaacuggaacugcgugaacugcgacaccuucugcgccggcagcacguucaucuccgacgaggucgcgcgggaccugagccugcaguucaagcgcccgaucaaccccaccgaccaguccagcuacaucguggacuccgugaccgucaagaacgggagcauccaccucuacuucgacaaggccggccagaagaccuacgagcggcacucccugagccacuucgugaaccuggacaaccuccgcgccaacaacacgaaggggucccugcccaucaacgugaucgucuucgacggcaagagcaagugcgaggaguccagcgccaaguccgccagcguguacuacucccagcugaugugccagcccauccuccugcuggaccaggcgcucgugagcgacgucggcgacagcgccgagguggccgugaagauguucgacgccuacgucaacaccuucuccagcaccuucaacgugccgauggagaagcugaagacccugguggccacggcggaggccgagcucgccaagaacgucucccuggacaacgugcugagcaccuucaucuccgccgcgcggcagggguucguggacagcgacgucgagaccaaggacgugguggagugccucaagcugucccaccagagcgacaucgaggucaccggcgacuccugcaacaacuacaugcugacguacaacaagguggagaacaugaccccccgcgaccucggggccugcaucgacugcagcgcccggcacaucaacgcccagguggccaagucccacaacaucgcgcugaucuggaacgucaaggacuucaugagccuguccgagcagcuccgcaagcagauccgcagcgccgccaagaagaacaaccugcccuucaagcugaccugcgccaccacgcggcagguggugaacgucgugaccaccaagaucgcccucaagggcgggugaggacuagucccuguucccagagcccacuuuuuuuucuuuuuuugaaauaaaauagccugucuuucagaucucaaaggcucuuuucagagccaccaaaaaaaaaaaaaaaaaaaaaaaaaaaaaaaaaaaaaaaaaaaaaaaaaaaaaaaaaaaaaaaaaaaaaaaaaaaaaaaaaaaaaaaaaaaaaaaaaaaaa

SEQ ID NO: 19603 - RNA, 6113 nt, Artificial Sequence
  SARS-CoV-2__MT856453.1__non-structural protein 3 (NSP3) mRNA gc
aggagagucccgcagucggcguccagcggcucugcuuguucgugugugugucguugcaggccuuauucaagcuuaccauggcccccaccaaggugaccuucggcgacgacacggucaucgaggugcagggguacaagagcgugaacaucaccuucgagcuggacgagcgcaucgacaagguccucaacgagaagugcuccgccuacaccguggagcugggcaccgaggugaacgaguucgcgugcgucguggccgacgccgugaucaagacgcugcagccggucagcgagcuccugaccccccuggggaucgaccucgacgagugguccauggccaccuacuaccuguucgacgagagcggcgaguucaagcuggccucccacauguacugcagcuucuacccccccgacgaggacgaggaggagggggacugcgaggaggaggaguucgagccguccacccaguacgaguacggcacggaggacgacuaccagggcaagccccucgaguucggggcgaccagcgccgcccugcagcccgaggaggagcaggaggaggacuggcuggacgacgacucccagcagaccgugggccagcaggacgggagcgaggacaaccagaccacgaccauccagaccaucguggagguccagccccagcucgagauggagcugaccccgguggugcagacgaucgaggucaacuccuucagcggcuaccugaagcucaccgacaacguguacaucaagaacgccgacaucguggaggaggcgaagaaggucaagcccaccgugguggucaacgccgccaacguguaccugaagcacgggggcggcguggccggggcccugaacaaggcgaccaacaacgccaugcaggucgaguccgacgacuacaucgccacgaacggcccccucaagguggggggcagcugcguccuguccggccacaaccuggccaagcacugccuccacgugguggggcccaacgucaacaagggcgaggacauccagcugcugaagagcgccuacgagaacuucaaccagcacgaggugcuccuggcgccgcugcucuccgccgggaucuucggcgccgaccccauccacagccugcgggugugcgucgacaccgugcgcaccaacguguaccuggccgucuucgacaagaaccucuacgacaagcugguguccagcuuccuggagaugaagagcgagaagcagguggagcagaagaucgccgagauccccaaggaggaggucaagcccuucaucaccgaguccaagccgagcguggagcagcggaagcaggacgacaagaagaucaaggcgugcguggaggaggucacgaccacccucgaggagaccaaguuccugacggagaaccugcuccuguacaucgacaucaacgggaaccugcaccccgacuccgccacccucgugagcgacaucgacaucaccuuccugaagaaggacgcccccuacaucgugggcgacgucgugcaggagggcgugcugaccgccgucgugauccccacgaagaaggccgggggcaccaccgagaugcucgcgaaggcccugcgcaaggugccgaccgacaacuacaucacgaccuaccccgggcagggccugaacggguacaccgucgaggaggccaagaccgugcucaagaagugcaaguccgccuucuacauccugcccagcaucaucuccaacgagaagcaggagauccugggcaccgugagcuggaaccuccgggagaugcuggcgcacgccgaggagacgcgcaagcugaugcccgucugcguggagaccaaggccaucguguccaccauccagcggaaguacaagggcaucaagauccaggagggggucguggacuacggcgcccgcuucuacuucuacaccagcaagacgaccguggccucccugaucaacacccucaacgaccugaacgagacccuggucacgaugccgcucggguacgugacccacggccugaaccuggaggaggcggcccgguacaugcgcagccucaaggugcccgccaccgucuccgugagcucccccgacgccgugaccgccuacaacggguaccugacgagcuccagcaagacccccgaggagcacuucaucgagaccaucucccuggcgggcagcuacaaggacuggagcuacuccggccagagcacccagcucgggaucgaguuccugaagcggggcgacaaguccgucuacuacacgagcaacccgaccaccuuccaccuggacggggaggugaucaccuucgacaaccucaagacgcugcugucccuccgcgaggugcggaccaucaaggucuucaccaccguggacaacaucaaccugcacacgcagguggucgacaugagcaugaccuacggccagcaguucggccccaccuaccuggacggggccgacgugaccaagaucaagccccacaacucccacgagggcaagacguucuacgugcucccgaacgacgacacccugcgcgucgaggccuucgaguacuaccacaccaccgaccccagcuuccuggggcgguacauguccgcccucaaccacacgaagaaguggaaguacccccaggugaacggccugaccagcaucaagugggccgacaacaacugcuaccuggcgaccgcccuccugacccugcagcagaucgagcucaaguucaaccccccggcccugcaggacgccuacuaccgcgcgcgggccggggaggccgccaacuucugcgcccugauccucgcguacugcaacaagacggugggcgagcugggcgacguccgcgagaccauguccuaccuguuccagcacgccaaccucgacagcugcaagcgggugcugaacgucgugugcaagaccugcgggcagcagcagaccacccugaagggcguggaggccgucauguacauggggacgcucuccuacgagcaguucaagaagggcgugcagauccccugcaccugcgggaagcaggccaccaaguaccuggugcagcaggagagccccuucgucaugauguccgcccccccggcgcaguacgagcugaagcacggcaccuucacgugcgccagcgaguacaccggcaacuaccagugcgggcacuacaagcacaucaccuccaaggagacccucuacugcaucgacggcgcccugcugacgaagagcagcgaguacaaggggcccaucaccgacguguucuacaaggagaacuccuacaccaccacgaucaagcccgugaccuacaagcucgacggcgucgugugcaccgagaucgaccccaagcuggacaacuacuacaagaaggacaacagcuacuucaccgagcagccgaucgaccuggugcccaaccagcccuaccccaacgccuccuucgacaacuucaaguucgucugcgacaacaucaaguucgccgacgaccucaaccagcugacgggguacaagaagccggcgagccgcgagcugaaggugaccuucuuccccgaccucaacggcgacguggucgccaucgacuacaagcacuacacccccuccuucaagaagggcgccaagcugcugcacaagcccaucguguggcacgugaacaacgccaccaacaaggcgacguacaagccgaacaccuggugcauccggugccucuggagcaccaagcccgucgagaccuccaacagcuucgacgugcugaaguccgaggacgcccaggggauggacaaccuggccugcgaggaccucaagcccgugagcgaggaggucguggagaaccccacgauccagaaggacgugcuggagugcaacgucaagaccaccgagguggugggcgacaucauccugaagccggccaacaacucccucaagaucaccgaggaggucgggcacacggaccugauggccgcguacguggacaacagcucccugaccaucaagaagcccaacgagcucagccgcgugcugggccugaagacccucgccacccacgggcuggccgccgucaacuccgugcccugggacacgaucgccaacuacgcgaagccguuccugaacaagguggucagcaccaccaccaacaucgugacgcgcugccucaaccgggugugcaccaacuacaugcccuacuucuucacccugcugcuccagcugugcaccuucacccgcuccacgaacagccggaucaaggccuccaugcccaccaccaucgccaagaacaccgucaagagcgugggcaaguucugccuggaggccagcuucaacuaccucaagucccccaacuucagcaagcugaucaacaucaucaucugguuccugcuccuguccgugugccugggcagccucaucuacuccacggccgcgcuggggguccugaugagcaaccucggcaugccguccuacugcaccggguaccgcgagggcuaccugaacagcaccaacgugaccaucgccacguacugcaccggcuccauccccugcagcgugugccuguccgggcucgacagccuggacaccuaccccucccuggagaccauccagaucacgaucagcucccucaagugggaccugaccgccuucggccuggucgccgagugguuccucgccuacauccuguucacccgguucuucuacgugcuggggcucgcggccaucaugcagcuguucuucagcuacuucgccgugcacuucaucuccaacagcuggcugauguggcugaucaucaaccucguccagauggcccccaucuccgcgauggugcgcauguacaucuucuucgccagcuucuacuacguguggaagagcuacguccacgugguggacggcugcaacuccagcaccugcaugaugugcuacaagcggaaccgcgccacgcgggucgagugcaccaccaucgugaacgggguccgccgguccuucuacguguacgccaacggcggcaagggguucugcaagcugcacaacuggaacugcgugaacugcgacaccuucugcgccggcagcacguucaucuccgacgaggucgcgcgcgaccugagccuccaguucaagcggccgaucaaccccaccgaccaguccagcuacaucguggacuccgugaccgucaagaacgggagcauccaccuguacuucgacaaggccggccagaagaccuacgagcgccacucccugagccacuucgugaaccucgacaaccugcgggccaacaacacgaaggggucccugcccaucaacgugaucgucuucgacggcaagagcaagugcgaggaguccagcgccaaguccgccagcguguacuacucccagcucaugugccagcccauccugcugcucgaccaggcgcuggugagcgacgucggcgacagcgccgagguggccgugaagauguucgacgccuacgucaacaccuucuccagcaccuucaacgugccgauggagaagcugaagacccucguggccacggcggaggccgagcuggccaagaacgucucccuggacaacgugcucagcaccuucaucuccgccgcgcgccagggguucguggacagcgacgucgagaccaaggacgugguggagugccugaagcugucccaccagagcgacaucgaggucaccggcgacuccugcaacaacuacaugcucacguacaacaagguggagaacaugaccccccgggaccugggggccugcaucgacugcagcgcccgccacaucaacgcccagguggccaagucccacaacaucgcgcugaucuggaacgucaaggacuucaugagccucuccgagcagcugcggaagcagauccgcagcgccgccaagaagaacaaccugcccuucaagcucaccugcgccaccacgcgccagguggugaacgucgugaccaccaagaucgcccugaagggcgggugaggacuagucccuguucccagagcccacuuuuuuuucuuuuuuugaaauaaaauagccugucuuucagaucucaaaggcucuuuucagagccaccaaaaaaaaaaaaaaaaaaaaaaaaaaaaaaaaaaaaaaaaaaaaaaaaaaaaaaaaaaaaaaaaaaaaaaaaaaaaaaaaaaaaaaaaaaaaaaaaaaaaa

SEQ ID NO: 19604 - RNA, 6113 nt, Artificial Sequence
  SARS-CoV-2__MT856456.1__non-structural protein 3 (NSP3) mRNA gc
aggagagucccgcagucggcguccagcggcucugcuuguucgugugugugucguugcaggccuuauucaagcuuaccauggcccccaccaaggugaccuucggcgacgacacggucaucgaggugcagggguacaagagcgugaacaucaccuucgagcuggacgagcgcaucgacaagguccucaacgagaagugcuccgccuacaccguggagcugggcaccgagguggacgaguucgcgugcgucguggccgacgccgugaucaagacgcugcagccggucagcgagcuccugaccccccuggggaucgaccucgacgagugguccauggccaccuacuaccuguucgacgagagcggcgaguucaagcuggccucccacauguacugcagcuucuacccccccgacgaggacgaggaggagggggacugcgaggaggaggaguucgagccguccacccaguacgaguacggcacggaggacgacuaccagggcaagccccucgaguucggggcgaccagcgccgcccugcagcccgaggaggagcaggaggaggacuggcuggacgacgacucccagcagaccgugggccagcaggacgggagcgaggacaaccagaccacgaccauccagaccaucguggagguccagccccagcucgagauggagcugaccccgguggugcagacgaucgaggucaacuccuucagcggcuaccugaagcucaccgacaacguguacaucaagaacgccgacaucguggaggaggcgaagaaggucaagcccaccgugguggucaacgccgccaacguguaccugaagcacgggggcggcguggccggggcccugaacaaggcgaccaacaacgccaugcaggucgaguccgacgacuacaucgccacgaacggcccccucaagguggggggcagcugcguccuguccggccacaaccuggccaagcacugccuccacgugguggggcccaacgucaacaagggcgaggacauccagcugcugaagagcgccuacgagaacuucaaccagcacgaggugcuccuggcgccgcugcucuccgccgggaucuucggcgccgaccccauccacagccugcgggugugcgucgacaccgugcgcaccaacguguaccuggccgucuucgacaagaaccucuacgacaagcugguguccagcuuccuggagaugaagagcgagaagcagguggagcagaagaucgccgagauccccaaggaggaggucaagcccuucaucaccgaguccaagccgagcguggagcagcggaagcaggacgacaagaagaucaaggcgugcguggaggaggucacgaccacccucgaggagaccaaguuccugacggagaaccugcuccuguacaucgacaucaacgggaaccugcaccccgacuccgccacccucgugagcgacaucgacaucaccuuccugaagaaggacgcccccuacaucgugggcgacgucgugcaggagggcgugcugaccgccgucgugauccccacgaagaaggccgggggcaccaccgagaugcucgcgaaggcccugcgcaaggugccgaccgacaacuacaucacgaccuaccccgggcagggccugaacggguacaccgucgaggaggccaagaccgugcucaagaagugcaaguccgccuucuacauccugcccagcaucaucuccaacgagaagcaggagauccugggcaccgugagcuggaaccuccgggagaugcuggcgcacgccgaggagacgcgcaagcugaugcccgucugcguggagaccaaggccaucguguccaccauccagcggaaguacaagggcaucaagauccaggagggggucguggacuacggcgcccgcuucuacuucuacaccagcaagacgaccguggccucccugaucaacacccucaacgaccugaacgagacccuggucacgaugccgcucggguacgugacccacggccugaaccuggaggaggcggcccgguacaugcgcagccucaaggugcccgccaccgucuccgugagcucccccgacgccgugaccgccuacaacggguaccugacgagcuccagcaagacccccgaggagcacuucaucgagaccauccugcucgcgggcuccuacaaggacuggagcuacagcggccaguccacccagcuggggaucgaguuccugaagcggggcgacaagagcgucuacuacacguccaacccgaccaccuuccaccucgacggggaggugaucaccuucgacaaccugaagacgcugcucagccugcgcgaggugcggaccaucaaggucuucaccaccguggacaacaucaaccugcacacgcagguggucgacauguccaugaccuacggccagcaguucggccccaccuaccucgacggggccgacgugaccaagaucaagccccacaacagccacgagggcaagacguucuacgugcugccgaacgacgacacccugcgcgucgaggccuucgaguacuaccacaccaccgaccccuccuuccucgggcgguacaugagcgcccugaaccacacgaagaaguggaaguacccccaggugaacggccugaccuccaucaagugggccgacaacaacugcuaccucgcgaccgcccugcugacccuccagcagaucgagcugaaguucaaccccccggcccugcaggacgccuacuaccgcgcgcgggccggggaggccgccaacuucugcgcccucauccuggcguacugcaacaagacggugggcgagcugggcgacguccgcgagaccaugagcuaccucuuccagcacgccaaccuggacuccugcaagcgggugcugaacgucgugugcaagaccugcgggcagcagcagaccacccucaagggcguggaggccgucauguacauggggacgcugagcuacgagcaguucaagaagggcgugcagauccccugcaccugcgggaagcaggccaccaaguaccuggugcagcaggagucccccuucgucaugaugagcgcccccccggcgcaguacgagcucaagcacggcaccuucacgugcgccuccgaguacaccggcaacuaccagugcgggcacuacaagcacaucaccagcaaggagacccuguacugcaucgacggcgcccugcucacgaaguccagcgaguacaaggggcccaucaccgacguguucuacaaggagaacagcuacaccaccacgaucaagcccgugaccuacaagcuggacggcgucgugugcaccgagaucgaccccaagcuggacaacuacuacaagaaggacaacuccuacuucaccgagcagccgaucgaccucgugcccaaccagcccuaccccaacgccagcuucgacaacuucaaguucgucugcgacaacaucaaguucgccgacgaccugaaccagcugacgggguacaagaagccggcgucccgcgagcucaaggugaccuucuuccccgaccugaacggcgacguggucgccaucgacuacaagcacuacacccccagcuucaagaagggcgccaagcugcuccacaagcccaucguguggcacgugaacaacgccaccaacaaggcgacguacaagccgaacaccuggugcauccggugccugugguccaccaagcccgucgagaccagcaacuccuucgacgugcugaagagcgaggacgcccaggggauggacaaccucgccugcgaggaccugaagcccguguccgaggaggucguggagaaccccacgauccagaaggacgugcuggagugcaacgucaagaccaccgagguggugggcgacaucauccucaagccggccaacaacagccugaagaucaccgaggaggucgggcacacggaccugauggccgcguacguggacaacuccagccucaccaucaagaagcccaacgagcugucccgcgugcugggccucaagacccuggccacccacgggcuggccgccgucaacagcgugcccugggacacgaucgccaacuacgcgaagccguuccucaacaagguggucuccaccaccaccaacaucgugacgcgcugccugaaccgggugugcaccaacuacaugcccuacuucuucacccugcuccugcagcugugcaccuucacccgcagcacgaacucccggaucaaggccagcaugcccaccaccaucgccaagaacaccgucaaguccgugggcaaguucugccucgaggccagcuucaacuaccugaagagccccaacuucuccaagcugaucaacaucaucaucugguuccuccugcugagcgugugccucggcucccugaucuacagcacggccgcgcuggggguccucauguccaaccugggcaugccgagcuacugcaccggguaccgcgagggcuaccugaacuccaccaacgugaccaucgccacguacugcaccggcagcauccccugcuccgugugccucagcgggcuggacucccuggacaccuaccccagccucgagaccauccagaucacgaucuccagcuucaagugggaccugaccgccuucggccuggucgccgagugguuccucgccuacauccuguucacccgguucuucuacgugcuggggcucgcggccaucaugcagcuguucuucuccuacuucgccgugcacuucaucagcaacuccuggcugauguggcugaucaucaaccucguccagauggcccccaucagcgcgauggugcgcauguacaucuucuucgccuccuucuacuacguguggaagagcuacguccacgugguggacggcugcaacagcuccaccugcaugaugugcuacaagcggaaccgcgccacgcgggucgagugcaccaccaucgugaacgggguccgccggagcuucuacguguacgccaacggcggcaagggguucugcaagcugcacaacuggaacugcgugaacugcgacaccuucugcgccggcuccacguucaucagcgacgaggucgcgcgcgaccugucccuccaguucaagcggccgaucaaccccaccgaccagagcuccuacaucguggacagcgugaccgucaagaacggguccauccaccuguacuucgacaaggccggccagaagaccuacgagcgccacagccugucccacuucgugaaccucgacaaccugcgggccaacaacacgaaggggagccugcccaucaacgugaucgucuucgacggcaaguccaagugcgaggagagcuccgccaagagcgccuccguguacuacagccagcucaugugccagcccauccugcugcucgaccaggcgcugguguccgacgucggcgacagcgccgagguggccgugaagauguucgacgccuacgucaacaccuucagcuccaccuucaacgugccgauggagaagcugaagacccucguggccacggcggaggccgagcuggccaagaacgucagccuggacaacgugcucuccaccuucaucagcgccgcgcgccagggguucguggacuccgacgucgagaccaaggacgugguggagugccugaagcugagccaccaguccgacaucgaggucaccggcgacagcugcaacaacuacaugcucacguacaacaagguggagaacaugaccccccgggaccugggggccugcaucgacugcuccgcccgccacaucaacgcccagguggccaagagccacaacaucgcgcugaucuggaacgucaaggacuucaugucccucagcgagcagcugcggaagcagauccgcuccgccgccaagaagaacaaccugcccuucaagcucaccugcgccaccacgcgccagguggugaacgucgugaccaccaagaucgcccugaagggcgggugaggacuagucccuguucccagagcccacuuuuuuuucuuuuuuugaaauaaaauagccugucuuucagaucucaaaggcucuuuucagagccaccaaaaaaaaaaaaaaaaaaaaaaaaaaaaaaaaaaaaaaaaaaaaaaaaaaaaaaaaaaaaaaaaaaaaaaaaaaaaaaaaaaaaaaaaaaaaaaaaaaaaa

SEQ ID NO: 19605 - RNA, 6113 nt, Artificial Sequence
  SARS-CoV-2__MT856680.1__non-structural protein 3 (NSP3) mRNA gc
aggagagucccgcagucggcguccagcggcucugcuuguucgugugugugucguugcaggccuuauucaagcuuaccauggcccccaccaaggugaccuucggcgacgacacggucaucgaggugcagggguacaagagcgugaacaucaccuucgagcuggacgagcgcaucgacaagguccucaacgagaagugcuccgccuacaccguggagcugggcaccgaggugaacgaguucgcgugcgucguggccgacgccgugaucaagacgcugcagccggucagcgagcuccugaccccccuggggaucgaccucgacgagugguccauggccaccuacuaccuguucgacgagagcggcgaguucaagcuggccucccacauguacugcagcuucuacccccccgacgaggacgaggaggagggggacugcgaggaggaggaguucgagccguccacccaguacgaguacggcacggaggacgacuaccagggcaagccccucgaguucggggcgaccagcgccgcccugcagcccgaggaggagcaggaggaggacuggcuggacgacgacucccagcagaccgugggccagcaggacgggagcgaggacaaccagaccacgaccauccagaccaucguggagguccagccccagcucgagauggagcugaccccgguggugcagacgaucgaggucaacuccuucagcggcuaccugaagcucaccgacaacguguacaucaagaacgccgacaucguggaggaggcgaagaaggucaagcccaccgugguggucaacgccgccaacguguaccugaagcacgggggcggcguggccggggcccugaacaaggcgaccaacaacgccaugcaggucgaguccgacgacuacaucgccacgaacggcccccucaagguggggggcagcugcguccuguccggccacaaccuggccaagcacugccuccacgugguggggcccaacgucaacaagggcgaggacauccagcugcugaagagcgccuacgagaacuucaaccagcacgaggugcuccuggcgccgcugcucuccgccgggaucuucggcgccgaccccauccacagccugcgggugugcgucgacaccgugcgcaccaacguguaccuggccgucuucgacaagaaccucuacgacaagcugguguccagcuuccuggagaugaagagcgagaagcagguggagcagaagaucgccgagauccccaaggaggaggucaagcccuucaucaccgaguccaagccgagcguggagcagcggaagcaggacgacaagaagaucaaggcgugcguggaggaggucacgaccacccucgaggagaccaaguuccugacggagaaccugcuccuguacaucgacaucaacgggaaccugcaccccgacuccgccacccucgugagcgacaucgacaucaccuuccugaagaaggacgcccccuacaucgugggcgacgucgugcaggagggcgugcugaccgccgucgugauccccacgaagaaggccgggggcaccaccgagaugcucgcgaaggcccugcgcaaggugccgaccgacaacuacaucacgaccuaccccgggcagggccugaacggguacaccgucgaggaggccaagaccgugcucaagaagugcaaguccgccuucuacauccugcccagcaucaucuccaacgagaagcaggagauccugggcaccgugagcuggaaccuccgggagaugcuggcgcacgccgaggagacgcgcaagcugaugcccgucugcguggagaccaaggccaucguguccaccauccagcggaaguacaagggcaucaagauccaggagggggucguggacuacggcgcccgcuucuacuucuacaccagcaagacgaccguggccucccugaucaacacccucaacgaccugaacgagacccuggucacgaugccgcucggguacgugacccacggccugaaccuggaggaggcggcccgguacaugcgcagccucaaggugcccgccaccgucuccgugagcucccccgacgccgugaccgccuacaacggguaccugacgagcuccagcaagacccccgaggagcacuucaucgagaccaucucccuggcgggcagcuacaaggacuggagcuacuccggccagagcacccagcucgggaucgaguuccugaagcggggcgacaaguccgucuacuacacgagcaacccgaccaccuuccaccuggacggggaggugaucaccuucgacaaccucaagacgcugcugucccuccgcgaggugcggaccaucaaggucuucaccaccguggacaacaucaaccugcacacgcagguggucgacaugagcaugaccuacggccagcaguucggccccaccuaccuggacggggccgacgugaccaagaucaagccccacaacucccacgagggcaagacguucuacgugcucccgaacgacgacacccugcgcgucgaggccuucgaguacuaccacaccaccgaccccagcuuccuggggcgguacauguccgcccucaaccacacgaagaaguggaaguacccccaggugaacggccugaccagcaucaagugggccgacaacaacugcuaccuggcgaccgcccuccugacccugcagcagaucgagcucaaguucaaccccccggcccugcaggacgccuacuaccgcgcgcgggccggggaggccgccaacuucugcgcccugauccucgcguacugcaacaagacggugggcgagcugggcgacguccgcgagaccauguccuaccuguuccagcacgccaaccucgacagcugcaagcgggugcugaacgucgugugcaagaccugcgggcagcagcagaccacccugaagggcguggaggccgucauguacauggggacgcucuccuacgagcaguucaagaagggcgugcagauccccugcaccugcgggaagcaggccaccaaguaccuggugcagcaggagagccccuucgucaugauguccgcccccccggcgcaguacgagcugaagcacggcaccuucacgugcgccagcgaguacaccggcaacuaccagugcgggcacuacaagcacaucaccuccaaggagacccucuacugcaucgacggcgcccugcugacgaagagcagcgaguacaaggggcccaucaccgacguguucuacaaggagaacuccuacaccaccacgaucaagcccgugaccuacaagcucgacggcgucgugugcaccgagaucgaccccaagcuggacaacuacuacaagaaggacaacagcuacuucaccgagcagccgaucgaccuggugcccaaccagcccuaccccaacgccuccuucgacaacuucaaguucgucugcgacaacaucaaguucgccgacgaccucaaccagcugacgggguacaagaagccggcgagccgcgagcugaaggugaccuucuuccccgaccucaacggcgacguggucgccaucgacuacaagcacuacacccccuccuucaagaagggcgccaagcugcugcacaagcccaucguguggcacgugaacaacgccaccaacaaggcgacguacaagccgaacaccuggugcauccggugccucuggagcaccaagcccgucgagaccuccaacagcuucgacgugcugaaguccgaggacgcccaggggauggacaaccuggccugcgaggaccucaagcccgugagcgaggaggucguggagaaccccacgauccagaaggacgugcuggagugcaacgucaagaccaccgagguggugggcgacaucauccugaagccggccaacaacucccucaagaucaccgaggaggucgggcacacggaccugauggccgcguacguggacaacagcucccugaccaucaagaagcccaacgagcucagccgcgugcugggccugaagacccucgccacccacgggcuggccgccgucaacuccgugcccugggacacgaucgccaacuacgcgaagccguuccugaacaagguggucagcaccaccaccaacaucgugacgcgcugccucaaccgggugugcaccaacuacaugcccuacuucuucacccugcugcuccagcugugcaccuucacccgcuccacgaacagccggaucaaggccuccaugcccaccaccaucgccaagaacaccgucaagagcgugggcaaguucugccuggaggccagcuucaacuaccucaagucccccaacuucagcaagcugaucaacaucaucaucugguuccugcuccuguccgugugccugggcagccucaucuacuccacggccgcgcuggggguccugaugagcaaccucggcaugccguccuacugcaccggguaccgcgagggcuaccugaacagcaccaacgugaccaucgccacguacugcaccggcuccauccccugcagcgugugccuguccgggcucgacagccuggacaccuaccccucccuggagaccauccagaucacgaucagcuccuucaagugggaccucaccgccuucggccuggucgccgagugguuccuggccuacauccucuucacccgguucuucuacgugcuggggcuggcggccaucaugcagcucuucuucagcuacuucgccgugcacuucaucuccaacagcuggcugauguggcugaucaucaaccugguccagauggcccccaucuccgcgauggugcgcauguacaucuucuucgccagcuucuacuacguguggaagagcuacguccacgugguggacggcugcaacuccagcaccugcaugaugugcuacaagcggaaccgcgccacgcgggucgagugcaccaccaucgugaacgggguccgccgguccuucuacguguacgccaacggcggcaagggguucugcaagcuccacaacuggaacugcgugaacugcgacaccuucugcgccggcagcacguucaucuccgacgaggucgcgcgcgaccugagccugcaguucaagcggccgaucaaccccaccgaccaguccagcuacaucguggacuccgugaccgucaagaacgggagcauccaccucuacuucgacaaggccggccagaagaccuacgagcgccacucccugagccacuucgugaaccuggacaaccuccgggccaacaacacgaaggggucccugcccaucaacgugaucgucuucgacggcaagagcaagugcgaggaguccagcgccaaguccgccagcguguacuacucccagcugaugugccagcccauccuccugcuggaccaggcgcucgugagcgacgucggcgacagcgccgagguggccgugaagauguucgacgccuacgucaacaccuucuccagcaccuucaacgugccgaucgagaagcugaagacccugguggccacggcggaggccgagcucgccaagaacgucucccuggacaacgugcugagcaccuucaucuccgccgcgcgccagggguucguggacagcgacgucgagaccaaggacgugguggagugccucaagcugucccaccagagcgacaucgaggucaccggcgacuccugcaacaacuacaugcugacguacaacaagguggagaacaugaccccccgggaccucggggccugcaucgacugcagcgcccgccacaucaacgcccagguggccaagucccacaacaucgcgcugaucuggaacgucaaggacuucaugagccuguccgagcagcuccggaagcagauccgcagcgccgccaagaagaacaaccugcccuucaagcugaccugcgccaccacgcgccagguggugaacgucgugaccaccaagaucgcccucaagggcgggugaggacuagucccuguucccagagcccacuuuuuuuucuuuuuuugaaauaaaauagccugucuuucagaucucaaaggcucuuuucagagccaccaaaaaaaaaaaaaaaaaaaaaaaaaaaaaaaaaaaaaaaaaaaaaaaaaaaaaaaaaaaaaaaaaaaaaaaaaaaaaaaaaaaaaaaaaaaaaaaaaaaaa

SEQ ID NO: 19606 - RNA, 6113 nt, Artificial Sequence
  SARS-CoV-2__MT856685.1__non-structural protein 3 (NSP3) mRNA gc
aggagagucccgcagucggcguccagcggcucugcuuguucgugugugugucguugcaggccuuauucaagcuuaccauggcccccaccaaggugaccuucggcgacgacacggucaucgaggugcagggguacaagagcgugaacaucaccuucgagcuggacgagcgcaucgacaagguccucaacgagaagugcuccgccuacaccguggagcugggcaccgaggugaacgaguucgcgugcgucguggccgacgccgugaucaagacgcugcagccggucagcgagcuccugaccccccuggggaucgaccucgacgagugguccauggccaccuacuaccuguucgacgagagcggcgaguucaagcuggccucccacauguacugcagcuucuacccccccgacgaggacgaggaggagggggacugcgaggaggaggaguucgagccguccacccaguacgaguacggcacggaggacgacuaccagggcaagccccucgaguucggggcgaccagcgccgcccugcagcccgaggaggagcaggaggaggacuggcuggacgacgacucccagcagaccgugggccagcaggacgggagcgaggacaaccagaccacgaccauccagaccaucguggagguccagccccagcucgagauggagcugaccccgguggugcagacgaucgaggucaacuccuucagcggcuaccugaagcucaccgacaacguguacaucaagaacgccgacaucguggaggaggcgaagaaggucaagcccaccgugguggucaacgccgccaacguguaccugaagcacgggggcggcguggccggggcccugaacaaggcgaccaacaacgccaugcaggucgaguccgacgacuacaucgccacgaacggcccccucaagguggggggcagcugcguccuguccggccacaaccuggccaagcacugccuccacgugguggggcccaacgucaacaagggcgaggacauccagcugcugaagagcgccuacgagaacuucaaccagcacgaggugcuccuggcgccgcugcucuccgccgggaucuucggcgccgaccccauccacagccugcgggugugcgucgacaccgugcgcaccaacguguaccuggccgucuucgacaagaaccucuacgacaagcugguguccagcuuccuggagaugaagagcgagaagcagguggagcagaagaucgccgagauccccaaggaggaggucaagcccuucaucaccgaguccaagccgagcguggagcagcggaagcaggacgacaagaagaucaaggcgugcguggaggaggucacgaccacccucgaggagaccaaguuccugacggagaaccugcuccuguacaucgacaucaacgggaaccugcaccccgacuccgccacccucgugagcgacaucgacaucaccuuccugaagaaggacgcccccuacaucgugggcgacgucgugcaggagggcgugcugaccgccgucgugauccccacgaagaaggccgggggcaccaccgagaugcucgcgaaggcccugcgcaaggugccgaccgacaacuacaucacgaccuaccccgggcagggccugaacggguacaccgucgaggaggccaagaccgugcucaagaagugcaaguccgccuucuacauccugcccagcaucaucuccaacgagaagcaggagauccugggcaccgugagcuggaaccuccgggagaugcuggcgcacgccgaggagacgcgcaagcugaugcccgucugcguggagaccaaggccaucguguccaccauccagcggaaguacaagggcaucaagauccaggagggggucguggacuacggcgcccgcuucuacuucuacaccagcaagacgaccguggccucccugaucaacacccucaacgaccugaacgagacccuggucacgaugccgcucggguacgugacccacggccugaaccuggaggaggcggcccgguacaugcgcagccucaaggugcccgccaccgucuccgugagcucccccgacgccgugaccgccuacaacggguaccugacgagcuccagcaagacccccgaggagcacuucaucgagaccaucucccuggcgggcagcuacaaggacuggagcuacuccggccagagcacccagcucgggaucgaguuccugaagcggggcgacaaguccgucuacuacacgagcaacccgaccaccuuccaccuggacggggaggugaucaccuucgacaaccucaagacgcugcugucccuccgcgaggugcggaccaucaaggucuucaccaccguggacaacaucaaccugcacacgcagguggucgacaugagcaugaccuacggccagcaguucggccccaccuaccuggacggggccgacgugaccaagaucaagccccacaacucccacgagggcaagacguucuacgugcucccgaacgacgacacccugcgcgucgaggccuucgaguacuaccacaccaccgaccccagcuuccuggggcgguacauguccgcccucaaccacacgaagaaguggaaguacccccaggugaacggccugaccagcaucaagugggccgacaacaacugcuaccuggcgaccgcccuccugacccugcagcagaucgagcucaaguucaaccccccggcccugcaggacgccuacuaccgcgcgcgggccggggaggccgccaacuucugcgcccugauccucgcguacugcaacaagacggugggcgagcugggcgacguccgcgagaccauguccuaccuguuccagcacgccaaccucgacagcugcaagcgggugcugaacgucgugugcaagaccugcgggcagcagcagaccacccugaagggcguggaggccgucauguacauggggacgcucuccuacgagcaguucaagaagggcgugcagauccccugcaccugcgggaagcaggccaccaaguaccuggugcagcaggagagccccuucgucaugauguccgcccccccggcgcaguacgagcugaagcacggcaccuucacgugcgccagcgaguacaccggcaacuaccagugcgggcacuacaagcacaucaccuccaaggagacccucuacugcaucgacggcgcccugcugacgaagagcagcgaguacaaggggcccaucaccgacguguucuacaaggagaacuccuacaccaccacgaucaagcccgugaccuacaagcucgacggcgucgugugcaccgagaucgaccccaagcuggacaacuacuacaagaaggacaacagcuacuucaccgagcagccgaucgaccuggugcccaaccagcccuaccccaacgccuccuucgacaacuucaaguucgucugcgacaacaucaaguucgccgacgaccucaaccagcugacgggguacaagaagccggcgagccgcgagcugaaggugaccuucuuccccgaccucaacggcgacguggucgccaucgacuacaagcacuacacccccuccuucaagaagggcgccaagcugcugcacaagcccaucguguggcacgugaacaacgccaccaacaaggcgacguacaagccgaacaccuggugcauccggugccucuggagcaccaagcccgucgagaccuccaacagcuucgacgugcugaaguccgaggacgcccaggggauggacaaccuggccugcgaggaccucaagcccgugagcgaggaggucguggagaaccccacgauccagaaggacgugcuggagugcaacgucaagaccaccgagguggugggcgacaucauccugaagccggccaacaacucccucaagaucaccgaggaggucgggcacacggaccugauggccgcguacguggacaacagcucccugaccaucaagaagcccaacgagcucagccgcgugcugggccugaagacccucgccacccacgggcuggccgccgucaacuccgugcccugggacacgaucgccaacuacgcgaagcuguuccucaacaagguggucagcaccaccaccaacaucgugacgcgcugccugaaccgggugugcaccaacuacaugccguacuucuucacccugcuccugcagcugugcaccuucacccgcuccacgaacagccggaucaaggccuccaugcccaccaccaucgccaagaacaccgucaagagcgugggcaaguucugccucgaggccagcuucaacuaccugaagucccccaacuucagcaagcugaucaacaucaucaucugguuccuccugcuguccgugugccucggcagccugaucuacuccacggccgcgcuggggguccucaugagcaaccugggcaugcccuccuacugcaccggguaccgcgagggcuaccugaacagcaccaacgugaccaucgccacguacugcaccggcuccaucccgugcagcgugugccucuccgggcuggacagccuggacaccuaccccucccucgagaccauccagaucacgaucagcuccuucaagugggaccugaccgccuucggccuggucgccgagugguuccucgccuacauccuguucacccgguucuucuacgugcuggggcucgcggccaucaugcagcuguucuucagcuacuucgccgugcacuucaucuccaacagcuggcugauguggcugaucaucaaccucguccagauggcccccaucuccgcgauggugcgcauguacaucuucuucgccagcuucuacuacguguggaagagcuacguccacgugguggacggcugcaacuccagcaccugcaugaugugcuacaagcggaaccgcgccacgcgggucgagugcaccaccaucgugaacgggguccgccgguccuucuacguguacgccaacggcggcaagggguucugcaagcugcacaacuggaacugcgugaacugcgacaccuucugcgccggcagcacguucaucuccgacgaggucgcgcgcgaccugagccuccaguucaagcggcccaucaacccgaccgaccaguccagcuacaucguggacuccgugaccgucaagaacgggagcauccaccuguacuucgacaaggccggccagaagaccuacgagcgccacucccugagccacuucgugaaccucgacaaccugcgggccaacaacacgaaggggucccugcccaucaacgugaucgucuucgacggcaagagcaagugcgaggaguccagcgccaaguccgccagcguguacuacucccagcucaugugccagcccauccugcugcucgaccaggcgcuggugagcgacgucggcgacagcgccgagguggccgugaagauguucgacgccuacgucaacaccuucuccagcaccuucaacgugcccauggagaagcugaagacccucguggccacggcggaggccgagcuggccaagaacgucucccuggacaacgugcucagcaccuucaucuccgccgcgcgccagggguucguggacagcgacgucgagaccaaggacgugguggagugccugaagcugucccaccagagcgacaucgaggucaccggcgacuccugcaacaacuacaugcucacguacaacaagguggagaacaugaccccgcgggaccugggggccugcaucgacugcagcgcccgccacaucaacgcccagguggccaagucccacaacaucgcgcugaucuggaacgucaaggacuucaugagccucuccgagcagcugcggaagcagauccgcagcgccgccaagaagaacaaccugcccuucaagcucaccugcgccaccacgcgccagguggugaacgucgugaccaccaagaucgcccugaagggcgggugaggacuagucccuguucccagagcccacuuuuuuuucuuuuuuugaaauaaaauagccugucuuucagaucucaaaggcucuuuucagagccaccaaaaaaaaaaaaaaaaaaaaaaaaaaaaaaaaaaaaaaaaaaaaaaaaaaaaaaaaaaaaaaaaaaaaaaaaaaaaaaaaaaaaaaaaaaaaaaaaaaaaa

SEQ ID NO: 19607 - RNA, 6113 nt, Artificial Sequence
  SARS-CoV-2__MT846005.1__non-structural protein 3 (NSP3) mRNA gc
aggagagucccgcagucggcguccagcggcucugcuuguucgugugugugucguugcaggccuuauucaagcuuaccauggcccccaccaaggugaccuucggcgacgacacggucaucgaggugcagggguacaagagcgugaacaucaccuucgagcuggacgagcgcaucgacaagguccucaacgagaagugcuccgccuacaccguggagcugggcaccgaggugaacgaguucgcgugcgucguggccgacgccgugaucaagacgcugcagccggucagcgagcuccugaccccccuggggaucgaccucgacgagugguccauggccaccuacuaccuguucgacgagagcggcgaguucaagcuggccucccacauguacugcagcuucuacccccucgacgaggacgaggaggagggggacugcgaggaggaggaguucgagcccuccacccaguacgaguacggcacggaggacgacuaccagggcaagccgcuggaguucggggcgaccagcgccgcccugcagcccgaggaggagcaggaggaggacuggcucgacgacgacucccagcagaccgugggccagcaggacgggagcgaggacaaccagaccacgaccauccagaccaucguggagguccagccccagcuggagauggagcugacccccguggugcagacgaucgaggucaacuccuucagcggcuaccucaagcugaccgacaacguguacaucaagaacgccgacaucguggaggaggcgaagaaggucaagccgaccgugguggucaacgccgccaacguguaccugaagcacgggggcggcguggccggggcccucaacaaggcgaccaacaacgccaugcaggucgaguccgacgacuacaucgccacgaacggcccccugaagguggggggcagcugcguccuguccggccacaaccucgccaagcacuuccugcacgugguggggcccaacgucaacaagggcgaggacauccagcugcucaagagcgccuacgagaacuucaaccagcacgaggugcugcuggcgccccuccuguccgccgggaucuucggcgccgacccgauccacagccugcgggugugcgucgacaccgugcgcaccaacguguaccucgccgucuucgacaagaaccuguacgacaagcugguguccagcuuccucgagaugaagagcgagaagcagguggagcagaagaucgccgagauccccaaggaggaggucaagcccuucaucaccgaguccaagcccagcguggagcagcggaagcaggacgacaagaagaucaaggcgugcguggaggaggucacgaccacccuggaggagaccaaguuccugacggagaaccuccugcuguacaucgacaucaacgggaaccuccacccggacuccgccacccuggugagcgacaucgacaucaccuuccugaagaaggacgcccccuacaucgugggcgacgucgugcaggagggcgugcucaccgccgucgugauccccacgaagaaggccgggggcaccaccgagaugcuggcgaaggcccugcgcaaggugcccaccgacaacuacaucacgaccuacccggggcagggccucaacggguacaccgucgaggaggccaagaccgugcugaagaagugcaaguccgccuucuacauccugcccagcaucaucuccaacgagaagcaggagauccucggcaccgugagcuggaaccugcgggagaugcuggcgcacgccgaggagacgcgcaagcugaugcccgucugcguggagaccaaggccaucguguccaccauccagcggaaguacaagggcaucaagauccaggagggggucguggacuacggcgcccgcuucuacuucuacaccagcaagacgaccguggccucccucaucaacacccugaacgaccugaacgagacccucgucacgaugccccugggguacgugacccacggccugaaccucgaggaggcggcccgguacaugcgcagccugaaggugccggccaccgucuccgugagcucccccgacgccgugaccgccuacaacggguaccugacgagcuccagcaagacccccgaggagcacuucaucgagaccaucucccucgcgggcagcuacaaggacuggagcuacuccggccagagcacccagcuggggaucgaguuccugaagcggggcgacaaguccgucuacuacacgagcaaccccaccaccuuccaccucgacggggaggugaucaccuucgacaaccugaagacgcugcucucccugcgcgaggugcggaccaucaaggucuucaccaccguggacaacaucaaccugcacacgcagguggucgacaugagcaugaccuacggccagcaguucggcccgaccuaccucgacggggccgacgugaccaagaucaagccccacaacucccacgagggcaagacguucuacgugcugcccaacgacgacacccugcgcgucgaggccuucgaguacuaccacaccaccgacccgagcuuccucgggcgguacauguccgcccugaaccacacgaagaaguggaaguacccccaggugaacggccugaccagcaucaagugggccgacaacaacugcuaccucgcgaccgcccugcugacccuccagcagaucgagcugaaguucaacccccccgcccugcaggacgccuacuaccgcgcgcgggccggggaggccgccaacuucugcgcccucauccuggcguacugcaacaagacggugggcgagcugggcgacguccgcgagaccauguccuaccucuuccagcacgccaaccuggacagcugcaagcgggugcugaacgucgugugcaagaccugcgggcagcagcagaccacccucaagggcguggaggccgucauguacauggggacgcuguccuacgagcaguucaagaagggcgugcagaucccgugcaccugcgggaagcaggccaccaaguaccuggugcagcaggagagccccuucgucaugauguccgccccccccgcgcaguacgagcucaagcacggcaccuucacgugcgccagcgaguacaccggcaacuaccagugcgggcacuacaagcacaucaccuccaaggagacccuguacugcaucgacggcgcccugcucacgaagagcagcgaguacaaggggccgaucaccgacguguucuacaaggagaacuccuacaccaccacgaucaagcccgugaccuacaagcuggacggcgucgugugcaccgagaucgaccccaagcuggacaacuacuacaagaaggacaacagcuacuucaccgagcagcccaucgaccucgugccgaaccagcccuaccccaacgccuccuucgacaacuucaaguucgucugcgacaacaucaaguucgccgacgaccugaaccagcugacgggguacaagaagcccgcgagccgcgagcucaaggugaccuucuucccggaccugaacggcgacguggucgccaucgacuacaagcacuacacccccuccuucaagaagggcgccaagcugcuccacaagcccaucguguggcacgugaacaacgccaccaacaaggcgacguacaagcccaacaccuggugcauccggugccuguggagcaccaagccggucgagaccuccaacagcuucgacgugcugaaguccgaggacgcccaggggauggacaaccucgccugcgaggaccugaagcccgugagcgaggaggucguggagaaccccacgauccagaaggacgugcuggagugcaacgucaagaccaccgagguggugggcgacaucauccucaagcccgccaacaacucccugaagaucaccgaggaggucgggcacacggaccugauggccgcguacguggacaacagcucccucaccaucaagaagccgaacgagcugagccgcgugcugggccucaagacccuggccacccacgggcuggccgccgucaacuccgugcccugggacacgaucgccaacuacgcgaagcccuuccucaacaagguggucagcaccaccaccaacaucgugacgcgcugccugaaccgggugugcaccaacuacaugccguacuucuucacccugcuccugcagcugugcaccuucacccgcuccacgaacagccggaucaaggccuccaugcccaccaccaucgccaagaacaccgucaagagcgugggcaaguucugccucgaggccagcuucaacuaccugaagucccccaacuucagcaagcugaucaacaucaucaucugguuccuccugcuguccgugugccucggcagccugaucuacuccacggccgcgcuggggguccucaugagcaaccugggcaugcccuccuacugcaccggguaccgcgagggcuaccugaacagcaccaacgugaccaucgccacguacugcaccggcuccaucccgugcagcgugugccucuccgggcuggacagccuggacaccuaccccucccucgagaccauccagaucacgaucagcuccuucaagugggaccugaccgccuucggccuggucgccgagugguuccucgccuacauccuguucacccgguucuucuacgugcuggggcucgcggccaucaugcagcuguucuucagcuacuucgccgugcacuucaucuccaacagcuggcugauguggcugaucaucaaccucguccagauggcccccaucuccgcgauggugcgcauguacaucuucuucgccagcuucuacuacguguggaagagcuacguccacgugguggacggcugcaacuccagcaccugcaugaugugcuacaagcggaaccgcgccacgcgggucgagugcaccaccaucgugaacgggguccgccgguccuucuacguguacgccaacggcggcaagggguucugcaagcugcacaacuggaacugcgugaacugcgacaccuucugcgccggcagcacguucaucuccgacgaggucgcgcgcgaccugagccuccaguucaagcggcccaucaacccgaccgaccaguccagcuacaucguggacuccgugaccgucaagaacgggagcauccaccuguacuucgacaaggccggccagaagaccuacgagcgccacucccugagccacuucgugaaccucgacaaccugcgggccaacaacacgaaggggucccugcccaucaacgugaucgucuucgacggcaagagcaagugcgaggaguccagcgccaaguccgccagcguguacuacucccagcucaugugccagcccauccugcugcucgaccaggcgcuggugagcgacgucggcgacagcgccgagguggccgugaagauguucgacgccuacgucaacaccuucuccagcaccuucaacgugcccauggagaagcugaagacccucguggccacggcggaggccgagcuggccaagaacgucucccuggacaacgugcucagcaccuucaucuccgccgcgcgccagggguucguggacagcgacgucgagaccaaggacgugguggagugccugaagcugucccaccagagcgacaucgaggucaccggcgacuccugcaacaacuacaugcucacguacaacaagguggagaacaugaccccgcgggaccugggggccugcaucgacugcagcgcccgccacaucaacgcccagguggccaagucccacaacaucgcgcugaucuggaacgucaaggacuucaugagccucuccgagcagcugcggaagcagauccgcagcgccgccaagaagaacaaccugcccuucaagcucaccugcgccaccacgcgccagguggugaacgucgugaccaccaagaucgcccugaagggcgggugaggacuagucccuguucccagagcccacuuuuuuuucuuuuuuugaaauaaaauagccugucuuucagaucucaaaggcucuuuucagagccaccaaaaaaaaaaaaaaaaaaaaaaaaaaaaaaaaaaaaaaaaaaaaaaaaaaaaaaaaaaaaaaaaaaaaaaaaaaaaaaaaaaaaaaaaaaaaaaaaaaaaa

SEQ ID NO: 19608 - RNA, 6113 nt, Artificial Sequence
  SARS-CoV-2__MT846006.1__non-structural protein 3 (NSP3) mRNA gc
aggagagucccgcagucggcguccagcggcucugcuuguucgugugugugucguugcaggccuuauucaagcuuaccauggcccccaccaaggugaccuucggcgacgacacggucaucgaggugcagggguacaagagcgugaacaucaccuucgagcuggacgagcgcaucgacaagguccucaacgagaagugcuccgccuacaccguggagcugggcaccgaggugaacgaguucgcgugcgucguggccgacgccgugaucaagacgcugcagccggucagcgagcuccugaccccccuggggaucgaccucgacgagugguccauggccaccuacuaccuguucgacgagagcggcgaguucaagcuggccucccacauguacugcagcuucuacccccccgacgaggacgaggaggagggggacugcgaggaggaggaguucgagccguccacccaguacgaguacggcacggaggacgacuaccagggcaagccccucgaguucggggcgaccagcgccgcccugcagcccgaggaggagcaggaggaggacuggcuggacgacgacucccagcagaccgugggccagcaggacgggagcgaggacaaccagaccacgaccauccagaccaucguggagguccagccccagcucgagauggagcugaccccgguggugcagacgaucgaggucaacuccuucagcggcuaccugaagcucaccgacaacguguacaucaagaacgccgacaucguggaggaggcgaagaaggucaagcccaccgugguggucaacgccgccaacguguaccugaagcacgggggcggcguggccggggcccugaacaaggcgaccaacaacgccaugcaggucgaguccgacgacuacaucgccacgaacggcccccucaagguggggggcagcugcguccuguccggccacaaccuggccaagcacugccuccacgugguggggcccaacgucaacaagggcgaggacauccagcugcugaagagcgccuacgagaacuucaaccagcacgaggugcuccuggcgccgcugcucuccgccgggaucuucggcgccgaccccauccacagccugcgggugugcgucgacaccgugcgcaccaacguguaccuggccgucuucgacaagaaccucuacgacaagcugguguccagcuuccuggagaugaagagcgagaagcagguggagcagaagaucgccgagauccccaaggaggaggucaagcccuucaucaccgaguccaagccgagcguggagcagcggaagcaggacgacaagaagaucaaggcgugcguggaggaggucacgaccacccucgaggagaccaaguuccugacggagaaccugcuccuguacaucgacaucaacgggaaccugcaccccgacuccgccacccucgugagcgacaucgacaucaccuuccugaagaaggacgcccccuacaucgugggcgacgucgugcaggagggcgugcugaccgccgucgugauccccacgaagaaggccgggggcaccaccgagaugcucgcgaaggcccugcgcaaggugccgaccgacaacuacaucacgaccuaccccgggcagggccugaacggguacaccgucgaggaggccaagaccgugcucaagaagugcaaguccgccuucuacauccugcccagcaucaucuccaacgagaagcaggagauccugggcaccgugagcuggaaccuccgggagaugcuggcgcacgccgaggagacgcgcaagcugaugcccgucugcguggagaccaaggccaucguguccaccauccagcggaaguacaagggcaucaagauccaggagggggucguggacuacggcgcccgcuucuacuucuacaccagcaagacgaccguggccucccugaucaacacccucaacgaccugaacgagacccuggucacgaugccgcucggguacgugacccacggccugaaccuggaggaggcggcccgguacaugcgcagccucaaggugcccgccaccgucuccgugagcucccccgacgccgugaccgccuacaacggguaccugacgagcuccagcaagacccccgaggagcacuucaucgagaccaucucccuggcgggcagcuacaaggacuggagcuacuccggccagagcacccagcucgggaucgaguuccugaagcggggcgacaaguccgucuacuacacgagcaacccgaccaccuuccaccuggacggggaggugaucaccuucgacaaccucaagacgcugcugucccuccgcgaggugcggaccaucaaggucuucaccaccguggacaacaucaaccugcacacgcagguggucgacaugagcaugaccuacggccagcaguucggccccaccuaccuggacggggccgacgugaccaagaucaagccccacaacucccacgagggcaagacguucuacgugcucccgaacgacgacacccugcgcgucgaggccuucgaguacuaccacaccaccgaccccagcuuccuggggcgguacauguccgcccucaaccacacgaagaaguggaaguacccccaggugaacggccugaccagcaucaagugggccgacaacaacugcuaccuggcgaccgcccuccugacccugcagcagaucgagcucaaguucaaccccccggcccugcaggacgccuacuaccgcgcgcgggccggggaggccgccaacuucugcgcccugauccucgcguacugcaacaagacggugggcgagcugggcgacguccgcgagaccauguccuaccuguuccagcacgccaaccucgacagcugcaagcgggugcugaacgucgugugcaagaccugcgggcagcagcagaccacccugaagggcguggaggccgucauguacauggggacgcucuccuacgagcaguucaagaagggcgugcagauccccugcaccugcgggaagcaggccaccaaguaccuggugcagcaggagagccccuucgucaugauguccgcccccccggcgcaguacgagcugaagcacggcaccuucacgugcgccagcgaguacaccggcaacuaccagugcgggcacuacaagcacaucaccuccaaggagacccucuacugcaucgacggcgcccugcugacgaagagcagcgaguacaaggggcccaucaccgacguguucuacaaggagaacuccuacaccaccacgaucaagcccgugaccuacaagcucgacggcgucgugugcaccgagaucgaccccaagcuggacaacuacuacaagaaggacaacagcuacuucaccgagcagccgaucgaccuggugcccaaccagcccuaccccaacgccuccuucgacaacuucaaguucgucugcgacaacaucaaguucgccgacgaccucaaccagcugacgggguacaagaagccggcgagccgcgagcugaaggugaccuucuuccccgaccucaacggcgacguggucgccaucgacuacaagcacuacacccccuccuucaagaagggcgccaagcugcugcacaagcccaucguguggcacgugaacaacgccaccaacaaggcgacguacaagccgaacaccuggugcauccggugccucuggagcaccaagcccgucgagaccuccaacagcuucgacgugcugaaguccgaggacgcccaggggauggacaaccuggccugcgaggaccucaagcccgugagcgaggaggucguggagaaccccacgauccagaaggacgugcuggagugcaacgucaagaccaccgagguggugggcgacaucauccugaagccggccaacaacucccucaagaucaccgaggaggucgggcacacggaccugauggccgcguacguggacaacagcucccugaccaucaagaagcccaacgagcucagccgcgugcugggccugaagacccucgccacccacgggcuggccgccgucaacuccgugcccugggacacgaucgccaacuacgcgaagccguuccugaacaagguggucagcaccaccaccaacaucgugacgcgcugccucaaccgggugugcaccaacuacaugcccuacuucuucacccugcugcuccagcugugcaccuucacccgcuccacgaacagccggaucaaggccuccaugcccaccaccaucgccaagaacaccgucaagagcgugggcaaguucugccuggaggccagcuucaacuaccucaagucccccaacuucagcaagcugaucaacaucaucaucugguuccugcuccuguccgugugccugggcagccucaucuacuccacggccgcgcuggggguccugaugagcaaccucggcaugccguccuacugcaccggguaccgcgagggcuaccugaacagcaccaacgugaccaucgccacguacugcaccggcuccauccccugcagcgugugccuguccgggcucgacagccuggacaccuaccccucccuggagaccauccagaucacgaucagcuccuucaagugggaccucaccgccuucggccuggucgccgagugguuccuggccuacauccucuucacccgguucuucuacgugcuggggcuggcggccaucaugcagcucuucuucagcuacuucgccgugcacuucaucuccaacagcuggcugauguggcugaucaucaaccugguccagauggcccccaucuccgcgauggugcgcauguacaucuucuucgccagcuucuacuacguguggaagagcuacguccacgugguggacggcugcaacuccagcaccugcaugaugugcuacaagcggaaccgcgccacgcgggucgagugcaccaccaucgugaacgggguccgccgguccuucuacguguacgccaacggcggcaagggguucugcaagcuccacaacuggaacugcgugaacugcgacaccuucugcgccggcagcacguucaucuccgacgaggucgcgcgcgaccugagccugcaguucaagcggccgaucaaccccaccgaccaguccagcuacaucguggacuccgugaccgucaagaacgggagcauccaccucuacuucgacaaggccggccagaagaccuacgagcgccacucccugagccacuucgugaaccuggacaaccuccgggccaacaacacgaaggggucccugcccaucaacgugaucgucuucgacggcaagagcaagugcgaggaguccagcgccaaguccgccagcguguacuacucccagcugaugugccagcccauccuccugcuggaccaggcgcucgugagcgacgucggcgacagcgccgagguggccgugaagauguucgacgccuacgucaacaccuucuccagcaccuucaacgugccgauggagaagcugaagacccugguggccacggcggaggccgagcucgccaagaacgucucccuggacaacgugcugagcaccuucaucuccgccgcgcgccagggguucguggacagcgacgucgagaccaaggacgugguggagugccucaagcugucccaccagagcgacaucgaggucaccggcgacuccugcaacaacuacaugcugacguacaacaagguggagaacaugaccccccgggaccucggggccugcaucgacugcagcgcccgccacaucaacgcccagguggccaagucccacaacaucgcgcugaucuggaacgucaaggacuucaugagccuguccgagcagcuccggaagcagauccgcagcgccgccaagaagaacaaccugcccuucaagcugaccugcgccaccacgcgccagguggugaacgucgugaccaccaagguggcccucaagggcgggugaggacuagucccuguucccagagcccacuuuuuuuucuuuuuuugaaauaaaauagccugucuuucagaucucaaaggcucuuuucagagccaccaaaaaaaaaaaaaaaaaaaaaaaaaaaaaaaaaaaaaaaaaaaaaaaaaaaaaaaaaaaaaaaaaaaaaaaaaaaaaaaaaaaaaaaaaaaaaaaaaaaaa

SEQ ID NO: 19609 - RNA, 6113 nt, Artificial Sequence
  SARS-CoV-2__MT846012.1__non-structural protein 3 (NSP3) mRNA gc
aggagagucccgcagucggcguccagcggcucugcuuguucgugugugugucguugcaggccuuauucaagcuuaccauggcccccaccaaggugaccuucggcgacgacacggucaucgaggugcagggguacaagagcgugaacaucaccuucgagcuggacgagcgcaucgacaagguccucaacgagaagugcuccgccuacaccguggagcugggcaccgaggugaacgaguucgcgugcgucguggccgacgccgugaucaagacgcugcagccggucagcgagcuccugaccccccuggggaucgaccucgacgagugguccauggccaccuacuaccuguucgacgagagcggcgaguucaagcuggccucccacauguacugcagcuucuacccccccgacgaggacgaggaggagggggacugcgaggaggaggaguucgagccguccacccaguacgaguacggcacggaggacgacuaccagggcaagccccucgaguucggggcgaccagcgccgcccugcagcuggaggaggagcaggaggaggacuggcucgacgacgacucccagcagaccgugggccagcaggacgggagcgaggacaaccacaccacgaccauccagaccaucguggagguccagccccagcuggagauggagcugacccccguggugcagacgaucgaggucaacuccuucagcggcuaccucaagcugaccgacaacguguacaucaagaacgccgacaucguggaggaggcgaagaaggucaagccgaccgugguggucaacgccgccaacguguaccugaagcacgggggcggcguggccggggcccucaacaaggcgaccaacaacgccaugcaggucgaguccgacgacuacaucgccacgaacggcccccugaagguggggggcagcugcguccuguccggccacaaccucgccaagcacugccugcacgugguggggcccaacgucaacaagggcgaggacauccagcugcucaagagcgccuacgagaacuucaaccagcacgaggugcugcuggcgccccuccuguccgccgggaucuucggcgccgacccgauccacagccugcgggugugcgucgacaccgugcgcaccaacguguaccucgccgucuucgacaagaaccuguacgacaagcugguguccagcuuccucgagaugaagagcgagaagcagguggagcagaagaucgccgagauccccaaggaggaggucaagcccuucaucaccgaguccaagcccagcguggagcagcggaagcaggacgacaagaagaucaaggcgugcguggaggaggucacgaccacccuggaggagaccaaguuccugacggagaaccuccugcuguacaucgacaucaacgggaaccuccacccggacuccgccacccuggugagcgacaucgacaucaccuuccugaagaaggacgcccccuacaucgugggcgacgucgugcaggagggcgugcucaccgccgucgugauccccacgaagaaggccgggggcaccaccgagaugcuggcgaaggcccugcgcaaggugcccaccgacaacuacaucacgaccuacccggggcagggccucaacggguacaccgucgaggaggccaagaccgugcugaagaagugcaaguccgccuucuacauccugcccagcaucaucuccaacgagaagcaggagauccucggcaccgugagcuggaaccugcgggagaugcuggcgcacgccgaggagacgcgcaagcugaugcccgucugcguggagaccaaggccaucguguccaccauccagcggaaguacaagggcaucaagauccaggagggggucguggacuacggcgcccgcuucuacuucuacaccagcaagacgaccguggccucccucaucaacacccugaacgaccugaacgagacccucgucacgaugccccugggguacgugacccacggccugaaccucgaggaggcggcccgguacaugcgcagccugaaggugccggccaccgucuccgugagcucccccgacgccgugaccgccuacaacggguaccugacgagcuccagcaagacccccgaggagcacuucaucgagaccaucucccucgcgggcagcuacaaggacuggagcuacuccggccagagcacccagcuggggaucgaguuccugaagcggggcgacaaguccgucuacuacacgagcaaccccaccaccuuccaccucgacggggaggugaucaccuucgacaaccugaagacgcugcucucccugcgcgaggugcggaccaucaaggucuucaccaccguggacaacaucaaccugcacacgcagguggucgacaugagcaugaccuacggccagcaguucggcccgaccuaccucgacggggccgacgugaccaagaucaagccccacaacucccacgagggcaagacguucuacgugcugcccaacgacgacacccugcgcgucgaggccuucgaguacuaccacaccaccgacccgagcuuccucgggcgguacauguccgcccugaaccacacgaagaaguggaaguacccccaggugaacggccugaccagcaucaagugggccgacaacaacugcuaccucgcgaccgcccugcugacccuccagcagaucgagcugaaguucaacccccccgcccugcaggacgccuacuaccgcgcgcgggccggggaggccgccaacuucugcgcccucauccuggcguacugcaacaagacggugggcgagcugggcgacguccgcgagaccauguccuaccucuuccagcacgccaaccuggacagcugcaagcgggugcugaacgucgugugcaagaccugcgggcagcagcagaccacccucaagggcguggaggccgucauguacauggggacgcuguccuacgagcaguucaagaagggcgugcagaucccgugcaccugcgggaagcaggccaccaaguaccuggugcagcaggagagccccuucgucaugauguccgccccccccgcgcaguacgagcucaagcacggcaccuucacgugcgccagcgaguacaccggcaacuaccagugcgggcacuacaagcacaucaccuccaaggagacccuguacugcaucgacggcgcccugcucacgaagagcagcgaguacaaggggccgaucaccgacguguucuacaaggagaacuccuacaccaccacgaucaagcccgugaccuacaagcuggacggcgucgugugcaccgagaucgaccccaagcuggacaacuacuacaagaaggacaacagcuacuucaccgagcagcccaucgaccucgugccgaaccagcccuaccccaacgccuccuucgacaacuucaaguucgucugcgacaacaucaaguucgccgacgaccugaaccagcugacgggguacaagaagcccgcgagccgcgagcucaaggugaccuucuucccggaccugaacggcgacguggucgccaucgacuacaagcacuacacccccuccuucaagaagggcgccaagcugcuccacaagcccaucguguggcacgugaacaacgccaccaacaaggcgacguacaagcccaacaccuggugcauccggugccuguggagcaccaagccggucgagaccuccaacagcuucgacgugcugaaguccgaggacgcccaggggauggacaaccucgccugcgaggaccugaagcccgugagcgaggaggucguggagaaccccacgauccagaaggacgugcuggagugcaacgucaagaccaccgagguggugggcgacaucauccucaagcccgccaacaacucccugaagaucaccgaggaggucgggcacacggaccugauggccgcguacguggacaacagcucccucaccaucaagaagccgaacgagcugagccgcgugcugggccucaagacccuggccacccacgggcuggccgccgucaacuccgugcccugggacacgaucgccaacuacgcgaagcccuuccucaacaagguggucagcaccaccaccaacaucgugacgcgcugccugaaccgggugugcaccaacuacaugccguacuucuucacccugcuccugcagcugugcaccuucacccgcuccacgaacagccggaucaaggccuccaugcccaccaccaucgccaagaacaccgucaagagcgugggcaaguucugccucgaggccagcuucaacuaccugaagucccccaacuucagcaagcugaucaacaucaucaucugguuccuccugcuguccgugugccucggcagccugaucuacuccacggccgcgcuggggguccucaugagcaaccugggcaugcccuccuacugcaccggguaccgcgagggcuaccugaacagcaccaacgugaccaucgccacguacugcaccggcuccaucccgugcagcgugugccucuccgggcuggacagccuggacaccuaccccucccucgagaccauccagaucacgaucagcuccuucaagugggaccugaccgccuucggccuggucgccgagugguuccucgccuacauccuguucacccgguucuucuacgugcuggggcucgcggccaucaugcagcuguucuucagcuacuucgccgugcacuucaucuccaacagcuggcugauguggcugaucaucaaccucguccagauggcccccaucuccgcgauggugcgcauguacaucuucuucgccagcuucuacuacguguggaagagcuacguccacgugguggacggcugcaacuccagcaccugcaugaugugcuacaagcggaaccgcgccacgcgggucgagugcaccaccaucgugaacgggguccgccgguccuucuacguguacgccaacggcggcaagggguucugcaagcugcacaacuggaacugcgugaacugcgacaccuucugcgccggcagcacguucaucuccgacgaggucgcgcgcgaccugagccuccaguucaagcggcccaucaacccgaccgaccaguccagcuacaucguggacuccgugaccgucaagaacgggagcauccaccuguacuucgacaaggccggccagaagaccuacgagcgccacucccugagccacuucgugaaccucgacaaccugcgggccaacaacacgaaggggucccugcccaucaacgugaucgucuucgacggcaagagcaagugcgaggaguccagcgccaaguccgccagcguguacuacucccagcucaugugccagcccauccugcugcucgaccaggcgcuggugagcgacgucggcgacagcgccgagguggccgugaagauguucgacgccuacgucaacaccuucuccagcaccuucaacgugcccauggagaagcugaagacccucguggccacggcggaggccgagcuggccaagaacgucucccuggacaacgugcucagcaccuucaucuccgccgcgcgccagggguucguggacagcgacgucgagaccaaggacgugguggagugccugaagcugucccaccagagcgacaucgaggucaccggcgacuccugcaacaacuacaugcucacguacaacaagguggagaacaugaccccgcgggaccugggggccugcaucgacugcagcgcccgccacaucaacgcccagguggccaagucccacaacaucgcgcugaucuggaacgucaaggacuucaugagccucuccgagcagcugcggaagcagauccgcagcgccgccaagaagaacaaccugcccuucaagcucaccugcgccaccacgcgccagguggugaacgucgugaccaccaagaucgcccugaagggcgggugaggacuagucccuguucccagagcccacuuuuuuuucuuuuuuugaaauaaaauagccugucuuucagaucucaaaggcucuuuucagagccaccaaaaaaaaaaaaaaaaaaaaaaaaaaaaaaaaaaaaaaaaaaaaaaaaaaaaaaaaaaaaaaaaaaaaaaaaaaaaaaaaaaaaaaaaaaaaaaaaaaaaa

SEQ ID NO: 19610 - RNA, 6113 nt, Artificial Sequence
  SARS-CoV-2__MT846413.1__non-structural protein 3 (NSP3) mRNA gc
aggagagucccgcagucggcguccagcggcucugcuuguucgugugugugucguugcaggccuuauucaagcuuaccauggcccccaccaaggugaccuucggcgacgacacggucaucgaggugcagggguacaagagcgugaacaucaccuucgagcuggacgagcgcaucgacaagguccucaacgagaagugcuccgccuacaccguggagcugggcaccgaggugaacgaguucgcgugcgucguggccgacgccgugaucaagacgcugcagccggucagcgagcuccugaccccccuggggaucgaccucgacgagugguccauggccaccuacuaccuguucgacgagagcggcgaguucaagcuggccucccacauguacugcagcuucuacccccccgacgaggacgaggaggagggggacugcgaggaggaggaguucgagccguccacccaguacgaguacggcacggaggacgacuaccagggcaagccccucgaguucggggcgaccagcgccgcccugcagcccgaggaggagcaggaggaggacuggcuggacgacgacucccagcagaccgugggccagcaggacgggagcgaggacaaccagaccacgaccauccagaccaucguggagguccagccccagcucgagauggagcugaccccgguggugcagacgaucgaggucaacuccuucagcggcuaccugaagcucaccgacaacguguacaucaagaacgccgacaucguggaggaggcgaagaaggucaagcccaccgugguggucaacgccgccaacguguaccugaagcacgggggcggcguggccggggcccugaacaaggcgaccaacaacgccaugcaggucgaguccgacgacuacaucgccacgaacggcccccucaagguggggggcagcugcguccuguccggccacaaccuggccaagcacugccuccacgugguggggcccaacgucaacaagggcgaggacauccagcugcugaagagcgccuacgagaacuucaaccagcacgaggugcuccuggcgccgcugcucuccgccgggaucuucggcgccgaccccauccacagccugcgggugugcgucgacaccgugcgcaccaacguguaccuggccgucuucgacaagaaccucuacgacaagcugguguccagcuuccuggagaugaagagcgagaagcagguggagcagaagaucgccgagauccccaaggaggaggucaagcccuucaucaccgaguccaagccgagcguggagcagcggaagcaggacgacaagaagaucaaggcgugcguggaggaggucacgaccacccucgaggagaccaaguuccugacggagaaccugcuccuguacaucgacaucaacgggaaccugcaccccgacuccgccacccucgugagcgacaucgacaucaccuuccugaagaaggacgcccccuacaucgccggcgacgugguccaggagggcgugcugaccgccguggucauccccacgaagaaggcggggggcaccaccgagaugcucgccaaggcccugcgcaaggugccgaccgacaacuacaucacgaccuaccccgggcagggccugaacggguacaccguggaggaggccaagaccguccucaagaagugcaaguccgcguucuacauccugcccagcaucaucuccaacgagaagcaggagauccugggcaccgugagcuggaaccuccgggagaugcuggcccacgccgaggagacgcgcaagcugaugcccgugugcgucgagaccaaggccaucguguccaccauccagcggaaguacaagggcaucaagauccaggaggggguggucgacuacggcgcccgcuucuacuucuacaccagcaagacgaccguggcgucccugaucaacacccucaacgaccugaacgagacccuggugacgaugccgcucggguacgucacccacggccugaaccuggaggaggccgcccgguacaugcgcagccucaaggugcccgccaccguguccgucagcucccccgacgccgugaccgcguacaacggguaccugacgagcuccagcaagacccccgaggagcacuucaucgagaccaucucccuggccggcagcuacaaggacuggagcuacuccggccagagcacccagcucgggaucgaguuccugaagcggggcgacaaguccguguacuacacgagcaacccgaccaccuuccaccuggacggggaggucaucaccuucgacaaccucaagacgcugcugucccuccgcgaggugcggaccaucaagguguucaccaccgucgacaacaucaaccugcacacgcaggugguggacaugagcaugaccuacggccagcaguucggccccaccuaccuggacggggccgacgucaccaagaucaagccccacaacucccacgagggcaagacguucuacgugcucccgaacgacgacacccugcgcguggaggccuucgaguacuaccacaccaccgaccccagcuuccuggggcgguacauguccgcccucaaccacacgaagaaguggaaguacccccaggucaacggccugaccagcaucaagugggcggacaacaacugcuaccuggccaccgcccuccugacccugcagcagaucgagcucaaguucaaccccccggcccugcaggacgcguacuaccgcgcccgggccggggaggccgccaacuucugcgcgcugauccucgccuacugcaacaagacggugggcgagcugggcgacgugcgcgagaccauguccuaccuguuccagcacgccaaccucgacagcugcaagcggguccugaacguggucugcaagaccugcgggcagcagcagaccacccugaagggcguggaggccgugauguacauggggacgcucuccuacgagcaguucaagaagggcguccagauccccugcaccugcgggaagcaggccaccaaguaccuggugcagcaggagagccccuucgugaugauguccgcgcccccggcccaguacgagcugaagcacggcaccuucacgugcgccagcgaguacaccggcaacuaccagugcgggcacuacaagcacaucaccuccaaggagacccucuacugcaucgacggcgcccugcugacgaagagcagcgaguacaaggggcccaucaccgacgucuucuacaaggagaacuccuacaccaccacgaucaagcccgugaccuacaagcucgacggcguggucugcaccgagaucgaccccaagcuggacaacuacuacaagaaggacaacagcuacuucaccgagcagccgaucgaccuggugcccaaccagcccuaccccaacgccuccuucgacaacuucaaguucgugugcgacaacaucaaguucgcggacgaccucaaccagcugacgggguacaagaagccggccagccgcgagcugaaggucaccuucuuccccgaccucaacggcgacgugguggccaucgacuacaagcacuacacccccuccuucaagaagggcgccaagcugcugcacaagcccaucgucuggcacgugaacaacgcgaccaacaaggccacguacaagccgaacaccuggugcauccggugccucuggagcaccaagcccguggagaccuccaacagcuucgacguccugaaguccgaggacgcccaggggauggacaaccuggccugcgaggaccucaagcccgugagcgaggagguggucgagaaccccacgauccagaaggacgugcuggagugcaacgugaagaccaccgaggucgugggcgacaucauccugaagccggccaacaacucccucaagaucaccgaggagguggggcacacggaccugauggcggccuacgucgacaacagcucccugaccaucaagaagcccaacgagcucagccgcgugcugggccugaagacccucgccacccacgggcuggccgccgugaacuccguccccugggacacgaucgcgaacuacgccaagccguuccugaacaagguggugagcaccaccaccaacaucgucacgcgcugccucaaccgggugugcaccaacuacaugcccuacuucuucacccugcugcuccagcugugcaccuucacccgcuccacgaacagccggaucaaggccuccaugcccaccaccaucgccaagaacaccgugaagagcgucggcaaguucugccuggaggccagcuucaacuaccucaagucccccaacuucagcaagcugaucaacaucaucaucugguuccugcuccuguccgugugccugggcagccucaucuacuccacggcggcccugggggugcugaugagcaaccucggcaugccguccuacugcaccggguaccgcgagggcuaccugaacagcaccaacgucaccaucgccacguacugcaccggcuccauccccugcagcgugugccuguccgggcucgacagccuggacaccuaccccucccuggagaccauccagaucacgaucagcuccuucaagugggaccucaccgccuucggccugguggccgagugguuccuggcguacauccucuucacccgguucuucuacguccuggggcuggccgccaucaugcagcucuucuucagcuacuucgccgugcacuucaucuccaacagcuggcugauguggcugaucaucaaccuggugcagauggcgcccaucuccgccaugguccgcauguacaucuucuucgccagcuucuacuacguguggaagagcuacgugcacgucguggacggcugcaacuccagcaccugcaugaugugcuacaagcggaaccgcgccacgcggguggagugcaccaccaucgucaacggggugcgccgguccuucuacgucuacgccaacggcggcaagggguucugcaagcuccacaacuggaacugcgugaacugcgacaccuucugcgcgggcagcacguucaucuccgacgagguggcccgcgaccugagccugcaguucaagcggccgaucaaccccaccgaccaguccagcuacaucgucgacuccgugaccgugaagaacgggagcauccaccucuacuucgacaaggccggccagaagaccuacgagcgccacucccugagccacuucgucaaccuggacaaccuccgggccaacaacacgaaggggucccugcccaucaacgugaucguguucgacggcaagagcaagugcgaggaguccagcgccaaguccgcgagcgucuacuacucccagcugaugugccagcccauccuccugcuggaccaggcccucgugagcgacgugggcgacagcgccgaggucgccgugaagauguucgacgccuacgugaacaccuucuccagcaccuucaacgucccgauggagaagcugaagacccugguggcgacggccgaggccgagcucgccaagaacgugucccuggacaacguccugagcaccuucaucuccgcggcccgccagggguucguggacagcgacguggagaccaaggacgucguggagugccucaagcugucccaccagagcgacaucgaggugaccggcgacuccugcaacaacuacaugcugacguacaacaaggucgagaacaugaccccccgggaccucggggccugcaucgacugcagcgcccgccacaucaacgcccagguggcgaagucccacaacaucgcccugaucuggaacgugaaggacuucaugagccuguccgagcagcuccggaagcagauccgcagcgccgccaagaagaacaaccugcccuucaagcugaccugcgccaccacgcgccaggucgugaacguggucaccaccaagaucgcgcucaagggcgggugaggacuagucccuguucccagagcccacuuuuuuuucuuuuuuugaaauaaaauagccugucuuucagaucucaaaggcucuuuucagagccaccaaaaaaaaaaaaaaaaaaaaaaaaaaaaaaaaaaaaaaaaaaaaaaaaaaaaaaaaaaaaaaaaaaaaaaaaaaaaaaaaaaaaaaaaaaaaaaaaaaaaa

SEQ ID NO: 19611 - RNA, 6113 nt, Artificial Sequence
  SARS-CoV-2__MT846428.1__non-structural protein 3 (NSP3) mRNA gc
aggagagucccgcagucggcguccagcggcucugcuuguucgugugugugucguugcaggccuuauucaagcuuaccauggcccccaccaaggugaccuucggcgacgacacggucaucgaggugcagggguacaagagcgugaacaucaccuucgagcuggacgagcgcaucgacaagguccucaacgagaagugcuccgccuacaccguggagcugggcaccgaggugaacgaguucgcgugcgucguggccgacgccgugaucaagacgcugcagccggucagcgagcuccugaccccccuggggaucgaccucgacgagugguccauggccaccuacuaccuguucgacgagagcggcgaguucaagcuggccucccacauguacugcagcuucuacccccccgacgaggacgaggaggagggggacugcgaggaggaggaguucgagccguccacccaguacgaguacggcacggaggacgacuaccagggcaagccccucgaguucggggcgaccagcgccgcccugcagcccgaggaggagcaggaggaggacuggcuggacgacgacucccagcagaccgugggccagcaggacgggagcgaggacaaccagaccacgaccauccagaccaucguggagguccagccccagcucgagauggagcugaccccgguggugcagacgaucgaggucaacuccuucagcggcuaccugaagcucaccgacaacguguacaucaagaacgccgacaucguggaggaggcgaagaaggucaagcccaccgugguggucaacgccgccaacguguaccugaagcacgggggcggcguggccggggcccugaacaaggcgaccaacaacgccaugcaggucgaguccgacgacuacaucgccacgaacggcccccucaagguggggggcagcugcguccuguccggccacaaccuggccaagcacugccuccacgugguggggcccaacgucaacaagggcgaggacauccagcugcugaagagcgccuacgagaacuucaaccagcacgaggugcuccuggcgccgcugcucuccgccgggaucuucggcgccgaccccauccacagccugcgggugugcgucgacaccgugcgcaccaacguguaccuggccgucuucgacaagaaccucuacgacaagcugguguccagcuuccuggagaugaagagcgagaagcagguggagcagaagaucgccgagauccccaaggaggaggucaagcccuucaucaccgaguccaagccgagcguggagcagcggaagcaggacgacaagaagaucaaggcgugcguggaggaggucacgaccacccucgaggagaccaaguuccugacggagaaccugcuccuguacaucgacaucaacgggaaccugcaccccgacuccgccacccucgugagcgacaucgacaucaccuuccugaagaaggacgcccccuacaucgugggcgacgucgugcaggagggcgugcugaccgccgucgugauccccacgaagaaggccgggggcaccaccgagaugcucgcgaaggcccugcgcaaggugccgaccgacaacuacaucacgaccuaccccgggcagggccugaacggguacaccgucgaggaggccaagaccgugcucaagaagugcaaguccgccuucuacauccugcccagcaucaucuccaacgagaagcaggagauccugggcaccgugagcuggaaccuccgggagaugcuggcgcacgccgaggagacgcgcaagcugaugcccgucugcguggagaccaaggccaucguguccaccauccagcggaaguacaagggcaucaagauccaggagggggucguggacuacggcgcccgcuucuacuucuacaccagcaagacgaccguggccucccugaucaacacccucaacgaccugaacgagacccuggucacgaugccgcucggguacgugacccacggccugaaccuggaggaggcggcccgguacaugcgcagccucaaggugcccgccaccgucuccgugagcucccccgacgccgugaccgccuacaacggguaccugacgagcuccagcaagacccccgaggagcacuucaucgagaccaucucccuggcgggcagcuacaaggacuggagcuacuccggccagagcacccagcucgggaucgaguuccugaagcggggcgacaaguccgucuacuacacgagcaacccgaccaccuuccaccuggacggggaggugaucaccuucgacaaccucaagacgcugcugucccuccgcgaggugcggaccaucaaggucuucaccaccguggacaacaucaaccugcacacgcagguggucgacaugagcaugaccuacggccagcaguucggccccaccuaccuggacggggccgacgugaccaagaucaagccccacaacucccacgagggcaagacguucuacgugcucccgaacgacgacacccugcgcgucgaggccuucgaguacuaccacaccaccgaccccagcuuccuggggcgguacauguccgcccucaaccacacgaagaaguggaaguacccccaggugaacggccugaccagcaucaagugggccgacaacaacugcuaccuggcgaccgcccuccugacccugcagcagaucgagcucaaguucaaccccccggcccugcaggacgccuacuaccgcgcgcgggccggggaggccgccaacuucugcgcccugauccucgcguacugcaacaagacggugggcgagcugggcgacguccgcgagaccauguccuaccuguuccagcacgccaaccucgacagcugcaagcgggugcugaacgucgugugcaagaccugcgggcagcagcagaccacccugaagggcguggaggccgucauguacauggggacgcucuccuacgagcaguucaagaagggcgugcagauccccugcaccugcgggaagcaggccaccaaguaccuggugcagcaggagagccccuucgucaugauguccgcccccccggcgcaguacgagcugaagcacggcaccuucacgugcgccagcgaguacaccggcaacuaccagugcgggcacuacaagcacaucaccuccaaggagacccucuacugcaucgacggcgcccugcugacgaagagcagcgaguacaaggggcccaucaccgacguguucuacaaggagaacuccuacaccaccacgaucaagcccgugaccuacaagcucgacggcgucgugugcaccgagaucgaccccaagcuggacaacuacuacaagaaggacaacagcuacuucaccgagcagccgaucgaccuggugcccaaccagcccuaccccaacgccuccuucgacaacuucaaguucgucugcgacaacaucaaguucgccgacgaccucaaccagcugacgggguacaagaagccggcgagccgcgagcugaaggugaccuucuuccccgaccucaacggcgacguggucgccaucgacuacaagcacuacacccccuccuucaagaagggcgccaagcugcugcacaagcccaucguguggcacgugaacaacgccaccaacaaggcgacguacaagccgaacaccuggugcacccggugccucuggagcaccaagcccgucgagacguccaacagcuucgacgugcugaaguccgaggacgcccaggggauggacaaccuggccugcgaggaccucaagcccgugagcgaggaggucguggagaaccccaccauccagaaggacgugcuggagugcaacgucaagaccaccgagguggugggcgacaucauccugaagccggccaacaacucccucaagaucacggaggaggucgggcacaccgaccugauggccgcguacguggacaacagcucccugaccaucaagaagcccaacgagcucagccgcgugcugggccugaagacccucgccacgcacgggcuggccgccgucaacuccgugcccugggacaccaucgccaacuacgcgaagccguuccugaacaagguggucagcaccaccacgaacaucgugacccgcugccucaaccgggugugcaccaacuacaugcccuacuucuucacccugcugcuccagcugugcaccuucacgcgcuccaccaacagccggaucaaggccuccaugcccaccaccaucgccaagaacacggucaagagcgugggcaaguucugccuggaggccagcuucaacuaccucaagucccccaacuucagcaagcugaucaacaucaucaucugguuccugcuccuguccgugugccugggcagccucaucuacuccaccgccgcgcuggggguccugaugagcaaccucggcaugccguccuacugcaccggguaccgcgagggcuaccugaacagcaccaacgugacgaucgccaccuacugcaccggcuccauccccugcagcgugugccuguccgggcucgacagccuggacaccuaccccucccuggagacgauccagaucaccaucagcuccuucaagugggaccucaccgccuucggccuggucgccgagugguuccuggccuacauccucuucacccgguucuucuacgugcuggggcuggcggccaucaugcagcucuucuucagcuacuucgccgugcacuucaucuccaacagcuggcugauguggcugaucaucaaccugguccagauggcccccaucuccgcgauggugcgcauguacaucuucuucgccagcuucuacuacguguggaagagcuacguccacgugguggacggcugcaacuccagcacgugcaugaugugcuacaagcggaaccgcgccacccgggucgagugcaccaccaucgugaacgggguccgccgguccuucuacguguacgccaacggcggcaagggguucugcaagcuccacaacuggaacugcgugaacugcgacacguucugcgccggcagcaccuucaucuccgacgaggucgcgcgcgaccugagccugcaguucaagcggccgaucaaccccaccgaccaguccagcuacaucguggacuccgugaccgucaagaacgggagcauccaccucuacuucgacaaggccggccagaagacguacgagcgccacucccugagccacuucgugaaccuggacaaccuccgggccaacaacaccaaggggucccugcccaucaacgugaucgucuucgacggcaagagcaagugcgaggaguccagcgccaaguccgccagcguguacuacucccagcugaugugccagcccauccuccugcuggaccaggcgcucgugagcgacgucggcgacagcgccgagguggccgugaagauguucgacgccuacgucaacaccuucuccagcaccuucaacgugccgauggagaagcugaagacgcugguggccaccgcggaggccgagcucgccaagaacgucucccuggacaacgugcugagcaccuucaucuccgccgcgcgccagggguucguggacagcgacgucgagaccaaggacgugguggagugccucaagcugucccaccagagcgacaucgaggucacgggcgacuccugcaacaacuacaugcugaccuacaacaagguggagaacaugaccccccgggaccucggggccugcaucgacugcagcgcccgccacaucaacgcccagguggccaagucccacaacaucgcgcugaucuggaacgucaaggacuucaugagccuguccgagcagcuccggaagcagauccgcagcgccgccaagaagaacaaccugcccuucaagcugaccugcgccacgacccgccagguggugaacgucgugaccaccaagaucgcccucaagggcgggugaggacuagucccuguucccagagcccacuuuuuuuucuuuuuuugaaauaaaauagccugucuuucagaucucaaaggcucuuuucagagccaccaaaaaaaaaaaaaaaaaaaaaaaaaaaaaaaaaaaaaaaaaaaaaaaaaaaaaaaaaaaaaaaaaaaaaaaaaaaaaaaaaaaaaaaaaaaaaaaaaaaaa

SEQ ID NO: 19612 - RNA, 6113 nt, Artificial Sequence
  SARS-CoV-2__MT846430.1__non-structural protein 3 (NSP3) mRNA gc
aggagagucccgcagucggcguccagcggcucugcuuguucgugugugugucguugcaggccuuauucaagcuuaccauggcccccaccaaggugaccuucggcgacgacacggucaucgaggugcagggguacaagagcgugaacaucaccuucgagcuggacgagcgcaucgacaagguccucaacgagaagugcuccgccuacaccguggagcugggcaccgaggugaacgaguucgcgugcgucguggccgacgccgugaucaagacgcugcagccggucagcgagcuccugaccccccuggggaucgaccucgacgagugguccauggccaccuacuaccuguucgacgagagcggcgaguucaagcuggccucccacauguacugcagcuucuacccccccgacgaggacgaggaggagggggacugcgaggaggaggaguucgagccguccacccaguacgaguacggcacggaggacgacuaccagggcaagccccucgaguucggggcgaccagcgccgcccugcagcccgaggaggagcaggaggaggacuggcuggacgacgacucccagcagaccgugggccagcaggacgggagcgaggacaaccagaccacgaccauccagaccaucguggagguccagccccagcucgagauggagcugaccccgguggugcagacgaucgaggucaacuccuucagcggcuaccugaagcucaccgacaacguguacaucaagaacgccgacaucguggaggaggcgaagaaggucaagcccaccgugguggucaacgccgccaacguguaccugaagcacgggggcggcguggccggggcccugaacaaggcgaccaacaacgccaugcaggucgaguccgacgacuacaucgccacgaacggcccccucaagguggggggcagcugcguccuguccggccacaaccuggccaagcacugccuccacgugguggggcccaacgucaacaagggcgaggacauccagcugcugaagagcgccuacgagaacuucaaccagcacgaggugcuccuggcgccgcugcucuccgccgggaucuucggcgccgaccccauccacagccugcgggugugcgucgacaccgugcgcaccaacguguaccuggccgucuucgacaagaaccucuacgacaagcugguguccagcuuccuggagaugaagagcgagaagcagguggagcagaagaucgccgagauccccaaggaggaggucaagcccuucaucaccgaguccaagccgagcguggagcagcggaagcaggacgacaagaagaucaaggcgugcguggaggaggucacgaccacccucgaggagaucaaguuccugaccgagaaccugcuccuguacaucgacaucaacgggaaccugcaccccgacuccgccacgcucgugagcgacaucgacaucaccuuccugaagaaggacgcccccuacaucgugggcgacgucgugcaggagggcgugcugaccgccgucgugauccccaccaagaaggccgggggcacgaccgagaugcucgcgaaggcccugcgcaaggugccgaccgacaacuacaucaccacguaccccgggcagggccugaacggguacaccgucgaggaggccaagaccgugcucaagaagugcaaguccgccuucuacauccugcccagcaucaucuccaacgagaagcaggagauccugggcaccgugagcuggaaccuccgggagaugcuggcgcacgccgaggagacccgcaagcugaugcccgucugcguggagacgaaggccaucguguccaccauccagcggaaguacaagggcaucaagauccaggagggggucguggacuacggcgcccgcuucuacuucuacaccagcaagaccacgguggccucccugaucaacacccucaacgaccugaacgagacccuggucaccaugccgcucggguacgugacgcacggccugaaccuggaggaggcggcccgguacaugcgcagccucaaggugcccgccaccgucuccgugagcucccccgacgccgugaccgccuacaacggguaccugaccagcuccagcaagacgcccgaggagcacuucaucgagaccaucucccuggcgggcagcuacaaggacuggagcuacuccggccagagcacccagcucgggaucgaguuccugaagcggggcgacaaguccgucuacuacaccagcaacccgacgaccuuccaccuggacggggaggugaucaccuucgacaaccucaagacccugcugucccuccgcgaggugcggacgaucaaggucuucaccaccguggacaacaucaaccugcacacccagguggucgacaugagcaugacguacggccagcaguucggccccaccuaccuggacggggccgacgugaccaagaucaagccccacaacucccacgagggcaagaccuucuacgugcucccgaacgacgacacgcugcgcgucgaggccuucgaguacuaccacaccaccgaccccagcuuccuggggcgguacauguccgcccucaaccacaccaagaaguggaaguacccccaggugaacggccugacgagcaucaagugggccgacaacaacugcuaccuggcgaccgcccuccugacccugcagcagaucgagcucaaguucaaccccccggcccugcaggacgccuacuaccgcgcgcgggccggggaggccgccaacuucugcgcccugauccucgcguacugcaacaagaccgugggcgagcugggcgacguccgcgagacgauguccuaccuguuccagcacgccaaccucgacagcugcaagcgggugcugaacgucgugugcaagaccugcgggcagcagcagaccacccugaagggcguggaggccgucauguacauggggacccucuccuacgagcaguucaagaagggcgugcagauccccugcacgugcgggaagcaggccaccaaguaccuggugcagcaggagagccccuucgucaugauguccgcccccccggcgcaguacgagcugaagcacggcaccuucaccugcgccagcgaguacacgggcaacuaccagugcgggcacuacaagcacaucaccuccaaggagacccucuacugcaucgacggcgcccugcugaccaagagcagcgaguacaaggggcccaucacggacguguucuacaaggagaacuccuacaccaccaccaucaagcccgugacguacaagcucgacggcgucgugugcaccgagaucgaccccaagcuggacaacuacuacaagaaggacaacagcuacuucaccgagcagccgaucgaccuggugcccaaccagcccuaccccaacgccuccuucgacaacuucaaguucgucugcgacaacaucaaguucgccgacgaccucaaccagcugaccggguacaagaagccggcgagccgcgagcugaaggugacguucuuccccgaccucaacggcgacguggucgccaucgacuacaagcacuacacccccuccuucaagaagggcgccaagcugcugcacaagcccaucguguggcacgugaacaacgccaccaacaaggcgaccuacaagccgaacacguggugcauccggugccucuggagcaccaagcccgucgagaccuccaacagcuucgacgugcugaaguccgaggacgcccaggggauggacaaccuggccugcgaggaccucaagcccgugagcgaggaggucguggagaaccccaccauccagaaggacgugcuggagugcaacgucaagacgaccgagguggugggcgacaucauccugaagccggccaacaacucccucaagaucaccgaggaggucgggcacaucgaccugauggccgcguacguggacaacagcucccugaccaucaagaagcccaacgagcucagccgcgugcugggccugaagacgcucgccacccacgggcuggccgccgucaacuccgugcccugggacaccaucgccaacuacgcgaagccguuccugaacaagguggucagcaccacgaccaacaucgugacccgcugccucaaccgggugugcaccaacuacaugcccuacuucuucacgcugcugcuccagcugugcaccuucacccgcuccaccaacagccggaucaaggccuccaugcccaccacgaucgccaagaacaccgucaagagcgugggcaaguucugccuggaggccagcuucaacuaccucaagucccccaacuucagcaagcugaucaacaucaucaucugguuccugcuccuguccgugugccugggcagccucaucuacuccaccgccgcgcuggggguccugaugagcaaccucggcaugccguccuacugcaccggguaccgcgagggcuaccugaacagcacgaacgugaccaucgccaccuacugcaccggcuccauccccugcagcgugugccuguccgggcucgacagccuggacacguaccccucccuggagaccauccagaucaccaucagcuccuucaagugggaccucaccgccuucggccuggucgccgagugguuccuggccuacauccucuucacgcgguucuucuacgugcuggggcuggcggccaucaugcagcucuucuucagcuacuucgccgugcacuucaucuccaacagcuggcugauguggcugaucaucaaccugguccagauggcccccaucuccgcgauggugcgcauguacaucuucuucgccagcuucuacuacguguggaagagcuacguccacgugguggacggcugcaacuccagcaccugcaugaugugcuacaagcggaaccgcgccacccgggucgagugcaccacgaucgugaacgggguccgccgguccuucuacguguacgccaacggcggcaagggguucugcaagcuccacaacuggaacugcgugaacugcgacaccuucugcgccggcagcaccuucaucuccgacgaggucgcgcgcgaccugagccugcaguucaagcggccgaucaaccccaccgaccaguccagcuacaucguggacuccgugacggucaagaacgggagcauccaccucuacuucgacaaggccggccagaagaccuacgagcgccacucccugagccacuucgugaaccuggacaaccuccgggccaacaacaccaaggggucccugcccaucaacgugaucgucuucgacggcaagagcaagugcgaggaguccagcgccaaguccgccagcguguacuacucccagcugaugugccagcccauccuccugcuggaccaggcgcucgugagcgacgucggcgacagcgccgagguggccgugaagauguucgacgccuacgucaacaccuucuccagcacguucaacgugccgauggagaagcugaagacccugguggccaccgcggaggccgagcucgccaagaacgucucccuggacaacgugcugagcaccuucaucuccgccgcgcgccagggguucguggacagcgacgucgagacgaaggacgugguggagugccucaagcugucccaccagagcgacaucgaggucaccggcgacuccugcaacaacuacaugcugaccuacaacaagguggagaacaugaccccccgggaccucggggccugcaucgacugcagcgcccgccacaucaacgcccagguggccaagucccacaacaucgcgcugaucuggaacgucaaggacuucaugagccuguccgagcagcuccggaagcagauccgcagcgccgccaagaagaacaaccugcccuucaagcugacgugcgccaccacccgccagguggugaacgucgugaccacgaagaucgcccucaagggcgggugaggacuagucccuguucccagagcccacuuuuuuuucuuuuuuugaaauaaaauagccugucuuucagaucucaaaggcucuuuucagagccaccaaaaaaaaaaaaaaaaaaaaaaaaaaaaaaaaaaaaaaaaaaaaaaaaaaaaaaaaaaaaaaaaaaaaaaaaaaaaaaaaaaaaaaaaaaaaaaaaaaaaa

SEQ ID NO: 19613 - RNA, 6113 nt, Artificial Sequence
  SARS-CoV-2__MT846469.1__non-structural protein 3 (NSP3) mRNA gc
aggagagucccgcagucggcguccagcggcucugcuuguucgugugugugucguugcaggccuuauucaagcuuaccauggcccccaccaaggugaccuucggcgacgacacggucaucgaggugcagggguacaagagcgugaacaucaccuucgagcuggacgagcgcaucgacaagguccucaacgagaagugcuccgccuacaccguggagcugggcaccgaggugaacgaguucgcgugcgucguggccgacgccgugaucaagacgcugcagccggucagcgagcuccugaccccccuggggaucgaccucgacgagugguccauggccaccuacuaccuguucgacgagagcggcgaguucaagcuggccucccacauguacugcagcuucuacccccccgacgaggacgaggaggagggggacugcgaggaggaggaguucgagccguccacccaguacgaguacggcacggaggacgacuaccagggcaagccccucgaguucggggcgaccagcgccgcccugcagcccgaggaggagcaggaggaggacuggcuggacgacgacucccagcagaccgugggccagcaggacgggagcgaggacaaccagaccacgaccauccagaccaucguggagguccagccccagcucgagauggagcugaccccgguggugcagacgaucgaggucaacuccuucagcggcuaccugaagcucaccgacaacguguacaucaagaacgccgacaucguggaggaggcgaagaaggucaagcccaccgugguggucaacgccgccaacguguaccugaagcacgggggcggcguggccggggcccugaacaaggcgaccaacaacgccaugcaggucgaguccgacgacuacaucgccacgaacggcccccucaagguggggggcagcugcguccuguccggccacaaccuggccaagcacugccuccacgugguggggcccaacgucaacaagggcgaggacauccagcugcugaagagcgccuacgagaacuucaaccagcacgaggugcuccuggcgccgcugcucuccgccgggaucuucggcgccgaccccauccacagccugcgggugugcgucgacaccgugcgcaccaacguguaccuggccgucuucgacaagaaccucuacgacaagcugguguccagcuuccuggagaugaagagcgagaagcagguggagcagaagaucgccgagauccccaaggaggaggucaagcccuucaucaccgaguccaagccgagcguggagcagcggaagcaggacgacaagaagaucaaggcgugcguggaggaggucacgaccacccucgaggagaccaaguuccugacggagaaccugcuccuguacaucgacaucaacgggaaccugcaccccgacuccgccacccucgugagcgacaucgacaucaccuuccugaagaaggacgcccccuacaucgugggcgacgucgugcaggagggcgugcugaccgccgucgugauccccacgaagaaggccgggggcaccaccgagaugcucgcgaaggcccugcgcaaggugccgaccgacaacuacaucacgaccuaccccgggcagggccugaacggguacaccgucgaggaggccaagaccgugcucaagaagugcaaguccgccuucuacauccugcccagcaucaucuccaacgagaagcaggagauccugggcaccgugagcuggucccuccgggagaugcuggcgcacgccgaggagacgcgcaagcugaugcccgucugcguggagaccaaggccaucgugagcaccauccagcggaaguacaagggcaucaagauccaggagggggucguggacuacggcgcccgcuucuacuucuacaccuccaagacgaccguggccagccugaucaacacccucaacgaccugaacgagacccuggucacgaugccgcucggguacgugacccacggccugaaccuggaggaggcggcccgguacaugcgcucccucaaggugcccgccaccgucagcguguccagccccgacgccgugaccgccuacaacggguaccugacguccagcuccaagacccccgaggagcacuucaucgagaccaucagccuggcgggcagcuacaaggacugguccuacagcggccaguccacccagcucgggaucgaguuccugaagcggggcgacaagagcgucuacuacacguccaacccgaccaccuuccaccuggacggggaggugaucaccuucgacaaccucaagacgcugcugagccuccgcgaggugcggaccaucaaggucuucaccaccguggacaacaucaaccugcacacgcagguggucgacauguccaugaccuacggccagcaguucggccccaccuaccuggacggggccgacgugaccaagaucaagccccacaacagccacgagggcaagacguucuacgugcucccgaacgacgacacccugcgcgucgaggccuucgaguacuaccacaccaccgaccccuccuuccuggggcgguacaugagcgcccucaaccacacgaagaaguggaaguacccccaggugaacggccugaccuccaucaagugggccgacaacaacugcuaccuggcgaccgcccuccugacccugcagcagaucgagcucaaguucaaccccccggcccugcaggacgccuacuaccgcgcgcgggccggggaggccgccaacuucugcgcccugauccucgcguacugcaacaagacggugggcgagcugggcgacguccgcgagaccaugagcuaccuguuccagcacgccaaccucgacuccugcaagcgggugcugaacgucgugugcaagaccugcgggcagcagcagaccacccugaagggcguggaggccgucauguacauggggacgcucagcuacgagcaguucaagaagggcgugcagauccccugcaccugcgggaagcaggccaccaaguaccuggugcagcaggagucccccuucgucaugaugagcgcccccccggcgcaguacgagcugaagcacggcaccuucacgugcgccuccgaguacaccggcaacuaccagugcgggcacuacaagcacaucaccagcaaggagacccucuacugcaucgacggcgcccugcugacgaagagcuccgaguacaaggggcccaucaccgacguguucuacaaggagaacagcuacaccaccacgaucaagcccgugaccuacaagcucgacggcgucgugugcaccgagaucgaccccaagcuggacaacuacuacaagaaggacaacuccuacuucaccgagcagccgaucgaccuggugcccaaccagcccuaccccaacgccagcuucgacaacuucaaguucgucugcgacaacaucaaguucgccgacgaccucaaccagcugacgggguacaagaagccggcgucccgcgagcugaaggugaccuucuuccccgaccucaacggcgacguggucgccaucgacuacaagcacuacacccccagcuucaagaagggcgccaagcugcugcacaagcccaucguguggcacgugaacaacgccaccaacaaggcgacguacaagccgaacaccuggugcauccggugccucugguccaccaagcccgucgagaccagcaacuccuucgacgugcugaagagcgaggacgcccaggggauggacaaccuggccugcgaggaccucaagcccguguccgaggaggucguggagaaccccacgauccagaaggacgugcuggagugcaacgucaagaccaccgagguggugggcgacaucauccugaagccggccaacaacagccucaagaucaccgaggaggucgggcacacggaccugauggccgcguacguggacaacuccagccugaccaucaagaagcccaacgagcucucccgcgugcugggccugaagacccucgccacccacgggcuggccgccgucaacagcgugcccugggacacgaucgccaacuacgcgaagccguuccugaacaagguggucuccaccaccaccaacaucgugacgcgcugccucaaccgggugugcaccaacuacaugcccuacuucuucacccugcugcuccagcugugcaccuucacccgcagcacgaacucccggaucaaggccagcaugcccaccaccaucgccaagaacaccgucaagagcgugggcaaguucugccuggaggccuccuucaacuaccucaagagccccaacuucuccaagcugaucaacaucaucaucugguuccugcuccugagcgugugccugggcucccucaucuacagcacggccgcgcuggggguccugauguccaaccucggcaugccgagcuacugcaccggguaccgcgagggcuaccugaacuccaccaacgugaccaucgccacguacugcaucggcagcauccccugcuccgugugccugagcgggcucgacucccuggacaccuaccccagccuggagaccauccagaucaccaucuccagcuucaagugggaccucacggccuucggccuggucgccgagugguuccuggccuacauccucuucacccgguucuucuacgugcuggggcuggcggccaucaugcagcucuucuucuccuacuucgccgugcacuucaucagcaacuccuggcugauguggcugaucaucaaccugguccagauggcccccaucagcgcgauggugcgcauguacaucuucuucgccagcuucuacuacguguggaaguccuacguccacgugguggacggcugcaacagcuccaccugcaugaugugcuacaagcggaaccgcgccacccgggucgagugcacgaccaucgugaacgggguccgccggagcuucuacguguacgccaacggcggcaagggguucugcaagcuccacaacuggaacugcgugaacugcgacaccuucugcgccggcuccaccuucaucagcgacgaggucgcgcgcgaccugucccugcaguucaagcggccgaucaaccccacggaccagagcuccuacaucguggacagcgugaccgucaagaacggguccauccaccucuacuucgacaaggccggccagaagaccuacgagcgccacagccugucccacuucgugaaccuggacaaccuccgggccaacaacaccaaggggagccugcccaucaacgugaucgucuucgacggcaaguccaagugcgaggagagcuccgccaagagcgccuccguguacuacagccagcugaugugccagcccauccuccugcuggaccaggcgcucgugagcgacgucggcgacuccgccgagguggccgugaagauguucgacgccuacgucaacacguucagcuccaccuucaacgugccgauggagaagcugaagacccugguggccaccgcggaggccgagcucgccaagaacgucagccuggacaacgugcuguccacguucaucagcgccgcgcgccagggguucguggacuccgacgucgagaccaaggacgugguggagugccucaagcugagccaccaguccgacaucgaggucaccggcgacagcugcaacaacuacaugcugaccuacaacaagguggagaacaugacgccccgggaccucggggccugcaucgacugcuccgcccgccacaucaacgcccagguggccaagagccacaacaucgcgcugaucuggaacgucaaggacuucaugucccugagcgagcagcuccggaagcagauccgcuccgccgccaagaagaacaaccugcccuucaagcugaccugcgccaccacccgccagguggugaacgucgugacgaccaagaucgcccucaagggcgggugaggacuagucccuguucccagagcccacuuuuuuuucuuuuuuugaaauaaaauagccugucuuucagaucucaaaggcucuuuucagagccaccaaaaaaaaaaaaaaaaaaaaaaaaaaaaaaaaaaaaaaaaaaaaaaaaaaaaaaaaaaaaaaaaaaaaaaaaaaaaaaaaaaaaaaaaaaaaaaaaaaaaa

SEQ ID NO: 19614 - RNA, 6113 nt, Artificial Sequence
  SARS-CoV-2__MT846483.1__non-structural protein 3 (NSP3) mRNA gc
aggagagucccgcagucggcguccagcggcucugcuuguucgugugugugucguugcaggccuuauucaagcuuaccauggcccccaccaaggugaccuucggcgacgacacggucaucgaggugcagggguacaagagcgugaacaucaccuucgagcuggacgagcgcaucgacaagguccucaacgagaagugcuccgccuacaccguggagcugggcaccgaggugaacgaguucgcgugcgucguggccgacgccgugaucaagacgcugcagccggucagcgagcuccugaccccccuggggaucgaccucgacgagugguccauggccaccuacuaccuguucgacgagagcggcgaguucaagcuggccucccacauguacugcagcuucuacccccccgacgaggacgaggaggagggggacugcgaggaggaggaguucgagccguccacccaguacgaguacggcacggaggacgacuaccagggcaagccccucgaguucggggcgaccagcgccgcccugcagcccgaggaggagcaggaggaggacuggcuggacgacgacucccagcagaccgugggccagcaggacgggagcgaggacaaccagaccacgaccauccagaccaucguggagguccagccccagcucgagauggagcugaccccgguggugcagacgaucgaggucaacuccuucagcggcuaccugaagcucaccgacaacguguacaucaagaacgccgacaucguggaggaggucaagaaggugaagcccaccguggucgugaacgcggccaacguguaccugaagcacgggggcggcgucgccggggcccugaacaaggccaccaacaacgcgaugcagguggaguccgacgacuacaucgccacgaacggcccccucaaggucgggggcagcugcgugcuguccggccacaaccuggccaagcacugccuccacguggucgggcccaacgugaacaagggcgaggacauccagcugcugaagagcgccuacgagaacuucaaccagcacgaggugcuccuggccccgcugcucuccgcggggaucuucggcgccgaccccauccacagccugcgggucugcguggacaccgugcgcaccaacgucuaccuggccguguucgacaagaaccucuacgacaagcugguguccagcuuccuggagaugaagagcgagaagcaggucgagcagaagaucgccgagauccccaaggaggaggugaagcccuucaucaccgaguccaagccgagcguggagcagcggaagcaggacgacaagaagaucaaggccugcgucgaggaggugacgaccacccucgaggagaccaaguuccugacggagaaccugcuccuguacaucgacaucaacgggaaccugcaccccgacuccgcgacccucgugagcgacaucgacaucaccuuccugaagaaggacgcccccuacaucgucggcgacguggugcaggagggcguccugaccgccguggugauccccacgaagaaggccgggggcaccaccgagaugcucgccaaggcgcugcgcaaggucccgaccgacaacuacaucacgaccuaccccgggcagggccugaacggguacaccguggaggaggccaagaccgugcucaagaagugcaaguccgccuucuacauccugcccagcaucaucuccaacgagaagcaggagauccugggcaccgucagcuggaaccuccgggagaugcuggcccacgcggaggagacgcgcaagcugaugcccgugugcguggagaccaaggccaucgucuccaccauccagcggaaguacaagggcaucaagauccaggagggggugguggacuacggcgcccgcuucuacuucuacaccagcaagacgaccgucgccucccugaucaacacccucaacgaccugaacgagacccuggugacgaugccgcucggguacgugacccacggccugaaccuggaggaggccgcgcgguacaugcgcagccucaagguccccgccaccguguccgugagcucccccgacgccgucaccgccuacaacggguaccugacgagcuccagcaagacccccgaggagcacuucaucgagaccaucucccuggccggcagcuacaaggacuggagcuacuccggccagagcacccagcucgggaucgaguuccugaagcggggcgacaaguccguguacuacacgagcaacccgaccaccuuccaccuggacggggaggugaucaccuucgacaaccucaagacgcugcugucccuccgcgagguccggaccaucaagguguucaccaccguggacaacaucaaccugcacacgcaggucguggacaugagcaugaccuacggccagcaguucggccccaccuaccuggacggggcggacgugaccaagaucaagccccacaacucccacgagggcaagacguucuacguccucccgaacgacgacacccugcgcguggaggccuucgaguacuaccacaccaccgaccccagcuuccuggggcgguacauguccgcccucaaccacacgaagaaguggaaguacccccaggugaacggccugaccagcaucaagugggccgacaacaacugcuaccuggccaccgcgcuccugacccugcagcagaucgagcucaaguucaaccccccggcccugcaggacgccuacuaccgcgcccgggcgggggaggccgccaacuucugcgcccugauccucgccuacugcaacaagacggucggcgagcugggcgacgugcgcgagaccauguccuaccuguuccagcacgcgaaccucgacagcugcaagcggguccugaacguggugugcaagaccugcgggcagcagcagaucacccugaagggcgucgaggccgugauguacauggggacccucuccuacgagcaguucaagaagggcgugcagauccccugcacgugcgggaagcaggccaccaaguaccugguccagcaggagagccccuucgugaugauguccgcccccccggcccaguacgagcugaagcacggcaccuucaccugcgcgagcgaguacacgggcaacuaccagugcgggcacuacaagcacaucaccuccaaggagacccucuacugcaucgacggcgcccugcugaccaagagcagcgaguacaaggggcccaucacggacguguucuacaaggagaacuccuacaccaccaccaucaagcccgucacguacaagcucgacggcguggugugcaccgagaucgaccccaagcuggacaacuacuacaagaaggacaacagcuacuucaccgagcagccgaucgaccugguccccaaccagcccuaccccaacgccuccuucgacaacuucaaguucgugugcgacaacaucaaguucgccgacgaccucaaccagcugaccggguacaagaagccggccagccgcgagcugaaggugacguucuuccccgaccucaacggcgacgucguggcgaucgacuacaagcacuacacccccuccuucaagaagggcgccaagcugcugcacaagcccaucguguggcacgucaacaacgccaccaacaaggccaccuacaagccgaacacguggugcauccggugccucuggagcaccaagcccguggagaccuccaacagcuucgacgugcugaaguccgaggacgcgcaggggauggacaaccuggccugcgaggaccucaagcccgucagcgaggaggugguggagaaccccaccauccagaaggacguccuggagugcaacgugaagacgaccgagguggucggcgacaucauccugaagccggccaacaacucccucaagaucaccgaggagguggggcacaccgaccugauggccgccuacguggacaacagcucccugacgaucaagaagcccaacgagcucagccgcguccugggccugaagacccucgcgacccacgggcuggccgccgugaacuccgugcccugggacaccaucgccaacuacgccaagccguuccugaacaaggucgugagcacgaccaccaacaucgugacccgcugccucaaccgggucugcacgaacuacaugcccuacuucuucacccugcugcuccagcugugcaccuucacccgcuccaccaacagccggaucaaggcguccaugcccacgaccaucgccaagaacaccgugaagagcgugggcaaguucugccuggaggccagcuucaacuaccucaagucccccaacuucagcaagcugaucaacaucaucaucugguuccugcuccuguccgucugccugggcagccucaucuacuccaccgccgcccugggggugcugaugagcaaccucggcaugccguccuacugcacgggguaccgcgagggcuaccugaacagcaccaacgugaccaucgcgaccuacugcacgggcuccauccccugcagcgucugccuguccgggcucgacagccuggacaccuaccccucccuggagaccauccagaucaccaucagcuccuucaagugggaccucacggccuucggccugguggccgagugguuccuggccuacauccucuucacccgguucuucuacgugcuggggcuggccgcgaucaugcagcucuucuucagcuacuucgccguccacuucaucuccaacagcuggcugauguggcugaucaucaaccuggugcagauggcccccaucuccgccauggugcgcauguacaucuucuucgcgagcuucuacuacgucuggaagagcuacgugcacguggucgacggcugcaacuccagcaccugcaugaugugcuacaagcggaaccgcgccacccggguggagugcacgaccaucgucaacggggugcgccgguccuucuacguguacgccaacggcggcaagggguucugcaagcuccacaacuggaacugcgucaacugcgacaccuucugcgccggcagcaccuucaucuccgacgagguggcccgcgaccugagccugcaguucaagcggccgaucaaccccacggaccaguccagcuacaucguggacuccgucaccgugaagaacgggagcauccaccucuacuucgacaaggcgggccagaagaccuacgagcgccacucccugagccacuucgugaaccuggacaaccuccgggccaacaacaccaaggggucccugcccaucaacgucaucguguucgacggcaagagcaagugcgaggaguccagcgccaaguccgccagcguguacuacucccagcugaugugccagcccauccuccugcuggaccaggcccucgucagcgacgugggcgacagcgcggagguggccgucaagauguucgacgccuacgugaacacguucuccagcaccuucaacgugccgauggagaagcugaagacccuggucgccaccgccgaggcggagcucgccaagaacgugucccuggacaacgugcugagcacguucaucuccgccgcccgccagggguucgucgacagcgacguggagaccaaggacguggucgagugccucaagcugucccaccagagcgacaucgaggugaccggcgacuccugcaacaacuacaugcugaccuacaacaagguggagaacaugacgccccgggaccucggggcgugcaucgacugcagcgcccgccacaucaacgcccaggucgccaagucccacaacaucgcccugaucuggaacgugaaggacuucaugagccuguccgagcagcuccggaagcagauccgcagcgcggccaagaagaacaaccugcccuucaagcugaccugcgccaccacccgccagguggucaacguggugacgaccaagaucgcccucaagggcgggugaggacuagucccuguucccagagcccacuuuuuuuucuuuuuuugaaauaaaauagccugucuuucagaucucaaaggcucuuuucagagccaccaaaaaaaaaaaaaaaaaaaaaaaaaaaaaaaaaaaaaaaaaaaaaaaaaaaaaaaaaaaaaaaaaaaaaaaaaaaaaaaaaaaaaaaaaaaaaaaaaaaaa

SEQ ID NO: 19615 - RNA, 6113 nt, Artificial Sequence
  SARS-CoV-2__MT846505.1__non-structural protein 3 (NSP3) mRNA gc
aggagagucccgcagucggcguccagcggcucugcuuguucgugugugugucguugcaggccuuauucaagcuuaccauggcccccaccaaggugaccuucggcgacgacacggucaucgaggugcagggguacaagagcgugaacaucaccuucgagcuggacgagcgcaucgacaagguccucaacgagaagugcuccgccuacaccguggagcugggcaccgaggugaacgaguucgcgugcgucguggccgacgccgugaucaagacgcugcagccggucagcgagcuccugaccccccuggggaucgaccucgacgagugguccauggccaccuacuaccuguucgacgagagcggcgaguucaagcuggccucccacauguacugcagcuucuacccccccgacgaggacgaggaggagggggacugcgaggaggaggaguucgagccguccacccaguacgaguacggcacggaggacgacuaccagggcaagccccucgaguucggggcgaccagcgccgcccugcagcccgaggaggagcaggaggaggacuggcuggacgacgacucccagcagaccgugggccagcaggacgggagcgaggacaaccagaccacgaccauccagaccaucguggagguccagccccagcucgagauggagcugaccccgguggugcagacgaucgaggucaacuccuucagcggcuaccugaagcucaccgacaacguguacaucaagaacgccgacaucguggaggaggcgaagaaggucaagcccaccgugguggucaacgccgccaacguguaccugaagcacgggggcggcguggccggggcccugaacaaggcgaccaacaacgccaugcaggucgaguccgacgacuacaucgccacgaacggcccccucaagguggggggcagcugcguccuguccggccacaaccuggccaagcacugccuccacgugguggggcccaacgucaacaagggcgaggacauccagcugcugaagagcgccuacgagaacuucaaccagcacgaggugcuccuggcgccgcugcucuccgccgggaucuucggcgccgaccccauccacagccugcgggugugcgucgacaccgugcgcaccaacguguaccuggccgucuucgacaagaaccucuacgacaagcugguguccagcuuccuggagaugaagagcgagaagcagguggagcagaagaucgccgagauccccaaggaggaggucaagcccuucaucaccgaguccaagccgagcguggagcagcggaagcaggacgacaagaagaucaaggcgugcguggaggaggucacgaccacccucgaggagaccaaguuccugacggagaaccugcuccuguacaucgacaucaacgggaaccugcaccccgacuccgccacccucgugagcgacaucgacaucaccuuccugaagaaggacgcccccuacaucgugggcgacgucgugcaggagggcgugcugaccgccgucgugauccccacgaagaaggccgggggcaccaccgagaugcucgcgaaggcccugcgcaaggugccgaccgacaacuacaucacgaccuaccccgggcagggccugaacggguacaccgucgaggaggccaagaccgugcucaagaagugcaaguccgccuucuacauccugcccagcaucaucuccaacgagaagcaggagauccugggcaccgugagcuggaaccuccgggagaugcuggcgcacgccgaggagacgcgcaagcugaugcccgucugcguggagaccaaggccaucguguccaccauccagcggaaguacaagggcaucaagauccaggagggggucguggacuacggcgcccgcuucuacuucuacaccagcaagacgaccguggccucccugaucaacacccucaacgaccugaacgagacccuggucacgaugccgcucggguacgugacccacggccugaaccuggaggaggcggcccgguacaugcgcagccucaaggugcccgccaccgucuccgugagcucccccgacgccgugaccgccuacaacggguaccugacgagcuccagcaagacccccgaggagcacuucaucgagaccaucucccuggcgggcagcuacaaggacuggagcuacuccggccagagcacccagcucgggaucgaguuccugaagcggggcgacaaguccgucuacuacacgagcaacccgaccaccuuccaccuggacggggaggugaucaccuucgacaaccucaagacgcugcugucccuccgcgaggugcggaccaucaaggucuucaccaccguggacaacaucaaccugcacacgcagguggucgacaugagcaugaccuacggccagcaguucggccccaccuaccuggacggggccgacgugaccaagaucaagccccacaacucccacgagggcaagacguucuacgugcucccgaacgacgacacccugcgcgucgaggccuucgaguacuaccacaccaccgaccccagcuuccuggggcgguacauguccgcccucaaccacacgaagaaguggaaguacccccaggugaacggccugaccagcaucaagugggccgacaacaacugcuaccuggcgaccgugcuccugacccugcagcagaucgagcucaaguucaaccccccggcccugcaggacgccuacuaccgcgcccgggcgggggaggccgccaacuucugcgcccugauccucgccuacugcaacaagacggucggcgagcugggcgacgugcgcgagaccauguccuaccuguuccagcacgcgaaccucgacagcugcaagcggguccugaacguggugugcaagaccugcgggcagcagcagaccacccugaagggcgucgaggccgugauguacauggggacgcucuccuacgagcaguucaagaagggcgugcagauccccugcaccugcgggaagcaggccaccaaguaccugguccagcaggagagccccuucgugaugauguccgcccccccggcccaguacgagcugaagcacggcaccuucacgugcgcgagcgaguacaccggcaacuaccagugcgggcacuacaagcacaucaccuccaaggagacccucuacugcaucgacggcgcccugcugacgaagagcagcgaguacaaggggcccaucaccgacguguucuacaaggagaacuccuacaccaccacgaucaagcccgucaccuacaagcucgacggcguggugugcaccgagaucgaccccaagcuggacaacuacuacaagaaggacaacagcuacuucaccgagcagccgaucgaccugguccccaaccagcccuaccccaacgccuccuucgacaacuucaaguucgugugcgacaacaucaaguucgccgacgaccucaaccagcugacgggguacaagaagccggccagccgcgagcugaaggugaccuucuuccccgaccucaacggcgacgucguggcgaucgacuacaagcacuacacccccuccuucaagaagggcgccaagcugcugcacaagcccaucguguggcacgucaacaacgccaccaacaaggccacguacaagccgaacaccuggugcauccggugccucuggagcaccaagcccguggagaccuccaacagcuucgacgugcugaaguccgaggacgcgcaggggauggacaaccuggccugcgaggaccucaagcccgucagcgaggaggugguggagaaccccacgauccagaaggacguccuggagugcaacgugaagaccaccgagguggucggcgacaucauccugaagccggccaacaacucccucaagaucaccgaggagguggggcacacggaccugauggccgccuacguggacaacagcucccugaccaucaagaagcccaacgagcucagccgcguccugggccugaagacccucgcgacccacgggcuggccgccgugaacuccgugcccugggacacgaucgccaacuacgccaagccguuccugaacaaggucgugagcaccaccaccaacaucgugacgcgcugccucaaccgggucugcaccaacuacaugcccuacuucuucacccugcugcuccagcugugcaccuucacccgcuccacgaacagccggaucaaggcguccaugcccaccaccaucgccaagaacaccgugaagagcgugggcaaguucugccuggaggccagcuucaacuaccucaagucccccaacuucagcaagcugaucaacaucaucaucugguuccugcuccuguccgucugccugggcagccucaucuacuccacggccgcccugggggugcugaugagcaaccucggcaugccguccuacugcaccggguaccgcgagggcuaccugaacagcaccaacgugaccaucgcgacguacugcaccggcuccauccccugcagcgucugccuguccgggcucgacagccuggacaccuaccccucccuggagaccauccagaucacgaucagcuccuucaagugggaccucaccgccuucggccugguggccgagugguuccuggccuacauccucuucacccgguucuucuacgugcuggggcuggccgcgaucaugcagcucuucuucagcuacuucgccguccacuucaucuccaacagcuggcugauguggcugaucaucaaccuggugcagauggcccccaucuccgccauggugcgcauguacaucuucuucgcgagcuucuacuacgucuggaagagcuacgugcacguggucgacggcugcaacuccagcaccugcaugaugugcuacaagcggaaccgcgccacgcggguggagugcaccaccaucgucaacggggugcgccgguccuucuacguguacgccaacggcggcaagggguucugcaagcuccacaacuggaacugcgucaacugcgacaccuucugcgccggcagcacguucaucuccgacgagguggcccgcgaccugagccugcaguucaagcggccgaucaaccccaccgaccaguccagcuacaucguggacuccgucaccgugaagaacgggagcauccaccucuacuucgacaaggcgggccagaagaccuacgagcgccacucccugagccacuucgugaaccuggacaaccuccgggccaacaacacgaaggggucccugcccaucaacgucaucguguucgacggcaagagcaagugcgaggaguccagcgccaaguccgccagcguguacuacucccagcugaugugccagcccauccuccugcuggaccaggcccucgucagcgacgugggcgacagcgcggagguggccgucaagauguucgacgccuacgugaacaccuucuccagcaccuucaacgugccgauggagaagcugaagacccuggucgccacggccgaggcggagcucgccaagaacgugucccuggacaacgugcugagcaccuucaucuccgccgcccgccagggguucgucgacagcgacguggagaccaaggacguggucgagugccucaagcugucccaccagagcgacaucgaggugaccggcgacuccugcaacaacuacaugcugacguacaacaagguggagaacaugaccccccgggaccucggggcgugcaucgacugcagcgcccgccacaucaacgcccaggucgccaagucccacaacaucgcccugaucuggaacgugaaggacuucaugagccuguccgagcagcuccggaagcagauccgcagcgcggccaagaagaacaaccugcccuucaagcugaccugcgccaccacgcgccagguggucaacguggugaccaccaagaucgcccucaagggcgggugaggacuagucccuguucccagagcccacuuuuuuuucuuuuuuugaaauaaaauagccugucuuucagaucucaaaggcucuuuucagagccaccaaaaaaaaaaaaaaaaaaaaaaaaaaaaaaaaaaaaaaaaaaaaaaaaaaaaaaaaaaaaaaaaaaaaaaaaaaaaaaaaaaaaaaaaaaaaaaaaaaaaa

SEQ ID NO: 19616 - RNA, 6113 nt, Artificial Sequence
  SARS-CoV-2__MT846507.1__non-structural protein 3 (NSP3) mRNA gc
aggagagucccgcagucggcguccagcggcucugcuuguucgugugugugucguugcaggccuuauucaagcuuaccauggcccccaccaaggugaccuucggcgacgacacggucaucgaggugcagggguacaagagcgugaacaucaccuucgagcuggacgagcgcaucgacaagguccucaacgagaagugcuccgccuacaccguggagcugggcaccgaggugaacgaguucgcgugcgucguggccgacgccgugaucaagacgcugcagccggucagcgagcuccugaccccccuggggaucgaccucgacgagugguccauggccaccuacuaccuguucgacgagagcggcgaguucaagcuggccucccacauguacugcagcuucuacccccccgacgaggacgaggaggagggggacugcgaggaggaggaguucgagccguccacccaguacgaguacggcacggaggacgacuaccagggcaagccccucgaguucggggcgaccagcgccgcccugcagcccgaggaggagcaggaggaggacuggcuggacgacgacucccagcagaccgugggccagcaggacgggagcgaggacaaccagaccacgaccauccagaccaucguggagguccagccccagcucgagauggagcugaccccgguggugcagacgaucgaggucaacuccuucagcggcuaccugaagcucaccgacaacguguacaucaagaacgccgacaucguggaggaggcgaagaaggucaagcccaccgugguggucaacgccgccaacguguaccugaagcacgggggcggcguggccggggcccugaacaaggcgaccaacaacgccaugcaggucgaguccgacgacuacaucgccacgaacggcccccucaagguggggggcagcugcguccuguccggccacaaccuggccaagcacugccuccacgugguggggcccaacgucaacaagggcgaggacauccagcugcugaagagcgccuacgagaacuucaaccagcacgaggugcuccuggcgccgcugcucuccgccgggaucuucggcgccgaccccauccacagccugcgggugugcgucgacaccgugcgcaccaacguguaccuggccgucuucgacaagaaccucuacgacaagcugguguccagcuuccuggagaugaagagcgagaagcagguggagcagaacaucgccgagauccccaaggaggaggucaagcccuucaucaccgaguccaagccgagcguggagcagcggaagcaggacgacaagaagaucaaggcgugcguggaggaggucacgaccacccucgaggagaccaaguuccugacggagaaccugcuccuguacaucgacaucaacgggaaccugcaccccgacuccgccacccucgugagcgacaucgacaucaccuuccugaagaaggacgcccccuacaucgugggcgacgucgugcaggagggcgugcugaccgccgucgugauccccacgaagaaggccgggggcaccaccgagaugcucgcgaaggcccugcgcaagguguccaccgacaacuacaucacgaccuacccggggcagggccugaacggguacaccgucgaggaggccaagaccgugcucaagaagugcaagagcgccuucuacauccugcccuccaucaucagcaacgagaagcaggagauccugggcaccguguccuggaaccuccgggagaugcuggcgcacgccgaggagacgcgcaagcugaugcccgucugcguggagaccaaggccaucgugagcaccauccagcggaaguacaagggcaucaagauccaggagggggucguggacuacggcgcccgcuucuacuucuacaccuccaagacgaccguggccagccugaucaacacccucaacgaccugaacgagacccuggucacgaugccccucggguacgugacccacggccugaaccuggaggaggcggcccgguacaugcgcucccucaaggugccggccaccgucagcguguccagccccgacgccgugaccgccuacaacggguaccugacguccagcuccaagacccccgaggagcacuucaucgagaccaucagccuggcgggcagcuacaaggacugguccuacagcggccaguccacccagcucgggaucgaguuccugaagcggggcgacaagagcgucuacuacacguccaaccccaccaccuuccaccuggacggggaggugaucaccuucgacaaccucaagacgcugcugagccuccgcgaggugcggaccaucaaggucuucaccaccguggacaacaucaaccugcacacgcagguggucgacauguccaugaccuacggccagcaguucggcccgaccuaccuggacggggccgacgugaccaagaucaagccccacaacagccacgagggcaagacguucuacgugcuccccaacgacgacacccugcgcgucgaggccuucgaguacuaccacaccaccgacccguccuuccuggggcgguacaugagcgcccucaaccacacgaagaaguggaaguacccccaggugaacggccugaccuccaucaagugggccgacaacaacugcuaccuggcgaccgcccuccugacccugcagcagaucgagcucaaguucaacccccccgcccugcaggacgccuacuaccgcgcgcgggccggggaggccgccaacuucugcgcccugauccucgcguacugcaacaagacggugggcgagcugggcgacguccgcgagaccaugagcuaccuguuccagcacgccaaccucgacuccugcaagcgggugcugaacgucgugugcaagaccugcgggcagcagcagaccacccugaagggcguggaggccgucauguacauggggacgcucagcuacgagcaguucaagaagggcgugcagaucccgugcaccugcgggaagcaggccaccaaguaccuggugcagcaggaguccagcuucgucaugauguccgccccccccgcgcaguacgagcugaagcacggcaccuucacgugcgccagcgaguacaccggcaacuaccagugcgggcacuacaagcacaucaccagcaaggagacccucuacugcaucgacggcgcccugcugacgaaguccagcgaguacaaggggcccaucaccgacguguucuacaaggagaacuccuacaccaccacgaucaagccggugaccuacaagcucgacggcgucgugugcaccgagaucgaccccaagcuggacaacuacuacaagaaggacaacagcuacuucaccgagcagcccaucgaccuggugcccaaccagccguaccccaacgccuccuucgacaacuucaaguucgucugcgacaacaucaaguucgccgacgaccucaaccagcugacgggguacaagaagcccgcgagccgcgagcugaaggugaccuucuuccccgaccucaacggcgacguggucgccaucgacuacaagcacuacaccccguccuucaagaagggcgccaagcugcugcacaagcccaucguguggcacgugaacaacgccaccaacaaggcgacguacaagcccaacaccuggugcauccggugccucuggagcaccaagcccgucgagaccuccaacagcuucgacgugcugaaguccgaggacgcccaggggauggacaaccuggccugcgaggaccucaagccggugagcgaggaggucguggagaaccccacgauccagaaggacgugcuggagugcaacgucaagaccaccgagguggugggcgacaucauccugaagcccgccaacaacucccucaagaucaccgaggaggucgggcacacggaccugauggccgcguacguggacaacagcucccugaccaucaagaagcccaacgagcucagccgcgugcugggccugaagacccucgccacccacgggcuggccgccgucaacuccgugccgugggacacgaucgccaacuacgcgaagcccuuccugaacaagguggucagcaccaccaccaacaucgugacgcgcugccucaaccgggugugcaccaacuacaugcccuacuucuucacccugcugcuccagcugugcaccuucacccgcuccacgaacagccggaucaaggccagcaugccgaccaccaucgccaagaacaccgucaaguccgugggcaaguucugccuggaggccagcuucaacuaccucaagucccccaacuucagcaagcugaucaacaucaucaucugguuccugcuccuguccgugugccugggcagccucaucuacuccacggccgcgcuggggguccugaugagcaaccucggcaugcccuccuacugcaccggguaccgcgagggcuaccugaacagcaccaacgugaccaucgccacguacugcaccggcuccauccccugcagcgugugccuguccgggcucgacagccuggacaccuacccgucccuggagaccauccagaucacgaucagcuccuucaagugggaccucaccgccuucggccuggucgccgagugguuccuggccuacauccucuucacccgguucuucuacgugcuggggcuggcggccaucaugcagcucuucuucagcuacuucgccgugcacuucaucuccaacagcuggcugauguggcugaucaucaaccugguccagauggcccccaucagcgcgauggugcgcauguacaucuucuucgccuccuucuacuacguguggaagagcuacguccacgugguggacggcugcaacuccagcaccugcaugaugugcuacaagcggaaccgcgccacgcgggucgagugcaccaccaucgugaacgggguccgccgguccuucuacguguacgccaacggcggcaagggguucugcaagcuccacaacuggaacugcgugaacugcgacaccuucugcgccggcagcacguucaucuccgacgaggucgcgcgcgaccugagccugcaguucaagcggcccaucaaccccaccgaccaguccagcuacaucguggacuccgugaccgucaagaacgggagcauccaccucuacuucgacaaggccggccagaagaccuacgagcgccacucccugagccacuucgugaacuucgacaaccugcgggccaacaacacgaaggggucccucccgaucaacgugaucgucuucgacggcaagagcaagugcgaggaguccagcgccaaguccgccagcguguacuacagccagcugaugugccagcccauccugcuccuggaccaggcgcugguguccgacgucggcgacagcgccgagguggccgugaagauguucgacgccuacgucaacaccuucuccagcaccuucaacgugcccauggagaagcucaagacccugguggccacggcggaggccgagcuggccaagaacgucucccucgacaacgugcugagcaccuucaucuccgccgcgcgccagggguucguggacagcgacgucgagaccaaggacgugguggagugccugaagcucucccaccagagcgacaucgaggucaccggcgacuccugcaacaacuacaugcugacguacaacaagguggagaacaugaccccccgggaccugggggccugcaucgacugcagcgcccgccacaucaacgcccagguggccaagucccacaacaucgcgcucaucuggaacgucaaggacuucaugagccuguccgagcagcugcggaagcagauccgcagcgccgccaagaagaacaaccucccguucaagcugaccugcgccaccacgcgccagguggugaacgucgugaccaccaagaucgcccugaagggcgggugaggacuagucccuguucccagagcccacuuuuuuuucuuuuuuugaaauaaaauagccugucuuucagaucucaaaggcucuuuucagagccaccaaaaaaaaaaaaaaaaaaaaaaaaaaaaaaaaaaaaaaaaaaaaaaaaaaaaaaaaaaaaaaaaaaaaaaaaaaaaaaaaaaaaaaaaaaaaaaaaaaaaa

SEQ ID NO: 19617 - RNA, 6113 nt, Artificial Sequence
  SARS-CoV-2__MT846513.1__non-structural protein 3 (NSP3) mRNA gc
aggagagucccgcagucggcguccagcggcucugcuuguucgugugugugucguugcaggccuuauucaagcuuaccauggcccccaccaaggugaccuucggcgacgacacggucaucgaggugcagggguacaagagcgugaacaucaccuucgagcuggacgagcgcaucgacaagguccucaacgagaagugcuccgccuacaccguggagcugggcaccgaggugaacgaguucgcgugcgucguggccgacgccgugaucaagacgcugcagccggucagcgagcuccugaccccccuggggaucgaccucgacgagugguccauggccaccuacuaccuguucgacgagagcggcgaguucaagcuggccucccacauguacugcagcuucuacccccccgacgaggacgaggaggagggggacugcgaggaggaggaguucgagccguccacccaguacgaguacggcacggaggacgacuaccagggcaagccccucgaguucggggcgaccagcgccgcccugcagcccgaggaggagcaggaggaggacuggcuggacgacgacucccagcagaccgugggccagcaggacgggagcgaggacaaccagaccacgaccauccagaccaucguggagguccagccccagcucgagauggagcugaccccgguggugcagacgaucgaggucaacuccuucagcggcuaccugaagcucaccgacaacguguacaucaagaacgccgacaucguggaggaggcgaagaaggucaagcccaccgugguggucaacgccgccaacguguaccugaagcacgggggcggcguggccggggcccugaacaaggcgaccaacaacgccaugcaggucgaguccgacgacuacaucgccacgaacggcccccucaagguggggggcagcugcguccuguccggccacaaccuggccaagcacugccuccacgugguggggcccaacgucaacaagggcgaggacauccagcugcugaagagcgccuacgagaacuucaaccagcacgaggugcuccuggcgccgcugcucuccgccgggaucuucggcgccgaccccauccacagccugcgggugugcgucgacaccgugcgcaccaacguguaccuggccgucuucgacaagaaccucuacgacaagcugguguccagcuuccuggagaugaagagcgagaagcagguggagcagaagaucgccgagauccccaaggaggaggucaagcccuucaucaccgaguccaagccgagcguggagcagcggaagcaggacgacaagaagaucaaggcgugcguggaggaggucacgaccacccucgaggagaccaaguuccugacggagaaccugcuccuguacaucgacaucaacgggaaccugcaccccgacuccgccacccucgugagcgacaucgacaucaccuuccugaagaaggacgcccccuacaucgugggcgacgucgugcaggagggcgugcugaccgccgucgugauccccacgaagaaggccgggggcaccaccgagaugcucgcgaaggcccugcgcaaggugccgaccgacaacuacaucacgaccuaccccgggcagggccugaacggguacaccgucgaggaggccaagaccgugcucaagaagugcaaguccgccuucuacauccugcccagcaucaucuccaacgagaagcaggagauccugggcaccgugagcuggaaccuccgggagaugcugacgcacgcggaggagacccgcaagcugaugcccgucugcguggagaccaaggccaucguguccaccauccagcggaaguacaagggcaucaagauccaggagggggucguggacuacggcgcccgcuucuacuucuacacgagcaagaccaccguggccucccugaucaacacccucaacgaccugaacgagacgcuggucaccaugccgcucggguacgugacccacggccugaaccuggaggaggccgcgcgguacaugcgcagccucaaggugcccgccaccgucuccgugagcucccccgacgccgugacggccuacaacggguaccugaccagcuccagcaagacccccgaggagcacuucaucgagaccaucucccuggccggcagcuacaaggacuggagcuacuccggccagagcacgcagcucgggaucgaguuccugaagcggggcgacaaguccgucuacuacaccagcaacccgaccaccuuccaccuggacggggaggugaucacguucgacaaccucaagacccugcugucccuccgcgaggugcggaccaucaaggucuucaccacgguggacaacaucaaccugcacacccagguggucgacaugagcaugaccuacggccagcaguucggccccaccuaccuggacggggcggacgugacgaagaucaagccccacaacucccacgagggcaagaccuucuacgugcucccgaacgacgacacccugcgcgucgaggccuucgaguacuaccacaccacggaccccagcuuccuggggcgguacauguccgcccucaaccacaccaagaaguggaaguacccccaggugaacggccugaccagcaucaagugggccgacaacaacugcuaccuggccaccgcgcuccugacgcugcagcagaucgagcucaaguucaaccccccggcccugcaggacgccuacuaccgcgcccgggcgggggaggccgccaacuucugcgcccugauccucgccuacugcaacaagaccgugggcgagcugggcgacguccgcgagaccauguccuaccuguuccagcacgcgaaccucgacagcugcaagcgggugcugaacgucgugugcaagaccugcgggcagcagcagaccacgcugaagggcguggaggccgucauguacauggggacccucuccuacgagcaguucaagaagggcgugcagauccccugcaccugcgggaagcaggccaccaaguaccuggugcagcaggagagccccuucgucaugauguccgcccccccggcccaguacgagcugaagcacggcacguucaccugcgcgagcgaguacaccggcaacuaccagugcgggcacuacaagcacaucaccuccaaggagacgcucuacugcaucgacggcgcccugcugaccaagagcagcgaguacaaggggcccaucaccgacguguucuacaaggagaacuccuacaccacgaccaucaagcccgugaccuacaagcucgacggcgucgugugcaccgagaucgaccccaagcuggacaacuacuacaagaaggacaacagcuacuucacggagcagccgaucgaccuggugcccaaccagcccuaccccaacgccuccuucgacaacuucaaguucgucugcgacaacaucaaguucgccgacgaccucaaccagcugaccggguacaagaagccggccagccgcgagcugaaggugaccuucuuccccgaccucaacggcgacguggucgcgaucgacuacaagcacuacacccccuccuucaagaagggcgccaagcugcugcacaagcccaucguguggcacgugaacaacgccacgaacaaggccaccuacaagccgaacaccuggugcauccggugccucuggagcaccaagcccgucgagacguccaacagcuucgacgugcugaaguccgaggacgcgcaggggauggacaaccuggccugcgaggaccucaagcccgugagcgaggaggucguggagaaccccaccauccagaaggacgugcuggagugcaacgucaagaccaccgagguggugggcgacaucauccugaagccggccaacaacucccucaagaucacggaggaggucgggcacaccgaccugauggccgccuacguggacaacagcucccugaccaucaagaagcccaacgagcucagccgcgugcugggccugaagacccucgcgacgcacgggcuggccgccgucaacuccgugcccugggacaccaucgccaacuacgccaagccguuccugaacaagguggucagcaccaccacgaacaucgugacccgcugccucaaccgggugugcaccaacuacaugcccuacuucuucacccugcugcuccagcugugcaccuucacgcgcuccaccaacagccggaucaaggcguccaugcccaccaccaucgccaagaacacggucaagagcgugggcaaguucugccuggaggccagcuucaacuaccucaagucccccaacuucagcaagcugaucaacaucaucaucugguuccugcuccuguccgugugccugggcagccucaucuacuccaccgccgcccuggggguccugaugagcaaccucggcaugccguccuacugcaccggguaccgcgagggcuaccugaacagcaccaacgugacgaucgcgaccuacugcaccggcuccauccccugcagcgugugccuguccgggcucgacagccuggacaccuaccccucccuggagacgauccagaucaccaucagcuccuucaagugggaccucaccgccuucggccuggucgccgagugguuccuggccuacauccucuucacccgguucuucuacgugcuggggcuggccgcgaucaugcagcucuucuucagcuacuucgccgugcacuucaucuccaacagcuggcugauguggcugaucaucaaccugguccagauggcccccaucuccgccauggugcgcauguacaucuucuucgcgagcuucuacuacguguggaagagcuacguccacgugguggacggcugcaacuccagcacgugcaugaugugcuacaagcggaaccgcgccacccgggucgagugcaccaccaucgugaacgggguccgccgguccuucuacguguacgccaacggcggcaagggguucugcaagcuccacaacuggaacugcgugaacugcgacacguucuacgccggcagcaccuucaucuccgacgaggucgcccgcgaccugagccugcaguucaagcggccgaucaaccccaccgaccaguccagcuacaucguggacuccgugaccgucaagaacgggagcauccaccucuacuucgacaaggcgggccagaagacguacgagcgccacucccugagccacuucgugaaccuggacaaccuccgggccaacaacaccaaggggucccugcccaucaacgugaucgucuucgacggcaagagcaagugcgaggaguccagcgccaaguccgccagcguguacuacucccagcugaugugccagcccauccuccugcuggaccaggcccucgugagcgacgucggcgacagcgcggagguggccgugaagauguucgacgccuacgucaacaccuucuccagcaccuucaacgugccgauggagaagcugaagacgcugguggccaccgccgaggcggagcucgccaagaacgucucccuggacaacgugcugagcaccuucaucuccgccgcccgccagggguucguggacagcgacgucgagaccaaggacgugguggagugccucaagcugucccaccagagcgacaucgaggucacgggcgacuccugcaacaacuacaugcugaccuacaacaagguggagaacaugaccccccgggaccucggggcgugcaucgacugcagcgcccgccacaucaacgcccagguggccaagucccacaacaucgcccugaucuggaacgucaaggacuucaugagccuguccgagcagcuccggaagcagauccgcagcgcggccaagaagaacaaccugcccuucaagcugaccugcgccacgacccgccagguggugaacgucgugaccaccaagaucgcccucaagggcgggugaggacuagucccuguucccagagcccacuuuuuuuucuuuuuuugaaauaaaauagccugucuuucagaucucaaaggcucuuuucagagccaccaaaaaaaaaaaaaaaaaaaaaaaaaaaaaaaaaaaaaaaaaaaaaaaaaaaaaaaaaaaaaaaaaaaaaaaaaaaaaaaaaaaaaaaaaaaaaaaaaaaaa

SEQ ID NO: 19618 - RNA, 6113 nt, Artificial Sequence
  SARS-CoV-2__MT846520.1__non-structural protein 3 (NSP3) mRNA gc
aggagagucccgcagucggcguccagcggcucugcuuguucgugugugugucguugcaggccuuauucaagcuuaccauggcccccaccaaggugaccuucggcgacgacacggucaucgaggugcagggguacaagagcgugaacaucaccuucgagcuggacgagcgcaucgacaagguccucaacgagaagugcuccgccuacaccguggagcugggcaccgaggugaacgaguucgcgugcgucguggccgacgccgugaucaagacgcugcagccggucagcgagcuccugaccccccuggggaucgaccucgacgagugguccauggccaccuacuaccuguucgacgagagcggcgaguucaagcuggccucccacauguacugcagcuucuacccccccgacgaggacgaggaggagggggacugcgaggaggaggaguucgagccguccacccaguacgaguacggcacggaggacgacuaccagggcaagccccucgaguucggggcgaccagcgccgcccugcagcccgaggaggagcaggaggaggacuggcuggacgacgacucccagcagaccgugggccagcaggacgggagcgaggacaaccagaccacgaccauccagaccaucguggagguccagccccagcucgagauggagcugaccccgguggugcagacgaucgaggucaacuccuucagcggcuaccugaagcucaccgacaacguguacaucaagaacgccgacaucguggaggaggcgaagaaggucaagcccaccgugguggucaacgccgccaacguguaccugaagcacgggggcggcguggccggggcccugaacaaggcgaccaacaacgccaugcaggucgaguccgacgacuacaucgccacgaacggcccccucaagguggggggcagcugcguccuguccggccacaaccuggccaagcacugccuccacgugguggggcccaacgucaacaagggcgaggacauccagcugcugaagagcgccuacgagaacuucaaccagcacgaggugcuccuggcgccgcugcucuccgccgggaucuucggcgccgaccccauccacagccugcgggugugcgucgacaccgugcgcaccaacguguaccuggccgucuucgacaagaaccucuacgacaagcugguguccagcuuccuggagaugaagagcgagaagcagguggagcagaagaucgccgagauccccaaggaggaggucaagcccuucaucaccgaguccaagccgagcguggagcagcggaagcaggacgacaagaagaucaaggcgugcguggaggaggucacgaccacccucgaggagaccaaguuccugacggagaaccugcuccuguacaucgacaucaacgggaaccugcaccccgacuccgccacccucgugagcgacaucgacaucaccuuccugaagaaggacgcccccuacaucgugggcgacgucgugcaggagggcgugcugaccgccgucgugauccccacgaagaaggccgggggcaccaccgagaugcucgcgaaggcccugcgcaaggugccgaccgacaacuacaucacgaccuaccccgggcagggccugaacggguacaccgucgaggaggccaagaccgugcucaagaagugcaaguccgccuucuacauccugcccagcaucaucuccaacgagaagcaggagauccugggcaccgugagcuggaaccuccgggagaugcuggcgcacgccgaggagacgcgcaagcugaugcccgucugcguggagaccaaggccaucguguccaccauccagcggaaguacaagggcaucaagauccaggagggggucguggacuacggcgcccgcuucuacuucuacaccagcaagacgaccguggccucccugaucaacacccucaacgaccugaacgagacccuggucacgaugccgcucggguacgugacccacggccugaaccuggaggaggcggcccgguacaugcgcagccucaaggugcccgccaccgucuccgugagcucccccgacgccgugaccgccuacaacggguaccugacgagcuccagcaagacccccgaggagcacuucaucgagaccaucucccuggcgggcagcuacaaggacuggagcuacuccggccagagcacccagcucgggaucgaguuccugaagcggggcgacaaguccgucuacuacacgagcaacccgaccaccuuccaccuggacggggaggugaucaccuucgacaaccucaagacgcugcugucccuccgcgaggugcggaccaucaaggucuucaccaccguggacaacaucaaccugcacacgcagguggucgacaugagcaugaccuacggccagcaguucggccccaccuaccuggacggggccgacgugaccaagaucaagccccacaacucccacgagggcaagacguucuacgugcucccgaacgacgacacccugcgcgucgaggccuucgaguacuaccacaccaccgaccccagcuuccuggggcgguacauguccgcccucaaccacacgaagaaguggaaguacccccaggugaacggccugaccagcaucaagugggccgacaacaacugcuaccuggcgaccgcccuccugacccugcagcagaucgagcucaaguucaaccccccggcccugcaggacgccuacuaccgcgcgcgggccggggaggccgccaacuucugcgcccugauccucgcguacugcaacaagacggugggcgagcugggcgacguccgcgagaccauguccuaccuguuccagcacgccaaccucgacagcugcaagcgggugcugaacgucgugugcaagaccugcgggcagcagcagaccacccugaagggcguggaggccgucauguacauggggacgcucuccuacgagcaguucaagaagggcgugcagauccccugcaccugcgggaagcaggccaccaaguaccuggugcagcaggagagccccuucgucaugauguccgcccccccggcgcaguacgagcugaagcacggcaccuucacgugcgccagcgaguacaccggcaacuaccagugcgggcacuacaagcacaucaccuccaaggagacccucuacugcaucgacggcgcccugcugacgaagagcagcgaguacaaggggcccaucaccgacguguucuacaaggagaacuccuacaccaccacgaucaagcccgugaccuacaagcucgacggcgucgugugcaccgagaucgaccccaagcuggacaacuacuacaagaaggacaacagcuacuucaccgagcagccgaucgaccuggugcccaaccagcccuaccccaacgccuccuucgacaacuucaaguucgucugcgacaacaucaaguucgccgacgaccucaaccagcugacgggguacaagaagccggcgagccgcgagcugaaggugaccuucuuccccgaccucaacggcgacguggucgccaucgacuacaagcacuacacccccuccuucaagaagggcgccaagcugcugcacaagcccaucguguggcacgugaacaacgccaccaacaaggcgacguacaagccgaacaccuggugcauccggugccucuggagcaccaagcccgucgagaccuccaacagcuucgacgugcugaaguccgaggacgcccaggggauggacaaccuggccugcgaggaccucaagcccgugagcgaggaggucguggagaaccccacgauccagaaggacgugcuggagugcaacgucaagaccaccgagguggugggcgacaucauccugaagccggccaacaacucccucaagaucaccgaggaggucgggcacacggaccugauggccgcguacguggacaacagcucccugaccaucaagaagcccaacgagcucagccgcgugcugggccugaagacccucgccacccacgggcuggccgccgucaacuccgugcccugggacacgaucgccaacuacgcgaagccguuccugaacaagguggucagcaccaccaccaacaucgugacgcgcugccucaaccgggugugcaccaacuacaugcccuacuucuucacccugcugcuccagcugugcaccuucacccgcuccacgaacagccggaucaaggccuccaugcccaccaccaucgucaagaacaccgugaagagcgugggcaaguucugccuggaggccagcuucaacuaccucaagucccccaacuucagcaagcugaucaacaucaucaucugguuccugcuccuguccgucugccugggcagccucaucuacuccacggccgcccugggggugcugaugagcaaccucggcaugccguccuacugcaccggguaccgcgagggcuaccugaacagcaccaacgugaccaucgcgacguacugcaccggcuccauccccugcagcgucugccuguccgggcucgacagccuggacaccuaccccucccuggagaccauccagaucacgaucagcuccuucaagugggaccucaccgccuucggccugguggccgagugguuccuggccuacauccucuucacccgguucuucuacgugcuggggcuggccgcgaucaugcagcucuucuucagcuacuucgccguccacuucaucuccaacagcuggcugauguggcugaucaucaaccuggugcagauggcccccaucuccgccauggugcgcauguacaucuucuucgcgagcuucuacuacgucuggaagagcuacgugcacguggucgacggcugcaacuccagcaccugcaugaugugcuacaagcggaaccgcgccacgcggguggagugcaccaccaucgucaacggggugcgccgguccuucuacguguacgccaacggcggcaagggguucugcaagcuccacaacuggaacugcgucaacugcgacaccuucugcgccggcagcacguucaucuccgacgagguggcccgcgaccugagccugcaguucaagcggccgaucaaccccaccgaccaguccagcuacaucguggacuccgucaccgugaagaacgggagcauccaccucuacuucgacaaggcgggccagaagaccuacgagcgccacucccugagccacuucgugaaccuggacaaccuccgggccaacaacacgaaggggucccugcccaucaacgucaucguguucgacggcaagagcaagugcgaggaguccagcgccaaguccgccagcguguacuacucccagcugaugugccagcccauccuccugcuggaccaggcccucgucagcgacgugggcgacagcgcggagguggccgucaagauguucgacgccuacgugaacaccuucuccagcaccuucaacgugccgauggagaagcugaagacccuggucgccacggccgaggcggagcucgccaagaacgugucccuggacaacgugcugagcaccuucaucuccgccgcccgccagggguucgucgacagcgacguggagaccaaggacguggucgagugccucaagcugucccaccagagcgacaucgaggugaccggcgacuccugcaacaacuacaugcugacguacaacaagguggagaacaugaccccccgggaccucggggcgugcaucgacugcagcgcccgccacaucaacgcccaggucgccaagucccacaacaucgcccugaucuggaacgugaaggacuucaugagccuguccgagcagcuccggaagcagauccgcagcgcggccaagaagaacaaccugcccuucaagcugaccugcgccaccacgcgccagguggucaacguggugaccaccaagaucgcccucaagggcgggugaggacuagucccuguucccagagcccacuuuuuuuucuuuuuuugaaauaaaauagccugucuuucagaucucaaaggcucuuuucagagccaccaaaaaaaaaaaaaaaaaaaaaaaaaaaaaaaaaaaaaaaaaaaaaaaaaaaaaaaaaaaaaaaaaaaaaaaaaaaaaaaaaaaaaaaaaaaaaaaaaaaaa

SEQ ID NO: 19619 - RNA, 6113 nt, Artificial Sequence
  SARS-CoV-2__MT846521.1__non-structural protein 3 (NSP3) mRNA gc
aggagagucccgcagucggcguccagcggcucugcuuguucgugugugugucguugcaggccuuauucaagcuuaccauggcccccaccaaggugaccuucggcgacgacacggucaucgaggugcagggguacaagagcgugaacaucaccuucgagcuggacgagcgcaucgacaagguccucaacgagaagugcuccgccuacaccguggagcugggcaccgaggugaacgaguucgcgugcgucguggccgacgccgugaucaagacgcugcagccggucagcgagcuccugaccccccuggggaucgaccucgacgagugguccauggccaccuacuaccuguucgacgagagcggcgaguucaagcuggccucccacauguacugcagcuucuacccccccgacgaggacgaggaggagggggacugcgaggaggaggaguucgagccguccacccaguacgaguacggcacggaggacgacuaccagggcaagccccucgaguucggggcgaccagcgccgcccugcagcccgaggaggagcaggaggaggacuggcuggacgacgacucccagcagaccgugggccagcaggacgggagcgaggacaaccagaccacgaccauccagaccaucguggagguccagccccagcucgagauggagcugaccccgguggugcagacgaucgaggucaacuccuucagcggcuaccugaagcucaccgacaacguguacaucaagaacgccgacaucguggaggaggcgaagaaggucaagcccaccgugguggucaacgccgccaacguguaccugaagcacgggggcggcguggccggggcccugaacaaggcgaccaacaacgccaugcaggucgaguccgacgacuacaucgccacgaacggcccccucaagguggggggcagcugcguccuguccggccacaaccuggccaagcacugccuccacgugguggggcccaacgucaacaagggcgaggacauccagcugcugaagagcgccuacgagaacuucaaccagcacgaggugcuccuggcgccgcugcucuccgccgggaucuucggcgccgaccccauccacagccugcgggugugcgucgacaccgugcgcaccaacguguaccuggccgucuucgacaagaaccucuacgacaagcugguguccagcuuccuggagaugaagagcgagaagcagguggagcagaagaucgccgagauccccaaggaggaggucaagcccuucaucaccgaguccaagccgagcguggagcagcggaagcaggacgacaagaagaucaaggcgugcguggaggaggucacgaccacccucgaggagaccaaguuccugacggagaaccugcuccuguacaucgacaucaacgggaaccugcaccccgacuccgccacccucgugagcgacaucgacaucaccuuccugaagaaggacgcccccuacaucgugggcgacgucgugcaggagggcgugcugaccgccgucgugauccccacgaagaaggccgggggcaccaccgagaugcucgcgaaggcccugcgcaaggugccgaccgacaacuacaucacgaccuaccccgggcagggccugaacggguacaccgucgaggaggccaagaccgugcucaagaagugcaaguccgccuucuacauccugcccagcaucaucuccaacgagaagcaggagauccugggcaccgugagcuggaaccuccgggagaugcugacgcacgcggaggagacccgcaagcugaugcccgucugcguggagaccaaggccaucguguccaccauccagcggaaguacaagggcaucaagauccaggagggggucguggacuacggcgcccgcuucuacuucuacacgagcaagaccaccguggccucccugaucaacacccucaacgaccugaacgagacgcuggucaccaugccgcucggguacgugacccacggccugaaccuggaggaggccgcgcgguacaugcgcagccucaaggugcccgccaccgucuccgugagcucccccgacgccgugacggccuacaacggguaccugaccagcuccagcaagacccccgaggagcacuucaucgagaccaucucccuggccggcagcuacaaggacuggagcuacuccggccagagcacgcagcucgggaucgaguuccugaagcggggcgacaaguccgucuacuacaccagcaacccgaccaccuuccaccuggacggggaggugaucacguucgacaaccucaagaccauccugucccugcgcgaggugcggaccaucaaggucuucaccacgguggacaacaucaaccuccacacccagguggucgacaugagcaugaccuacggccagcaguucggccccaccuaccuggacggggcggacgugacgaagaucaagccccacaacucccacgagggcaagaccuucuacgugcugccgaacgacgacacccuccgcgucgaggccuucgaguacuaccacaccacggaccccagcuuccuggggcgguacauguccgcccugaaccacaccaagaaguggaaguacccccaggugaacggccucaccagcaucaagugggccgacaacaacugcuaccuggccaccgcgcugcucacgcugcagcagaucgagcugaaguucaaccccccggcccuccaggacgccuacuaccgcgcccgggcgggggaggccgccaacuucugcgcccugauccuggccuacugcaacaagaccgugggcgagcucggcgacguccgcgagaccauguccuaccuguuccagcacgcgaaccuggacagcugcaagcgggugcucaacgucgugugcaagaccugcgggcagcagcagaccacgcugaagggcguggaggccgucauguacauggggacccuguccuacgagcaguucaagaagggcgugcagauccccugcaccugcgggaagcaggccaccaaguaccucgugcagcaggagagccccuucgucaugauguccgcccccccggcccaguacgagcugaagcacggcacguucaccugcgcgagcgaguacaccggcaacuaccagugcgggcacuacaagcacaucaccuccaaggagacgcuguacugcaucgacggcgcccuccugaccaagagcagcgaguacaaggggcccaucaccgacguguucuacaaggagaacuccuacaccacgaccaucaagcccgugaccuacaagcuggacggcgucgugugcaccgagaucgaccccaagcucgacaacuacuacaagaaggacaacagcuacuucacggagcagccgaucgaccuggugcccaaccagcccuaccccaacgccuccuucgacaacuucaaguucgucugcgacaacaucaaguucgccgacgaccugaaccagcucaccggguacaagaagccggccagccgcgagcugaaggugaccuucuuccccgaccugaacggcgacguggucgcgaucgacuacaagcacuacacccccuccuucaagaagggcgccaagcuccugcacaagcccaucguguggcacgugaacaacgccacgaacaaggccaccuacaagccgaacaccuggugcauccggugccuguggagcaccaagcccgucgagacguccaacagcuucgacgugcucaaguccgaggacgcgcaggggauggacaaccuggccugcgaggaccugaagcccgugagcgaggaggucguggagaaccccaccauccagaaggacgugcucgagugcaacgucaagaccaccgagguggugggcgacaucauccugaagccggccaacaacucccugaagaucacggaggaggucgggcacaccgaccucauggccgccuacguggacaacagcucccugaccaucaagaagcccaacgagcugagccgcgugcucggccugaagacccuggcgacgcacgggcucgccgccgucaacuccgugcccugggacaccaucgccaacuacgccaagccguuccugaacaagguggucagcaccaccacgaacaucgugacccgcugccugaaccgggugugcaccaacuacaugcccuacuucuucacccuccugcugcagcucugcaccuucacgcgcuccaccaacagccggaucaaggcguccaugcccaccaccaucgccaagaacacggucaagagcgugggcaaguucugccuggaggccagcuucaacuaccugaagucccccaacuucagcaagcucaucaacaucaucaucugguuccugcugcucuccgugugccugggcagccugaucuacuccaccgccgcccucgggguccugaugagcaaccugggcaugccguccuacugcaccggguaccgcgagggcuaccucaacagcaccaacgugacgaucgcgaccuacugcaccggcuccauccccugcagcgugugccuguccgggcuggacagccucgacaccuaccccucccuggagacgauccagaucaccaucagcuccuucaagugggaccugaccgccuucggccucgucgccgagugguuccuggccuacauccuguucacccgguucuucuacgugcucgggcuggccgcgaucaugcagcuguucuucagcuacuucgccgugcacuucaucuccaacagcuggcucauguggcugaucaucaaccugguccagauggcccccaucuccgccauggugcgcauguacaucuucuucgcgagcuucuacuacguguggaagagcuacguccacgugguggacggcugcaacuccagcacgugcaugaugugcuacaagcggaaccgcgccacccgggucgagugcaccaccaucgugaacgggguccgccgguccuucuacguguacgccaacggcggcaagggguucugcaagcugcacaacuggaacugcgugaacugcgacacguucugcgccggcagcaccuucaucuccgacgaggucgcccgcgaccucagccugcaguucaagcggccgaucaaccccaccgaccaguccagcuacaucguggacuccgugaccgucaagaacgggagcauccaccuguacuucgacaaggcgggccagaagacguacgagcgccacucccucagccacuucgugaaccuggacaaccugcgggccaacaacaccaaggggucccuccccaucaacgugaucgucuucgacggcaagagcaagugcgaggaguccagcgccaaguccgccagcguguacuacucccagcugaugugccagcccauccugcuccuggaccaggcccuggugagcgacgucggcgacagcgcggagguggccgugaagauguucgacgccuacgucaacaccuucuccagcaccuucaacgugccgauggagaagcucaagacgcugguggccaccgccgaggcggagcuggccaagaacgucucccucgacaacgugcugagcaccuucaucuccgccgcccgccagggguucguggacagcgacgucgagaccaaggacgugguggagugccugaagcucucccaccagagcgacaucgaggucacgggcgacuccugcaacaacuacaugcugaccuacaacaagguggagaacaugaccccccgggaccugggggcgugcaucgacugcagcgcccgccacaucaacgcccagguggccaagucccacaacaucgcccucaucuggaacgucaaggacuucaugagccuguccgagcagcugcggaagcagauccgcagcgcggccaagaagaacaaccuccccuucaagcugaccugcgccacgacccgccagguggugaacgucgugaccaccaagaucgcccugaagggcgggugaggacuagucccuguucccagagcccacuuuuuuuucuuuuuuugaaauaaaauagccugucuuucagaucucaaaggcucuuuucagagccaccaaaaaaaaaaaaaaaaaaaaaaaaaaaaaaaaaaaaaaaaaaaaaaaaaaaaaaaaaaaaaaaaaaaaaaaaaaaaaaaaaaaaaaaaaaaaaaaaaaaaa

SEQ ID NO: 19620 - RNA, 6113 nt, Artificial Sequence
  SARS-CoV-2__MT846527.1__non-structural protein 3 (NSP3) mRNA gc
aggagagucccgcagucggcguccagcggcucugcuuguucgugugugugucguugcaggccuuauucaagcuuaccauggcccccaccaaggugaccuucggcgacgacacggucaucgaggugcagggguacaagagcgugaacaucaccuucgagcuggacgagcgcaucgacaagguccucaacgagaagugcuccgccuacaccguggagcugggcaccgaggugaacgaguucgcgugcgucgugguggacgccgucaucaagacgcugcagccggugagcgagcuccugaccccccuggggaucgaccucgacgagugguccauggccaccuacuaccuguucgacgagagcggcgaguucaagcuggccucccacauguacugcagcuucuacccccccgacgaggacgaggaggagggggacugcgaggaggaggaguucgagccguccacccaguacgaguacggcacggaggacgacuaccagggcaagccccucgaguucggggccaccagcgcggcccugcagcccgaggaggagcaggaggaggacuggcuggacgacgacucccagcagaccgugggccagcaggacgggagcgaggacaaccagaccacgaccauccagaccaucgucgaggugcagccccagcucgagauggagcugaccccggugguccagacgaucgaggugaacuccuucagcggcuaccugaagcucaccgacaacguguacaucaagaacgccgacaucgucgaggaggccaagaaggugaagcccaccguggucgugaacgcggccaacguguaccugaagcacgggggcggcgucgccggggcccugaacaaggccaccaacaacgcgaugcagguggaguccgacgacuacaucgccacgaacggcccccucaaggucgggggcagcugcgugcuguccggccacaaccuggccaagcacugccuccacguggucgggcccaacgugaacaagggcgaggacauccagcugcugaagagcgccuacgagaacuucaaccagcacgaggugcuccuggccccgcugcucuccgcggggaucuucggcgccgaccccauccacagccugcgggucugcguggacaccgugcgcaccaacgucuaccuggccguguucgacaagaaccucuacgacaagcugguguccagcuuccuggagaugaagagcgagaagcaggucgagcagaagaucgccgagauccccaaggaggaggugaagcccuucaucaccgaguccaagccgagcguggagcagcggaagcaggacgacaagaagaucaaggccugcgucgaggaggugacgaccacccucgaggagaccaaguuccugacggagaaccugcuccuguacaucgacaucaacgggaaccugcaccccgacuccgcgacccucgugagcgacaucgacaucaccuuccugaagaaggacgcccccuacaucgucggcgacguggugcaggagggcguccugaccgccguggugauccccacgaagaaggccgggggcaccaccgagaugcucgccaaggcgcugcgcaaggucccgaccgacaacuacaucacgaccuaccccgggcagggccugaacggguacaccguggaggaggccaagaccgugcucaagaagugcaaguccgccuucuacauccugcccagcaucaucuccaacgagaagcaggagauccugggcaccgucagcuggaaccuccgggagaugcuggcccacgcggaggagacgcgcaagcugaugcccgugugcguggagaccaaggccaucgucuccaccauccagcggaaguacaagggcaucaagauccaggagggggugguggacuacggcgcccgcuucuacuucuacaccagcaagacgaccgucgccucccugaucaacacccucaacgaccugaacgagacccuggugacgaugccgcucggguacgugacccacggccugaaccuggaggaggccgcgcgguacaugcgcagccucaagguccccgccaccguguccgugagcucccccgacgccgucaccgccuacaacggguaccugacgagcuccagcaagacccccgaggagcacuucaucgagaccaucucccuggccggcagcuacaaggacuggagcuacuccggccagagcacccagcucgggaucgaguuccugaagcggggcgacaaguccguguacuacacgagcaacccgaccaccuuccaccuggacggggaggugaucaccuucgacaaccucaagacgcugcugucccuccgcgagguccggaccaucaagguguucaccaccguggacaacaucaaccugcacacgcaggucguggacaugagcaugaccuacggccagcaguucggccccaccuaccuggacggggcggacgugaccaagaucaagccccacaacucccacgagggcaagacguucuacguccucccgaacgacgacacccugcgcguggaggccuucgaguacuaccacaccaccgaccccagcuuccuggggcgguacauguccgcccucaaccacacgaagaaguggaaguacccccaggugaacggccugaccagcaucaagugggccgacaacaacugcuaccuggccaccgcgcuccugacccugcagcagaucgagcucaaguucaaccccccggcccugcaggacgccuacuaccgcgcccgggcgggggaggccgccaacuucugcgcccugauccucgccuacugcaacaagacggucggcgagcugggcgacgugcgcgagaccauguccuaccuguuccagcacgcgaaccucgacagcugcaagcggguccugaacguggugugcaagaccugcgggcagcagcagaccacccugaagggcgucgaggccgugauguacauggggacgcucuccuacgagcaguucaagaagggcgugcagauccccugcaccugcgggaagcaggccaccaaguaccugguccagcaggagagccccuucgugaugauguccgcccccccggcccaguacgagcugaagcacggcaccuucacgugcgcgagcgaguacaccggcaacuaccagugcgggcacuacaagcacaucaccuccaaggagacccucuacugcaucgacggcgcccugcugacgaagagcagcgaguacaaggggcccaucaccgacguguucuacaaggagaacuccuacaccaccacgaucaagcccgucaccuacaagcucgacggcguggugugcaccgagaucgaccccaagcuggacaacuacuacaagaaggacaacagcuacuucaccgagcagccgaucgaccugguccccaaccagcccuaccccaacgccuccuucgacaacuucaaguucgugugcgacaacaucaaguucgccgacgaccucaaccagcugacgggguacaagaagccggccagccgcgagcugaaggugaccuucuuccccgaccucaacggcgacgucguggcgaucgacuacaagcacuacacccccuccuucaagaagggcgccaagcugcugcacaagcccaucguguggcacgucaacaacgccaccaacaaggccacguacaagccgaacaccuggugcauccggugccucuggagcaccaagcccguggagaccuccaacagcuucgacgugcugaaguccgaggacgcgcaggggauggacaaccuggccugcgaggaccucaagcccgucagcgaggaggugguggagaaccccacgauccagaaggacguccuggagugcaacgugaagaccaccgagguggucggcgacaucauccugaagccggccaacaacucccucaagaucaccgaggagguggggcacacggaccugauggccgccuacguggacaacagcucccugaccaucaagaagcccaacgagcucagccgcguccugggccugaagacccucgcgacccacgggcuggccgccgugaacuccgugcccugggacacgaucgccaacuacgccaagccguuccugaacaaggucgugagcaccaccaccaacaucgugacgcgcugccucaaccgggucugcaccaacuacaugcccuacuucuucacccugcugcuccagcugugcaccuucacccgcuccacgaacagccggaucaaggcguccaugcccaccaccaucgccaagaacaccgugaagagcgugggcaaguucugccuggaggccagcuucaacuaccucaagucccccaacuucagcaagcugaucaacaucaucaucugguuccugcuccuguccgucugccugggcagccucaucuacuccacggccgcccugggggugcugaugagcaaccucggcaugccguccuacugcaccggguaccgcgagggcuaccugaacagcaccaacgugaccaucgcgacguacugcaccggcuccauccccugcagcgucugccuguccgggcucgacagccuggacaccuaccccucccuggagaccauccagaucacgaucagcuccuucaagugggaccucaccgccuucggccugguggccgagugguuccuggccuacauccucuucacccgguucuucuacgugcuggggcuggccgcgaucaugcagcucuucuucagcuacuucgccguccacuucaucuccaacagcuggcugauguggcugaucaucaaccuggugcagauggcccccaucuccgccauggugcgcauguacaucuucuucgcgagcuucuacuacgucuggaagagcuacgugcacguggucgacggcugcaacuccagcaccugcaugaugugcuacaagcggaaccgcgccacgcggguggagugcaccaccaucgucaacggggugcgccgguccuucuacguguacgccaacggcggcaagggguucugcaagcuccacaacuggaacugcgucaacugcgacaccuucugcgccggcagcacguucaucuccgacgagguggcccgcgaccugagccugcaguucaagcggccgaucaaccccaccgaccaguccagcuacaucguggacuccgucaccgugaagaacgggagcauccaccucuacuucgacaaggcgggccagaagaccuacgagcgccacucccugagccacuucgugaaccuggacaaccuccgggccaacaacacgaaggggucccugcccaucaacgucaucguguucgacggcaagagcaagugcgaggaguccagcgccaaguccgccagcguguacuacucccagcugaugugccagcccauccuccugcuggaccaggcccucgucagcgacgugggcgacagcgcggagguggccgucaagauguucgacgccuacgugaacaccuucuccagcaccuucaacgugccgauggagaagcugaagacccuggucgccacggccgaggcggagcucgccaagaacgugucccuggacaacgugcugagcaccuucaucuccgccgcccgccagggguucgucgacagcgacguggagaccaaggacguggucgagugccucaagcugucccaccagagcgacaucgaggugaccggcgacuccugcaacaacuacaugcugacguacaacaagguggagaacaugaccccccgggaccucggggcgugcaucgacugcagcgcccgccacaucaacgcccaggucgccaagucccacaacaucgcccugaucuggaacgugaaggacuucaugagccuguccgagcagcuccggaagcagauccgcagcgcggccaagaagaacaaccugcccuucaagcugaccugcgccaccacgcgccagguggucaacguggugaccaccaagaucgcccucaagggcgggugaggacuagucccuguucccagagcccacuuuuuuuucuuuuuuugaaauaaaauagccugucuuucagaucucaaaggcucuuuucagagccaccaaaaaaaaaaaaaaaaaaaaaaaaaaaaaaaaaaaaaaaaaaaaaaaaaaaaaaaaaaaaaaaaaaaaaaaaaaaaaaaaaaaaaaaaaaaaaaaaaaaaa

SEQ ID NO: 19621 - RNA, 6113 nt, Artificial Sequence
  SARS-CoV-2__MT846547.1__non-structural protein 3 (NSP3) mRNA gc
aggagagucccgcagucggcguccagcggcucugcuuguucgugugugugucguugcaggccuuauucaagcuuaccauggcccccaccaaggugaccuucggcgacgacacggucaucgaggugcagggguacaagagcgugaacaucaccuucgagcuggacgagcgcaucgacaagguccucaacgagaagugcuccgccuacaccguggagcugggcaccgaggugaacgaguucgcgugcgucguggccgacgccgugaucaagacgcugcagccggucagcgagcuccugaccucccuggggaucgaccucgacgaguggagcauggccaccuacuaccuguucgacgaguccggcgaguucaagcuggccagccacauguacugcuccuucuacccccccgacgaggacgaggaggagggggacugcgaggaggaggaguucgagcccagcacccaguacgaguacggcacggaggacgacuaccagggcaagccgcucgaguucggggcgaccuccgccgcccugcagcccgaggaggagcaggaggaggacuggcuggacgacgacagccagcagaccgugggccagcaggacggguccgaggacaaccagaccacgaccauccagaccaucguggagguccagccccagcucgagauggagcugacccccguggugcagacgaucgaggucaacagcuucuccggcuaccugaagcucaccgacaacguguacaucaagaacgccgacaucguggaggaggcgaagaaggucaagccgaccgugguggucaacgccgccaacguguaccugaagcacgggggcggcguggccggggcccugaacaaggcgaccaacaacgccaugcaggucgagagcgacgacuacaucgccacgaacggcccccucaagguggggggcuccugcguccugagcggccacaaccuggccaagcacugccuccacgugguggggcccaacgucaacaagggcgaggacauccagcugcugaaguccgccuacgagaacuucaaccagcacgaggugcuccuggcgccccugcucagcgccgggaucuucggcgccgacccgauccacucccugcgggugugcgucgacaccgugcgcaccaacguguaccuggccgucuucgacaagaaccucuacgacaagcuggugagcagcuuccuggagaugaaguccgagaagcagguggagcagaagaucgccgagauccccaaggaggaggucaagcccuucaucaccgagagcaagcccuccguggagcagcggaagcaggacgacaagaagaucaaggcgugcguggaggaggucacgaccacccucgaggagaccaaguuccugacggagaaccugcuccuguacaucgacaucaacgggaaccugcacccggacagcgccacccucguguccgacaucgacaucaccuuccugaagaaggacgugcccuacaucgucggcgacguggugcaggagggcguccugaccgccguggugauccccacgaagaaggccgggggcaccaccgagaugcucgccaaggcgcugcgcaagguccccaccgacaacuacaucacgaccuacccggggcagggccugaacggguacaccguggaggaggccaagaccgugcucaagaagugcaagagcgccuucuacauccugcccuccaucaucagcaacgagaagcaggagauccugggcaccgucuccuggaaccuccgggagaugcuggcccacgcggaggagacgcgcaagcugaugcccgugugcguggagaccaaggccaucgucagcaccauccagcggaaguacaagggcaucaagauccaggagggggugguggacuacggcgcccgcuucuacuucuacaccuccaagacgaccgucgccagccugaucaacacccucaacgaccugaacgagacccuggugacgaugccccucggguacgugacccacggccugaaccuggaggaggccgcgcgguacaugcgcucccucaaggucccggccaccgugagcguguccagccccgacgccgucaccgccuacaacggguaccugacguccagcuccaagacccccgaggagcacuucaucgagaccaucagccuggccggcagcuacaaggacugguccuacagcggccaguccacccagcucgggaucgaguuccugaagcggggcgacaagagcguguacuacacguccaaccccaccaccuuccaccuggacggggaggugaucaccuucgacaaccucaagacgcugcuggcgcuccgcgagguccggaccaucaagguguucaccaccguggacaacaucaaccugcacacgcaggucguggacaugagcaugaccuacggccagcaguucggcccgaccuaccuggacggggccgacgugaccaagaucaagccccacaacucccacgagggcaagacguucuacguccuccccaacgacgacacccugcgcguggaggccuucgaguacuaccacaccaccgacccgagcuuccuggggcgguacauguccgcccucaaccacacgaagaaguggaaguacccccaggugaacggccugaccagcaucaagugggccgacaacaacugcuaccuggcgaccgcccuccugacccugcagcagaucgagcucaaguucaacccccccgcccugcaggacgccuacuaccgcgcgcgggccggggaggccgccaacuucugcgcccugauccucgcguacugcaacaagacggucggcgagcugggcgacgugcgcgagaccauguccuaccuguuccagcacgccaaccucgacagcugcaagcggguccugaacguggugugcaagaccugcgggcagcagcagaccacccugaagggcgucgaggccgugauguacauggggacgcucuccuacgagcaguucaagaagggcgugcagaucccgugcaccugcgggaagcaggccaccaaguaccugguccagcaggagagccccuucgugaugauguccgccccccccgcgcaguacgagcugaagcacggcaccuucacgugcgccagcgaguacaccggcaacuaccagugcgggcacuacaagcacaucaccuccaaggagacccucuacugcaucgacggcgcccugcugacgaagagcagcgaguacaaggggccgaucaccgacguguucuacaaggagaacuccuacaccaccacgaucaagcccgucaccuacaagcucgacggcguggugugcaccgagaucgaccccaagcuggacaacuacuacaagaaggacaacagcuacuucaccgagcagcccaucgaccuggucccgaaccagcccuaccccaacgccuccuucgacaacuucaaguucgugugcgacaacaucaaguucgccgacgaccucaaccagcugacgggguacaagaagcccgcgagccgcgagcugaaggugaccuucuucccggaccucaacggcgacgucguggccaucgacuacaagcacuacacccccuccuucaagaagggcgccaagcugcugcacaagcccaucguguggcacgucaacaacgccaccaacaaggcgacguacaagcccaacaccuggugcauccggugccucuggagcaccaagccgguggagaccuccaacagcuucgacgugcugaaguccgaggacgcccaggggauggacaaccuggccugcgaggaccucaagcccgucagcgaggaggugguggagaaccccacgauccagaaggacguccuggagugcaacgugaagaccaccgagguggucggcgacaucauccugaagcccgccaacaacucccucaagaucaccgaggagguggggcacacggaccugauggccgcguacguggacaacagcucccugaccaucaagaagccgaacgagcucagccgcguccugggccugaagacccucgccacccacgggcuggccgccgugaacuccgugcccugggacacgaucgccaacuacgcgaagcccuuccugaacaaggucgugagcaccaccaccaacaucgugacgcgcugccucaaccgggucugcaccaacuacaugccguacuucuucacccugcugcuccagcugugcaccuucacccgcuccacgaacagccggaucaaggccuccaugcccaccaccaucgccaagaacaccgugaagagcgugggcaaguucugccuggaggccagcuucaacuaccucaagucccccaacuucagcaagcugaucaacaucaucaucugguuccugcuccuguccgucugccugggcagccucaucuacuccacggccgcgcugggggugcugaugagcaaccucggcaugcccuccuacugcaccggguaccgcgagggcuaccugaacagcaccaacgugaccaucgccaucuacugcacgggcuccaucccgugcagcgucugccuguccgggcucgacagccuggacaccuaccccucccuggagaccauccagaucaccaucagcuccuucaagugggaccucacggccuucggccugguggccgagugguuccuggccuacauccucuucacccgguucuucuacgugcuggggcuggcggccaucaugcagcucuucuucagcuacuucgccguccacuucaucuccaacagcuggcugauguggcugaucaucaaccuggugcagauggcccccaucuccgcgauggugcgcauguacaucuucuucgccagcuucuacuacgucuggaagagcuacgugcacguggucgacggcugcaacuccagcaccugcaugaugugcuacaagcggaaccgcgccacccggguggagugcacgaccaucgucaacggggugcgccgguccuucuacguguacgccaacggcggcaagggguucugcaagcuccacaacuggaacugcgucaacugcgacaccuucugcgccggcagcaccuucaucuccgacgagguggcgcgcgaccugagccugcaguucaagcggcccaucaacccgacggaccaguccagcuacaucguggacuccgucaccgugaagaacgggagcauccaccucuacuucgacaaggccggccagaagaccuacgagcgccacucccugagccacuucgugaaccuggacaaccuccgggccaacaacaccaaggggucccugcccaucaacgucaucguguucgacggcaagagcaagugcgaggaguccagcgccaaguccgccagcguguacuacucccagcugaugugccagcccauccuccugcuggaccaggcgcucgucagcgacgugggcgacagcgccgagguggccgucaagauguucgacgccuacgugaacacguucuccagcaccuucaacgugcccauggagaagcugaagacccuggucgccaccgcggaggccgagcucgccaagaacgugucccuggacaacgugcugagcacguucaucuccgccgcgcgccagggguucgucgacagcgacguggagaccaaggacguggucgagugccucaagcugucccaccagagcgacaucgaggugaccggcgacuccugcaacaacuacaugcugaccuacaacaagguggagaacaugacgccgcgggaccucggggccugcaucgacugcagcgcccgccacaucaacgcccaggucgccaagucccacaacaucgcgcugaucuggaacgugaaggacuucaugagccuguccgagcagcuccggaagcagauccgcagcgccgccaagaagaacaaccugcccuucaagcugaccugcgccaccacccgccagguggucaacguggugacgaccaagaucgcccucaagggcgggugaggacuagucccuguucccagagcccacuuuuuuuucuuuuuuugaaauaaaauagccugucuuucagaucucaaaggcucuuuucagagccaccaaaaaaaaaaaaaaaaaaaaaaaaaaaaaaaaaaaaaaaaaaaaaaaaaaaaaaaaaaaaaaaaaaaaaaaaaaaaaaaaaaaaaaaaaaaaaaaaaaaaa

SEQ ID NO: 19622 - RNA, 6113 nt, Artificial Sequence
  SARS-CoV-2__MT846554.1__non-structural protein 3 (NSP3) mRNA gc
aggagagucccgcagucggcguccagcggcucugcuuguucgugugugugucguugcaggccuuauucaagcuuaccauggcccccaccaaggugaccuucggcgacgacacggucaucgaggugcagggguacaagagcgugaacaucaccuucgagcuggacgagcgcaucgacaagguccucaacgagaagugcuccgccuacaccguggagcugggcaccgaggugaacgaguucgcgugcgucguggccgacgccgugaucaagacgcugcagccggucagcgagcuccugaccccccuggggaucgaccucgacgagugguccauggccaccuacuaccuguucgacgagagcggcgaguucaagcuggccucccacauguacugcagcuucuacccccccgacgaggacgaggaggagggggacugcgaggaggaggaguucgagccguccacccaguacgaguacggcacggaggacgacuaccagggcaagccccucgaguucggggcgaccagcgccgcccugcagcccgaggaggagcaggaggaggacuggcuggacgacgacucccagcagaccgugggccagcaggacgggagcgaggacaaccagaccacgaccauccagaccaucguggagguccagccccagcucgagauggagcugaccccgguggugcagacgaucgaggucaacuccuucagcggcuaccugaagcucaccgacaacguguacaucaagaacgccgacaucguggaggaggcgaagaaggucaagcccaccgugguggucaacgccgccaacguguaccugaagcacgggggcggcguggccggggcccugaacaaggcgaccaacaacgccaugcaggucgaguccgacgacuacaucgccacgaacggcccccucaagguggggggcagcugcguccuguccggccacaaccuggccaagcacugccuccacgugguggggcccaacgucaacaagggcgaggacauccagcugcugaagagcgccuacgagaacuucaaccagcacgaggugcuccuggcgccgcugcucuccgccgggaucuucggcgccgaccccauccacagccugcgggugugcgucgacaccgugcgcaccaacguguaccuggccgucuucgacaagaaccucuacgacaagcugguguccagcuuccuggagaugaagagcgagaagcagguggagcagaacaucgccgagauccccaaggaggaggucaagcccuucaucaccgaguccaagccgagcguggagcagcggaagcaggacgacaagaagaucaaggcgugcguggaggaggucacgaccacccucgaggagaccaaguuccugacggagaaccugcuccuguacaucgacaucaacgggaaccugcaccccgacuccgccacccucgugagcgacaucgacaucaccuuccugaagaaggacgcccccuacaucgugggcgacgucgugcaggagggcgugcugaccgccgucgugauccccacgaagaaggccgggggcaccaccgagaugcucgcgaaggcccugcgcaagguguccaccgacaacuacaucacgaccuacccggggcagggccugaacggguacaccgucgaggaggccaagaccgugcucaagaagugcaagagcgccuucuacauccugcccuccaucaucagcaacgagaagcaggagauccugggcaccguguccuggaaccuccgggagaugcuggcgcacgccgaggagacgcgcaagcugaugcccgucugcguggagaccaaggccaucgugagcaccauccagcggaaguacaagggcaucaagauccaggagggggucguggacuacggcgcccgcuucuacuucuacaccuccaagacgaccguggccagccugaucaacacccucaacgaccugaacgagacccuggucacgaugccccucggguacgugacccacggccugaaccuggaggaggcggcccgguacaugcgcucccucaaggugccggccaccgucagcguguccagccccgacgccgugaccgccuacaacggguaccugacguccagcuccaagacccccgaggagcacuucaucgagaccaucagccuggcgggcagcuacaaggacugguccuacagcggccaguccacccagcucgggaucgaguuccugaagcggggcgacaagagcgucuacuacacguccaaccccaccaccuuccaccuggacggggaggugaucaccuucgacaaccucaagacgcugcugagccuccgcgaggugaagaccaucaaggucuucaccaccguggacaacaucaaccugcacacgcagguggucgacauguccaugaccuacggccagcaguucggcccgaccuaccuggacggggccgacgugaccaagaucaagccccacaacagccacgagggcaagacguucuacgugcuccccaacgacgacacccugcgggucgaggccuucgaguacuaccacaccaccgacccguccuuccuggggcgcuacaugagcgcccucaaccacacgaagaaguggaaguacccccaggugaacggccugaccuccaucaagugggccgacaacaacugcuaccuggcgaccgcccuccugacccugcagcagaucgagcucaaguucaacccccccgcccugcaggacgccuacuaccgggcgcgcgccggggaggccgccaacuucugcgcccugauccucgcguacugcaacaagacggugggcgagcugggcgacguccgggagaccaugagcuaccuguuccagcacgccaaccucgacuccugcaagcgcgugcugaacgucgugugcaagaccugcgggcagcagcagaccacccugaagggcguggaggccgucauguacauggggacgcucagcuacgagcaguucaagaagggcgugcagaucccgugcaccugcgggaagcaggccaccaaguaccuggugcagcaggaguccagcuucgucaugauguccgccccccccgcgcaguacgagcugaagcacggcaccuucacgugcgccagcgaguacaccggcaacuaccagugcgggcacuacaagcacaucaccagcaaggagacccucuacugcaucgacggcgcccugcugacgaaguccagcgaguacaaggggcccaucaccgacguguucuacaaggagaacuccuacaccaccacgaucaagccggugaccuacaagcucgacggcgucgugugcaccgagaucgaccccaagcuggacaacuacuacaagaaggacaacagcuacuucaccgagcagcccaucgaccuggugcccaaccagccguaccccaacgccuccuucgacaacuucaaguucgucugcgacaacaucaaguucgccgacgaccucaaccagcugacgggguacaagaagcccgcgagccgggagcugaaggugaccuucuuccccgaccucaacggcgacguggucgccaucgacuacaagcacuacaccccguccuucaagaagggcgccaagcugcugcacaagcccaucguguggcacgugaacaacgccaccaacaaggcgacguacaagcccaacaccuggugcauccgcugccucuggagcaccaagcccgucgagaccuccaacagcuucgacgugcugaaguccgaggacgcccaggggauggacaaccuggccugcgaggaccucaagccggugagcgaggaggucguggagaaccccacgauccagaaggacgugcuggagugcaacgucaagaccaccgagguggugggcgacaucauccugaagcccgccaacaacucccucaagaucaccgaggaggucgggcacacggaccugauggccgcguacguggacaacagcucccugaccaucaagaagcccaacgagcucagccgggugcugggccugaagacccucgccacccacgggcuggccgccgucaacuccgugccgugggacacgaucgccaacuacgcgaagcccuuccugaacaagguggucagcaccaccaccaacaucgugacgcgcugccucaaccgcgugugcaccaacuacaugcccuacuucuucacccugcugcuccagcugugcaccuucacccgguccacgaacagccgcaucaaggccagcaugccgaccaccaucgccaagaacaccgucaaguccgugggcaaguucugccuggaggccagcuucaacuaccucaagucccccaacuucagcaagcugaucaacaucaucaucugguuccugcuccuguccgugugccugggcagccucaucuacuccacggccgcgcuggggguccugaugagcaaccucggcaugcccuccuacugcaccggguaccgggagggcuaccugaacagcaccaacgugaccaucgccacguacugcaccggcuccauccccugcagcgugugccuguccgggcucgacagccuggacaccuacccgucccuggagaccauccagaucacgaucagcuccuucaagugggaccucaccgccuucggccuggucgccgagugguuccuggccuacauccucuucacccgcuucuucuacgugcuggggcuggcggccaucaugcagcucuucuucagcuacuucgccgugcacuucaucuccaacagcuggcugauguggcugaucaucaaccugguccagauggcccccaucagcgcgauggugcggauguacaucuucuucgccuccuucuacuacguguggaagagcuacguccacgugguggacggcugcaacuccagcaccugcaugaugugcuacaagcgcaaccgggccacgcgcgucgagugcaccaccaucgugaacgggguccggcgcuccuucuacguguacgccaacggcggcaagggguucugcaagcuccacaacuggaacugcgugaacugcgacaccuucugcgccggcagcacguucaucuccgacgaggucgcgcgggaccugagccugcaguucaagcgccccaucaaccccaccgaccaguccagcuacaucguggacuccgugaccgucaagaacgggagcauccaccucuacuucgacaaggccggccagaagaccuacgagcggcacucccugagccacuucgugaacuucgacaaccugcgcgccaacaacacgaaggggucccucccgaucaacgugaucgucuucgacggcaagagcaagugcgaggaguccagcgccaaguccgccagcguguacuacagccagcugaugugccagcccauccugcuccuggaccaggcgcugguguccgacgucggcgacagcgccgagguggccgugaagauguucgacgccuacgucaacaccuucuccagcaccuucaacgugcccauggagaagcucaagacccugguggccacggcggaggccgagcuggccaagaacgucucccucgacaacgugcugagcaccuucaucuccgccgcgcggcagggguucguggacagcgacgucgagaccaaggacgugguggagugccugaagcucucccaccagagcgacaucgaggucaccggcgacuccugcaacaacuacaugcugacguacaacaagguggagaacaugaccccccgcgaccugggggccugcaucgacugcagcgcccggcacaucaacgcccagguggccaagucccacaacaucgcgcucaucuggaacgucaaggacuucaugagccuguccgagcagcugcgcaagcagauccggagcgccgccaagaagaacaaccucccguucaagcugaccugcgccaccacgcgccagguggugaacgucgugaccaccaagaucgcccugaagggcgggugaggacuagucccuguucccagagcccacuuuuuuuucuuuuuuugaaauaaaauagccugucuuucagaucucaaaggcucuuuucagagccaccaaaaaaaaaaaaaaaaaaaaaaaaaaaaaaaaaaaaaaaaaaaaaaaaaaaaaaaaaaaaaaaaaaaaaaaaaaaaaaaaaaaaaaaaaaaaaaaaaaaaa

SEQ ID NO: 19623 - RNA, 6113 nt, Artificial Sequence
  SARS-CoV-2__MT846555.1__non-structural protein 3 (NSP3) mRNA gc
aggagagucccgcagucggcguccagcggcucugcuuguucgugugugugucguugcaggccuuauucaagcuuaccauggcccccaccaaggugaccuucggcgacgacacggucaucgaggugcagggguacaagagcgugaacaucaccuucgagcuggacgagcgcaucgacaagguccucaacgagaagugcuccgccuacaccguggagcugggcaccgaggugaacgaguucgcgugcgucguggccgacgccgugaucaagacgcugcagccggucagcgagcuccugaccucccuggggaucgaccucgacgaguggagcauggccaccuacuaccuguucgacgaguccggcgaguucaagcuggccagccacauguacugcuccuucuacccccccgacgaggacgaggaggagggggacugcgaggaggaggaguucgagcccagcacccaguacgaguacggcacggaggacgacuaccagggcaagccgcucgaguucggggcgaccuccgccgcccugcagcccgaggaggagcaggaggaggacuggcuggacgacgacagccagcagaccgugggccagcaggacggguccgaggacaaccagaccacgaccauccagaccaucguggagguccagccccagcucgagauggagcugacccccguggugcagacgaucgaggucaacagcuucuccggcuaccugaagcucaccgacaacguguacaucaagaacgccgacaucguggaggaggcgaagaaggucaagccgaccgugguggucaacgccgccaacguguaccugaagcacgggggcggcguggccggggcccugaacaaggcgaccaacaacgccaugcaggucgagagcgacgacuacaucgccacgaacggcccccucaagguggggggcuccugcguccugagcggccacaaccuggccaagcacugccuccacgugguggggcccaacgucaacaagggcgaggacauccagcugcugaaguccgccuacgagaacuucaaccagcacgaggugcuccuggcgccccugcucagcgccgggaucuucggcgccgacccgauccacucccugcgggugugcgucgacaccgugcgcaccaacguguaccuggccgucuucgacaagaaccucuacgacaagcuggugagcagcuuccuggagaugaaguccgagaagcagguggagcagaagaucgccgagauccccaaggaggaggucaagcccuucaucaccgagagcaagcccuccguggagcagcggaagcaggacgacaagaagaucaaggcgugcguggaggaggucacgaccacccucgaggagaccaaguuccugacggagaaccugcuccuguacaucgacaucaacgggaaccugcacccggacagcgccacccucguguccgacaucgacaucaccuuccugaagaaggacgcccccuacaucgugggcgacgucgugcaggagggcgugcugaccgccgucgugauccccacgaagaaggccgggggcaccaccgagaugcucgcgaaggcccugcgcaaggugcccaccgacaacuacaucacgaccuacccggggcagggccugaacggguacaccgucgaggaggccaagaccgugcucaagaagugcaagagcgccuucuacauccugcccuccaucaucagcaacgagaagcaggagauccugggcaccguguccuggaaccuccgggagaugcuggcgcacgccgaggagacgcgcaagcugaugcccgucugcguggagaccaaggccaucgugagcaccauccagcggaaguacaagggcaucaagauccaggagggggucguggacuacggcgcccgcuucuacuucuacaccuccaagacgaccguggccagccugaucaacacccucaacgaccugaacgagacccuggucacgaugccccucggguacgugacccacggccugaaccuggaggaggcggcccgguacaugcgcucccucaaggugccggccaccgucagcguguccagccccgacgccgugaccgccuacaacggguaccugacguccagcuccaagacccccgaggagcacuucaucgagaccaucagccuggcgggcagcuacaaggacugguccuacagcggccaguccacccagcucgggaucgaguuccugaagcggggcgacaagagcgucuacuacacguccaaccccaccaccuuccaccuggacggggaggugaucaccuucgacaaccucaagacgcugcuggcccuccgcgaggugcggaccaucaaggucuucaccaccguggacaacaucaaccugcacacgcagguggucgacaugagcaugaccuacggccagcaguucggcccgaccuaccuggacggggccgacgugaccaagaucaagccccacaacucccacgagggcaagacguucuacgugcuccccaacgacgacacccugcgcgucgaggccuucgaguacuaccacaccaccgacccgagcuuccuggggcgguacauguccgcccucaaccacacgaagaaguggaaguacccccaggugaacggccugaccagcaucaagugggcggacaacaacugcuaccuggccaccgcccuccugacccugcagcagaucgagcucaaguucaacccccccgcccugcaggacgcguacuaccgcgcccgggccggggaggccgccaacuucugcgcgcugauccucgccuacugcaacaagacggugggcgagcugggcgacguccgcgagaccauguccuaccuguuccagcacgccaaccucgacagcugcaagcgggugcugaacgucgugugcaagaccugcgggcagcagcagaccacccugaagggcguggaggccgucauguacauggggacgcucuccuacgagcaguucaagaagggcgugcagaucccgugcaccugcgggaagcaggccaccaaguaccuggugcagcaggagagccccuucgucaugauguccgcgccccccgcccaguacgagcugaagcacggcaccuucacgugcgccagcgaguacaccggcaacuaccagugcgggcacuacaagcacaucaccuccaaggagacccucuacugcaucgacggcgcccugcugacgaagagcagcgaguacaaggggccgaucaccgacguguucuacaaggagaacuccuacaccaccacgaucaagcccgugaccuacaagcucgacggcgucgugugcaccgagaucgaccccaagcuggacaacuacuacaagaaggacaacagcuacuucaccgagcagcccaucgaccuggugccgaaccagcccuaccccaacgccuccuucgacaacuucaaguucgucugcgacaacaucaaguucgcggacgaccucaaccagcugacgggguacaagaagcccgccagccgcgagcugaaggugaccuucuucccggaccucaacggcgacguggucgccaucgacuacaagcacuacacccccuccuucaagaagggcgccaagcugcugcacaagcccaucguguggcacgugaacaacgcgaccaacaaggccacguacaagcccaacaccuggugcauccggugccucuggagcaccaagccggucgagaccuccaacagcuucgacgugcugaaguccgaggacgcccaggggauggacaaccuggccugcgaggaccucaagcccgugagcgaggaggucguggagaaccccacgauccagaaggacgugcuggagugcaacgucaagaccaccgagguggugggcgacaucauccugaagcccgccaacaacucccucaagaucaccgaggaggucgggcacacggaccugauggcggccuacguggacaacagcucccugaccaucaagaagccgaacgagcucagccgcgugcugggccugaagacccucgccacccacgggcuggccgccgucaacuccgugcccugggacacgaucgcgaacuacgccaagcccuuccugaacaagguggucagcaccaccaccaacaucgugacgcgcugccucaaccgggugugcaccaacuacaugccguacuucuucacccugcugcuccagcugugcaccuucacccgcuccacgaacagccggaucaaggccuccaugcccaccaccaucgccaagaacaccgucaagagcgugggcaaguucugccuggaggccagcuucaacuaccucaagucccccaacuucagcaagcugaucaacaucaucaucugguuccugcuccuguccgugugccugggcagccucaucuacuccacggcggcccuggggguccugaugagcaaccucggcaugcccuccuacugcaccggguaccgcgagggcuaccugaacagcaccaacgugaccaucgccaucuacugcacgggcuccaucccgugcagcgugugccuguccgggcucgacagccuggacaccuaccccucccuggagaccauccagaucaccaucagcuccuucaagugggaccucacggccuucggccuggucgccgagugguuccuggcguacauccucuucacccgguucuucuacgugcuggggcuggccgccaucaugcagcucuucuucagcuacuucgccgugcacuucaucuccaacagcuggcugauguggcugaucaucaaccugguccagauggcgcccaucuccgccauggugcgcauguacaucuucuucgccagcuucuacuacguguggaagagcuacguccacgugguggacggcugcaacuccagcaccugcaugaugugcuacaagcggaaccgcgccacccgggucgagugcacgaccaucgugaacgggguccgccgguccuucuacguguacgccaacggcggcaagggguucugcaagcuccacaacuggaacugcgugaacugcgacaccuucugcgcgggcagcaccuucaucuccgacgaggucgcccgcgaccugagccugcaguucaagcggcccaucaacccgacggaccaguccagcuacaucguggacuccgugaccgucaagaacgggagcauccaccucuacuucgacaaggccggccagaagaccuacgagcgccacucccugagccacuucgugaaccuggacaaccuccgggccaacaacaccaaggggucccugcccaucaacgugaucgucuucgacggcaagagcaagugcgaggaguccagcgccaaguccgcgagcguguacuacucccagcugaugugccagcccauccuccugcuggaccaggcccucgugagcgacgucggcgacagcgccgagguggccgugaagauguucgacgccuacgucaacacguucuccagcaccuucaacgugcccauggagaagcugaagacccugguggcgaccgccgaggccgagcucgccaagaacgucucccuggacaacgugcugagcacguucaucuccgcggcccgccagggguucguggacagcgacgucgagaccaaggacgugguggagugccucaagcugucccaccagagcgacaucgaggucaccggcgacuccugcaacaacuacaugcugaccuacaacaagguggagaacaugacgccgcgggaccucggggccugcaucgacugcagcgcccgccacaucaacgcccagguggcgaagucccacaacaucgcccugaucuggaacgucaaggacuucaugagccuguccgagcagcuccggaagcagauccgcagcgccgccaagaagaacaaccugcccuucaagcugaccugcgccaccacccgccagguggugaacgucgugacgaccaagaucgcgcucaagggcgggugaggacuagucccuguucccagagcccacuuuuuuuucuuuuuuugaaauaaaauagccugucuuucagaucucaaaggcucuuuucagagccaccaaaaaaaaaaaaaaaaaaaaaaaaaaaaaaaaaaaaaaaaaaaaaaaaaaaaaaaaaaaaaaaaaaaaaaaaaaaaaaaaaaaaaaaaaaaaaaaaaaaaa

SEQ ID NO: 19624 - RNA, 6113 nt, Artificial Sequence
  SARS-CoV-2__MT846556.1__non-structural protein 3 (NSP3) mRNA gc
aggagagucccgcagucggcguccagcggcucugcuuguucgugugugugucguugcaggccuuauucaagcuuaccauggcccccaccaaggugaccuucggcgacgacacggucaucgaggugcagggguacaagagcgugaacaucaccuucgagcuggacgagcgcaucgacaagguccucaacgagaagugcuccgccuacaccguggagcugggcaccgaggugaacgaguucgcgugcgucguggccgacgccgugaucaagacgcugcagccggucagcgagcuccugaccccccuggggaucgaccucgacgagugguccauggccaccuacuaccuguucgacgagagcggcgaguucaagcuggccucccacauguacugcagcuucuacccccccgacgaggacgaggaggagggggacugcgaggaggaggaguucgagccguccacccaguacgaguacggcacggaggacgacuaccagggcaagccccucgaguucggggcgaccagcgccgcccugcagcccgaggaggagcaggaggaggacuggcuggacgacgacucccagcagaccgugggccagcaggacgggagcgaggacaaccagaccacgaccauccagaccaucguggagguccagccccagcucgagauggagcugaccccgguggugcagacgaucgaggucaacuccuucagcggcuaccugaagcucaccgacaacguguacaucaagaacgccgacaucguggaggaggcgaagaaggucaagcccaccgugguggucaacgccgccaacguguaccugaagcacgggggcggcguggccggggcccugaacaaggcgaccaacaacgccaugcaggucgaguccgacgacuacaucgccacgaacggcccccucaagguggggggcagcugcguccuguccggccacaaccuggccaagcacugccuccacgugguggggcccaacgucaacaagggcgaggacauccagcugcugaagagcgccuacgagaacuucaaccagcacgaggugcuccuggcgccgcugcucuccgccgggaucuucggcgccgaccccauccacagccugcgggugugcgucgacaccgugcgcaccaacguguaccuggccgucuucgacaagaaccucuacgacaagcugguguccagcuuccuggagaugaagagcgagaagcagguggagcagaagaucgccgagauccccaaggaggaggucaagcccuucaucaccgaguccaagccgagcguggagcagcggaagcaggacgacaagaagaucaaggcgugcguggaggaggucacgaccacccucgaggagaccaaguuccugacggagaaccugcuccuguacaucgacaucaacgggaaccugcaccccgacuccgccacccucgugagcgacaucgacaucaccuuccugaagaaggacgcccccuacaucgugggcgacgucgugcaggagggcgugcugaccgccgucgugauccccacgaagaaggccgggggcaccaccgagaugcucgcgaaggcccugcgcaaggugccgaccgacaacuacaucacgaccuaccccgggcagggccugaacggguacaccgucgaggaggccaagaccgugcucaagaagugcaaguccgccuucuacauccugcccagcaucaucuccaacgagaagcaggagauccugggcaccgugagcuggaaccuccgggagaugcuggcgcacgccgaggagacgcgcaagcugaugcccgucugcguggagaccaaggccaucguguccaccauccagcggaaguacaagggcaucaagauccaggagggggucguggacuacggcgcccgcuucuacuucuacaccagcaagacgaccguggccucccugaucaacacccucaacgaccugaacgagacccuggucacgaugccgcucggguacgugacccacggccugaaccuggaggaggcggcccgguacaugcgcagccucaaggugcccgccaccgucuccgugagcucccccgacgccgugaccgccuacaacggguaccugacgagcuccagcaagacccccgaggagcacuucaucgagaccaucucccuggcgggcagcuacaaggacuggagcuacuccggccagagcacccagcucgggaucgaguuccugaagcggggcgacaaguccgucuacuacacgagcaacccgaccaccuuccaccuggacggggaggugaucaccuucgacaaccucaagacgcugcugucccuccgcgaggugcggaccaucaaggucuucaccaccguggacaacaucaaccugcacacgcagguggucgacaugagcaugaccuacggccagcaguucggccccaccuaccuggacggggccgacgugaccaagaucaagccccacaacucccacgagggcaagacguucuacgugcucccgaacgacgacacccugcgcgucgaggccuucgaguacuaccacaccaccgaccccagcuuccuggggcgguacauguccgcccucaaccacacgaagaaguggaaguacccccaggugaacggccugaccagcaucaagugggccgacaacaacugcuaccuggcgaccgcccuccugacccugcagcagaucgagcucaaguucaaccccccggcccugcaggacgccuacuaccgcgcgcgggccggggaggccgccaacuucugcgcccugauccucgcguacugcaacaagacggugggcgagcugggcgacguccgcgagaccauguccuaccuguuccagcacgccaaccucgacagcugcaagcgggugcugaacgucgugugcaagaccugcgggcagcagcagaccacccugaagggcguggaggccgucauguacauggggacgcucuccuacgagcaguucaagaagggcgugcagauccccugcaccugcgggaagcaggccaccaaguaccuggugcagcaggagagccccuucgucaugauguccgcccccccggcgcaguacgagcugaagcacggcaccuucacgugcgccagcgaguacaccggcaacuaccagugcgggcacuacaagcacaucaccuccaaggagacccucuacugcaucgacggcgcccugcugacgaagagcagcgaguacaaggggcccaucaccgacguguucuacaaggagaacuccuacaccaccacgaucaagcccgugaccuacaagcucgacggcgucgugugcaccgagaucgaccccaagcuggacaacuacuacaagaaggacaacagcuacuucaccgagcagccgaucgaccuggugcccaaccagcccuaccccaacgccuccuucgacaacuucaaguucgucugcgacaacaucaaguucgccgacgaccucaaccagcugacgggguacaagaagccggcgagccgcgagcugaaggugaccuucuuccccgaccucaacggcgacguggucgccaucgacuacaagcacuacacccccuccuucaagaagggcgccaagcugcugcacaagcccaucguguggcacgugaacaacgccaccaacaaggcgacguacaagccgaacaccuggugcauccggugccucuggagcaccaagcccgucgagaccuccaacagcuucgacgugcugaaguccgaggacgcccaggggauggacaaccuggccugcgaggaccucaagcccgugagcgaggaggucguggagaaccccacgauccagaaggacgugcuggagugcaacgucaagaccaccgagguggugggcgacaucauccugaagccggccaacaacucccucaagaucaccgaggaggucgggcacacggaccugauggccgcguacguggacaacagcucccugaccaucaagaagcccaacgagcucagccgcgugcugggccugaagacccucgccacccacgggcuggccgccgucaacuccgugcccugggacacgaucgccaacuacgcgaagccguuccugaacaagguggucggcaccaccaccaacaucgugacgcgcugccucaaccgggugugcaccaacuacaugcccuacuucuucacccugcugcuccagcugugcaccuucacccgcagcacgaacucccggaucaaggccagcaugcccaccaccaucgccaagaacaccgucaaguccgugggcaaguucugccuggaggccagcuucaacuaccucaagagccccaacuucuccaagcugaucaacaucaucaucugguuccugcuccugagcgugugccuggggucccucaucuacagcacggccgcgcugggcguccugauguccaaccucgggaugccgagcuacugcaccggcuaccgcgagggcuaccugaacuccaccaacgugaccaucgccacguacugcaccgggagcauccccugcuccgugugccugagcggccucgacucccuggacaccuaccccagccuggagaccauccagaucacgaucuccagcuucaagugggaccucaccgccuucgggcuggucgccgagugguuccuggccuacauccucuucacccgguucuucuacgugcugggccuggcggccaucaugcagcucuucuucuccuacuucgccgugcacuucaucagcaacuccuggcugauguggcugaucaucaaccugguccagauggcccccaucagcgcgauggugcgcauguacaucuucuucgccuccuucuacuacguguggaagagcuacguccacgugguggacgggugcaacagcuccaccugcaugaugugcuacaagcggaaccgcgccacgcgggucgagugcaccaccaucgugaacggcguccgccggagcuucuacguguacgccaacggcgggaagggcuucugcaagcuccacaacuggaacugcgugaacugcgacaccuucugcgccggguccacguucaucagcgacgaggucgcgcgcgaccugucccugcaguucaagcggccgaucaaccccaccgaccagagcuccuacaucguggacagcgugaccgucaagaacggcuccauccaccucuacuucgacaaggccgggcagaagaccuacgagcgccacagccugucccacuucgugaaccuggacaaccuccgggccaacaacacgaagggcagccugcccaucaacgugaucgucuucgacggcaaguccaagugcgaggagagcuccgccaagagcgccuccguguacuacagccagcugaugugccagcccauccuccugcuggaccaggcgcucguguccgacgucggggacagcgccgagguggccgugaagauguucgacgccuacgucaacaccuucagcuccaccuucaacgugccgauggagaagcugaagacccugguggccacggcggaggccgagcucgccaagaacgucagccuggacaacgugcuguccaccuucaucagcgccgcgcgccagggcuucguggacuccgacgucgagaccaaggacgugguggagugccucaagcugagccaccaguccgacaucgaggucaccggggacagcugcaacaacuacaugcugacguacaacaagguggagaacaugaccccccgggaccucggcgccugcaucgacugcuccgcccgccacaucaacgcccagguggccaagagccacaacaucgcgcugaucuggaacgucaaggacuucaugucccugagcgagcagcuccggaagcagauccgcuccgccgccaagaagaacaaccugcccuucaagcugaccugcgccaccacgcgccagguggugaacgucgugaccaccaagaucgcccucaaggggggcugaggacuagucccuguucccagagcccacuuuuuuuucuuuuuuugaaauaaaauagccugucuuucagaucucaaaggcucuuuucagagccaccaaaaaaaaaaaaaaaaaaaaaaaaaaaaaaaaaaaaaaaaaaaaaaaaaaaaaaaaaaaaaaaaaaaaaaaaaaaaaaaaaaaaaaaaaaaaaaaaaaaaa

SEQ ID NO: 19625 - RNA, 6113 nt, Artificial Sequence
  SARS-CoV-2__MT846557.1__non-structural protein 3 (NSP3) mRNA gc
aggagagucccgcagucggcguccagcggcucugcuuguucgugugugugucguugcaggccuuauucaagcuuaccauggcccccaccaaggugaccuucggcgacgacacggucaucgaggugcagggguacaagagcgugaacaucaccuucgagcuggacgagcgcaucgacaagguccucaacgagaagugcuccgccuacaccguggagcugggcaccgaggugaacgaguucgcgugcgucguggccgacgccgugaucaagacgcugcagccggucagcgagcuccugaccccccuggggaucgaccucgacgagugguccauggccaccuacuaccuguucgacgagagcggcgaguucaagcuggccucccacauguacugcagcuucuacccccccgacgaggacgaggaggagggggacugcgaggaggaggaguucgagccguccacccaguacgaguacggcacggaggacgacuaccagggcaagccccucgaguucggggcgaccagcgccgcccugcagcccgaggaggagcaggaggaggacuggcuggacgacgacucccagcagaccgugggccagcaggacgggagcgaggacaaccagaccacgaccauccagaccaucguggagguccagccccagcucgagauggagcugaccccgguggugcagacgaucgaggucaacuccuucagcggcuaccugaagcucaccgacaacguguacaucaagaacgccgacaucguggaggaggcgaagaaggucaagcccaccgugguggucaacgccgccaacguguaccugaagcacgggggcggcguggccggggcccugaacaaggcgaccaacaacgccaugcaggucgaguccgacgacuacaucgccacgaacggcccccucaagguggggggcagcugcguccuguccggccacaaccuggccaagcacugccuccacgugguggggcccaacgucaacaagggcgaggacauccagcugcugaagagcgccuacgagaacuucaaccagcacgaggugcuccuggcgccgcugcucuccgccgggaucuucggcgccgaccccauccacagccugcgggugugcgucgacaccgugcgcaccaacguguaccuggccgucuucgacaagaaccucuacgacaagcugguguccagcuuccuggagaugaagagcgagaagcagguggagcagaagaucgccgagauccccaaggaggaggucaagcccuucaucaccgaguccaagccgagcguggagcagcggaagcaggacgacaagaagaucaaggcgugcguggaggaggucacgaccacccucgaggagaccaaguuccugacggagaaccugcuccuguacaucgacaucaacgggaaccugcaccccgacuccgccacccucgugagcgacaucgacaucaccuuccugaagaaggacgcccccuacaucgugggcgacgucgugcaggagggcgugcugaccgccgucgugauccccacgaagaaggccgggggcaccaccgagaugcucgcgaaggcccugcgcaaggugccgaccuacaacuacaucacgaccuaccccgggcagggccugaacggguacaccgucgaggaggccaagaccgugcucaagaagugcaaguccgccuucuacauccugcccagcaucaucuccaacgagaagcaggagauccugggcaccgugagcuggaaccuccgggagaugcuggcgcacgccgaggagacgcgcaagcugaugcccgucugcguggagaccaaggccaucguguccaccauccagcggaaguacaagggcaucaagauccaggagggggucguggacuacggcgcccgcuucuacuucuacaccagcaagacgaccguggccucccugaucaacacccucaacgaccugaacgagacccuggucacgaugccgcucggguacgugacccacggccugaaccuggaggaggcggcccgguacaugcgcagccucaaggugcccgccaccgucuccgugagcucccccgacgccgugaccgccuacaacggguaccugacgagcuccagcaagacccccgaggagcacuucaucgagaccaucucccuggcgggcagcuacaaggacuggagcuacuccggccagagcacccagcucgggaucgaguuccugaagcggggcgacaaguccgucuacuacacgagcaacccgaccaccuuccaccuggacggggaggugaucaccuucgacaaccucaagacgcugcugucccuccgcgaggugcggaccaucaaggucuucaccaccguggacaacaucaaccugcacacgcagguggucgacaugagcaugaccuacggccagcaguucggccccaccuaccuggacggggccgacgugaccaagaucaagccccacaacucccacgagggcaagacguucuacgugcucccgaacgacgacacccugcgcgucgaggccuucgaguacuaccacaccaccgaccccagcuuccuggggcgguacauguccgcccucaaccacacgaagaaguggaaguacccccaggugaacggccugaccagcaucaagugggccgacaacaacugcuaccuggcgaccgcccuccugacccugcagcagaucgagcucaaguucaaccccccggcccugcaggacgccuacuaccgcgcgcgggccggggaggccgccaacuucugcgcccugauccucgcguacugcaacaagacggugggcgagcugggcgacguccgcgagaccauguccuaccuguuccagcacgccaaccucgacagcugcaagcgggugcugaacgucgugugcaagaccugcgggcagcagcagaccacccugaagggcguggaggccgucauguacauggggacgcucuccuacgagcaguucaagaagggcgugcagauccccugcaccugcgggaagcaggccaccaaguaccuggugcagcaggagagccccuucgucaugauguccgcccccccggcgcaguacgagcugaagcacggcaccuucacgugcgccagcgaguacaccggcaacuaccagugcgggcacuacaagcacaucaccuccaaggagacccucuacugcaucgacggcgcccugcugacgaagagcagcgaguacaaggggcccaucaccgacguguucuacaaggagaacuccuacaccaccacgaucaagcccgugaccuacaagcucgacggcgucgugugcaccgagaucgaccccaagcuggacaacuacuacaagaaggacaacagcuacuucaccgagcagccgaucgaccuggugcccaaccagcccuaccccaacgccuccuucgacaacuucaaguucgucugcgacaacaucaaguucgccgacgaccucaaccagcugacgggguacaagaagccggcgagccgcgagcugaaggugaccuucuuccccgaccucaacggcgacguggucgccaucgacuacaagcacuacacccccuccuucaagaagggcgccaagcugcugcacaagcccaucguguggcacgugaacaacgccaccaacaaggcgacguacaagccgaacaccuggugcauccggugccucuggagcaccaagcccgucgagaccuccaacagcuucgacgugcugaaguccgaggacgcccaggggauggacaaccuggccugcgaggaccucaagcccgugagcgaggaggucguggagaaccccacgauccagaaggacgugcuggagugcaacgucaagaccaccgagguggugggcgacaucauccugaagccggccaacaacucccucaagaucaccgaggaggucgggcacacggaccugauggccgcguacguggacaacagcucccugaccaucaagaagcccaacgagcucagccgcgugcugggccugaagacccucgccacccacgggcuggccgccgucaacuccgugcccugggacacgaucgccaacuacgcgaagccguuccugaacaagguggucagcaccaccaccaacaucgugacgcgcugccucaaccgggugugcaccaacuacaugcccuacuucuucacccugcugcuccagcugugcaccuucacccgcuccacgaacagccggaucaaggccuccaugcccaccaccaucgccaagaacaccgucaagagcgugggcaaguucugccuggaggccagcuucaacuaccucaagucccccaacuucagcaagcugaucaacaucaucaucugguuccugcuccuguccgugugccugggcagccucaucuacuccacggccgcgcuggggguccugaugagcaaccucggcaugccguccuacugcaccggguaccgcgagggcuaccugaacagcaccaacgugaccaucgccacguacugcaccggcuccauccccugcagcgugugccuguccgggcucgacagccuggacaccuaccccucccuggagaccauccagaucacgaucagcuccuucaagugggaccucaccgccuucggccuggucgccgagugguuccuggccuacauccucuucacccgguucuucuacgugcuggggcuggcggccaucaugcagcucuucuucagcuacuucgccgugcacuucaucuccaacagcuggcugauguggcugaucaucaaccugguccagauggcccccaucuccgcgauggugcgcauguacaucuucuucgccagcuucuacuacguguggaagagcuacguccacgugguggacggcugcaacuccagcaccugcaugaugugcuacaagcggaaccgcgccacgcgggucgagugcaccaccaucgugaacgggguccgccgguccuucuacguguacgccaacggcggcaagggguucugcaagcuccacaacuggaacugcgugaacugcgacaccuucugcgccggcagcacguucaucuccgacgaggucgcgcgcgaccugagccugcaguucaagcggccgaucaaccccaccgaccaguccagcuacaucguggacuccgugaccgucaagaacgggagcauccaccucuacuucgacaaggccggccagaagaccuacgagcgccacucccugagccacuucgugaaccuggacaaccuccgggccaacaacacgaaggggucccugcccaucaacgugaucgucuucgacggcaagagcaagugcgaggaguccagcgccaaguccgccagcguguacuacucccagcugaugugccagcccauccuccugcuggaccaggcgcucgugagcgacgucggcgacagcgccgagguggccgugaagauguucgacgccuacgucaacaccuucuccagcaccuucaacgugccgauggagaagcugaagacccugguggccacggcggaggccgagcucgccaagaacgucucccuggacaacgugcugagcaccuucaucuccgccgcgcgccagggguucguggacagcgacgucgagaccaaggacgugguggagugccucaagcugucccaccagagcgacaucgaggucaccggcgacuccugcaacaacuacaugcugacguacaacaagguggagaacaugaccccccgggaccucggggccugcaucgacugcagcgcccgccacaucaacgcccagguggccaagucccacaacaucgcgcugaucuggaacgucaaggacuucaugagccuguccgagcagcuccggaagcagauccgcagcgccgccaagaagaacaaccugcccuucaagcugaccugcgccaccacgcgccagguggugaacgucgugaccaccaagaucgcccucaagggcgggugaggacuagucccuguucccagagcccacuuuuuuuucuuuuuuugaaauaaaauagccugucuuucagaucucaaaggcucuuuucagagccaccaaaaaaaaaaaaaaaaaaaaaaaaaaaaaaaaaaaaaaaaaaaaaaaaaaaaaaaaaaaaaaaaaaaaaaaaaaaaaaaaaaaaaaaaaaaaaaaaaaaaa

SEQ ID NO: 19626 - RNA, 6113 nt, Artificial Sequence
  SARS-CoV-2__MT846558.1__non-structural protein 3 (NSP3) mRNA gc
aggagagucccgcagucggcguccagcggcucugcuuguucgugugugugucguugcaggccuuauucaagcuuaccauggcccccaccaaggugaccuucggcgacgacacggucaucgaggugcagggguacaagagcgugaacaucaccuucgagcuggacgagcgcaucgacaagguccucaacgagaagugcuccgccuacaccguggagcugggcaccgaggugaacgaguucgcgugcgucguggccgacgccgugaucaagacgcugcagccggucagcgagcuccugaccccccuggggaucgaccucgacgagugguccauggccaccuacuaccuguucgacgagagcggcgaguucaagcuggccucccacauguacugcagcuucuacccccccgacgaggacgaggaggagggggacugcgaggaggaggaguucgagccguccacccaguacgaguacggcacggaggacgacuaccagggcaagccccucgaguucggggcgaccagcgccgcccugcagcccgaggaggagcaggaggaggacuggcuggacgacgacucccagcagaccgugggccagcaggacgggagcgaggacaaccagaccacgaccauccagaccaucguggagguccagccccagcucgagauggagcugaccccgguggugcagacgaucgaggucaacuccuucagcggcuaccugaagcucaccgacaacguguacaucaagaacgccgacaucguggaggaggcgaagaaggucaagcccaccgugguggucaacgccgccaacguguaccugaagcacgggggcggcguggccggggcccugaacaaggcgaccaacaacgccaugcaggucgaguccgacgacuacaucgccacgaacggcccccucaagguggggggcagcugcguccuguccggccacaaccuggccaagcacugccuccacgugguggggcccaacgucaacaagggcgaggacauccagcugcugaagagcgccuacgagaacuucaaccagcacgaggugcuccuggcgccgcugcucuccgccgggaucuucggcgccgaccccauccacagccugcgggugugcgucgacaccgugcgcaccaacguguaccuggccgucuucgacaagaaccucuacgacaagcugguguccagcuuccuggagaugaagagcgagaagcagguggagcagaacaucgccgagauccccaaggaggaggucaagcccuucaucaccgaguccaagccgagcguggagcagcggaagcaggacgacaagaagaucaaggcgugcguggaggaggucacgaccacccucgaggagaccaaguuccugacggagaaccugcuccuguacaucgacaucaacgggaaccugcaccccgacuccgccacccucgugagcgacaucgacaucaccuuccugaagaaggacgcccccuacaucgugggcgacgucgugcaggagggcgugcugaccgccgucgugauccccacgaagaaggccgggggcaccaccgagaugcucgcgaaggcccugcgcaagguguccaccgacaacuacaucacgaccuacccggggcagggccugaacggguacaccgucgaggaggccaagaccgugcucaagaagugcaagagcgccuucuacauccugcccuccaucaucagcaacgagaagcaggagauccugggcaccguguccuggaaccuccgggagaugcuggcgcacgccgaggagacgcgcaagcugaugcccgucugcguggagaccaaggccaucgugagcaccauccagcggaaguacaagggcaucaagauccaggagggggucguggacuacggcgcccgcuucuacuucuacaccuccaagacgaccguggccagccugaucaacacccucaacgaccugaacgagacccuggucacgaugccccucggguacgugacccacggccugaaccuggaggaggcggcccgguacaugcgcucccucaaggugccggccaccgucagcguguccagccccgacgccgugaccgccuacaacggguaccugacguccagcuccaagacccccgaggagcacuucaucgagaccaucagccuggcgggcagcuacaaggacugguccuacagcggccaguccacccagcucgggaucgaguuccugaagcggggcgacaagagcgucuacuacacguccaaccccaccaccuuccaccuggacggggaggugaucaccuucgacaaccucaagacgcugcugagccuccgcgaggugcggaccaucaaggucuucaccaccguggacaacaucaaccugcacacgcagguggucgacauguccaugaccuacggccagcaguucggcccgaccuaccuggacggggccgacgugaccaagaucaagccccacaacagccacgagggcaagacguucuacgugcuccccaacgacgacacccugcgcgucgaggccuucgaguacuaccacaccaccgacccguccuuccuggggcgguacaugagcgcccucaaccacacgaagaaguggaaguacccccaggugaacggccugaccuccaucaagugggccgacaacaacugcuaccuggcgaccgcccuccugacccugcagcagaucgagcucaaguucaacccccccgcccugcaggacgccuacuaccgcgcgcgggccggggaggccgccaacuucugcgcccugauccucgcguacugcaacaagacggugggcgagcugggcgacguccgcgagaccaugagcuaccuguuccagcacgccaaccucgacuccugcaagcgggugcugaacgucgugugcaagaccugcgggcugcagcagaccacccucaagggcguggaggccgucauguacauggggacgcugagcuacgagcaguucaagaagggcgugcagaucccgugcaccugcgggaagcaggccaccaaguaccuggugcagcaggaguccagcuucgucaugauguccgccccccccgcgcaguacgagcucaagcacggcaccuucacgugcgccagcgaguacaccggcaacuaccagugcgggcacuacaagcacaucaccagcaaggagacccuguacugcaucgacggcgcccugcucacgaaguccagcgaguacaaggggcccaucaccgacguguucuacaaggagaacuccuacaccaccacgaucaagccggugaccuacaagcuggacggcgucgugugcaccgagaucgaccccaagcuggacaacuacuacaagaaggacaacagcuacuucaccgagcagcccaucgaccucgugcccaaccagccguaccccaacgccuccuucgacaacuucaaguucgucugcgacaacaucaaguucgccgacgaccugaaccagcugacgggguacaagaagcccgcgagccgcgagcucaaggugaccuucuuccccgaccugaacggcgacguggucgccaucgacuacaagcacuacaccccguccuucaagaagggcgccaagcugcuccacaagcccaucguguggcacgugaacaacgccaccaacaaggcgacguacaagcccaacaccuggugcauccggugccuguggagcaccaagcccgucgagaccuccaacagcuucgacgugcugaaguccgaggacgcccaggggauggacaaccucgccugcgaggaccugaagccggugagcgaggaggucguggagaaccccacgauccagaaggacgugcuggagugcaacgucaagaccaccgagguggugggcgacaucauccucaagcccgccaacaacucccugaagaucaccgaggaggucgggcacacggaccugauggccgcguacguggacaacagcucccucaccaucaagaagcccaacgagcugagccgcgugcugggccucaagacccuggccacccacgggcuggccgccgucaacuccgugccgugggacacgaucgccaacuacgcgaagcccuuccucaacaagguggucagcaccaccaccaacaucgugacgcgcugccugaaccgggugugcaccaacuacaugcccuacuucuucacccugcuccugcagcugugcaccuucacccgcuccacgaacagccggaucaaggccagcaugccgaccaccaucgccaagaacaccgucaaguccgugggcaaguucugccucgaggccagcuucaacuaccugaagucccccaacuucagcaagcugaucaacaucaucaucugguuccuccugcuguccgugugccucggcagccugaucuacuccacggccgcgcuggggguccucaugagcaaccugggcaugcccuccuacugcaccggguaccgcgagggcuaccugaacagcaccaacgugaccaucgccacguacugcaccggcuccauccccugcagcgugugccucuccgggcuggacagccuggacaccuacccgucccucgagaccauccagaucacgaucagcuccuucaagugggaccugaccgccuucggccuggucgccgagugguuccucgccuacauccuguucacccgguucuucuacgugcuggggcucgcggccaucaugcagcuguucuucagcuacuucgccgugcacuucaucuccaacagcuggcugauguggcugaucaucaaccucguccagauggcccccaucagcgcgauggugcgcauguacaucuucuucgccuccuucuacuacguguggaagagcuacguccacgugguggacggcugcaacuccagcaccugcaugaugugcuacaagcggaaccgcgccacgcgggucgagugcaccaccaucgugaacgggguccgccgguccuucuacguguacgccaacggcggcaagggguucugcaagcugcacaacuggaacugcgugaacugcgacaccuucugcgccggcagcacguucaucuccgacgaggucgcgcgcgaccugagccuccaguucaagcggcccaucaaccccaccgaccaguccagcuacaucguggacuccgugaccgucaagaacgggagcauccaccuguacuucgacaaggccggccagaagaccuacgagcgccacucccugagccacuucgugaacuucgacaaccuccgggccaacaacacgaaggggucccugccgaucaacgugaucgucuucgacggcaagagcaagugcgaggaguccagcgccaaguccgccagcguguacuacagccagcugaugugccagcccauccuccugcuggaccaggcgcucguguccgacgucggcgacagcgccgagguggccgugaagauguucgacgccuacgucaacaccuucuccagcaccuucaacgugcccauggagaagcugaagacccugguggccacggcggaggccgagcucgccaagaacgucucccuggacaacgugcugagcaccuucaucuccgccgcgcgccagggguucguggacagcgacgucgagaccaaggacgugguggagugccucaagcugucccaccagagcgacaucgaggucaccggcgacuccugcaacaacuacaugcugacguacaacaagguggagaacaugaccccccgggaccucggggccugcaucgacugcagcgcccgccacaucaacgcccagguggccaagucccacaacaucgcgcugaucuggaacgucaaggacuucaugagccuguccgagcagcuccggaagcagauccgcagcgccgccaagaagaacaaccugccguucaagcugaccugcgccaccacgcgccagguggugaacgucgugaccaccaagaucgcccucaagggcgggugaggacuagucccuguucccagagcccacuuuuuuuucuuuuuuugaaauaaaauagccugucuuucagaucucaaaggcucuuuucagagccaccaaaaaaaaaaaaaaaaaaaaaaaaaaaaaaaaaaaaaaaaaaaaaaaaaaaaaaaaaaaaaaaaaaaaaaaaaaaaaaaaaaaaaaaaaaaaaaaaaaaaa

SEQ ID NO: 19627 - RNA, 6113 nt, Artificial Sequence
  SARS-CoV-2__MT846565.1__non-structural protein 3 (NSP3) mRNA gc
aggagagucccgcagucggcguccagcggcucugcuuguucgugugugugucguugcaggccuuauucaagcuuaccauggcccccaccaaggugaccuucggcgacgacacggucaucgaggugcagggguacaagagcgugaacaucaccuucgagcuggacgagcgcaucgacaagguccucaacgagaagugcuccgccuacaccguggagcugggcaccgaggugaacgaguucgcgugcgucguggccgacgccgugaucaagacgcugcagccggucagcgagcuccugaccccccuggggaucgaccucgacgagugguccauggccaccuacuaccuguucgacgagagcggcgaguucaagcuggccucccacauguacugcagcuucuacccccccgacgaggacgaggaggagggggacugcgaggaggaggaguucgagccguccacccaguacgaguacggcacggaggacgacuaccagggcaagccccucgaguucggggcgaccagcgccgcccugcagcccgaggaggagcaggaggaggacuggcuggacgacgacucccagcagaccgugggccagcaggacgggagcgaggacaaccagaccacgaccauccagaccaucguggagguccagccccagcucgagauggagcugaccccgguggugcagacgaucgaggucaacuccuucagcggcuaccugaagcucaccgacaacguguacaucaagaacgccgacaucguggaggaggcgaagaaggucaagcccaccgugguggucaacgccgccaacguguaccugaagcacgggggcggcguggccggggcccugaacaaggcgaccaacaacgccaugcaggucgaguccgacgacuacaucgccacgaacggcccccucaagguggggggcagcugcguccuguccggccacaaccuggccaagcacugccuccacgugguggggcccaacgucaacaagggcgaggacauccagcugcugaagagcgccuacgagaacuucaaccagcacgaggugcuccuggcgccgcugcucuccgccgggaucuucggcgccgaccccauccacagccugcgggugugcgucgacaccgugugcaccaacguguaccuggccgucuucgacaagaaccucuacgacaagcugguguccagcuuccuggagaugaagagcgagaagcagguggagcagaagaucgccgagauccccaaggaggaggucaagcccuucaucaccgaguccaagccgagcguggagcagcgcaagcaggacgacaagaagaucaaggcgugcguggaggaggucacgaccacccucgaggagaccaaguuccugacggagaaccugcuccuguacaucgacaucaacgggaaccugcaccccgacuccgccacccucgugagcgacaucgacaucaccuuccugaagaaggacgcccccuacaucgugggcgacgucgugcaggagggcgugcugaccgccgucgugauccccacgaagaaggccgggggcaccaccgagaugcucgcgaaggcccugcggaaggugccgaccgacaacuacaucacgaccuaccccgggcagggccugaacggguacaccgucgaggaggccaagaccgugcucaagaagugcaaguccgccuucuacauccugcccagcaucaucuccaacgagaagcaggagauccugggcaccgugagcuggaaccuccgcgagaugcuggcgcacgccgaggagacgcggaagcugaugcccgucugcguggagaccaaggccaucguguccaccauccagcgcaaguacaagggcaucaagauccaggagggggucguggacuacggcgcccgguucuacuucuacaccagcaagacgaccguggccucccugaucaacacccucaacgaccugaacgagacccuggucacgaugccgcucggguacgugacccacggccugaaccuggaggaggcggcccgcuacaugcggagccucaaggugcccgccaccgucuccgugagcucccccgacgccgugaccgccuacaacggguaccugacgagcuccagcaagacccccgaggagcacuucaucgagaccaucucccuggcgggcagcuacaaggacuggagcuacuccggccagagcacccagcucgggaucgaguuccugaagcgcggcgacaaguccgucuacuacacgagcaacccgaccaccuuccaccuggacggggaggugaucaccuucgacaaccucaagacgcugcugucccuccgggaggugcgcaccaucaaggucuucaccaccguggacaacaucaaccugcacacgcagguggucgacaugagcaugaccuacggccagcaguucggccccaccuaccuggacggggccgacgugaccaagaucaagccccacaacucccacgagggcaagacguucuacgugcucccgaacgacgacacccugcgggucgaggccuucgaguacuaccacaccaccgaccccagcuuccuggggcgcuacauguccgcccucaaccacacgaagaaguggaaguacccccaggugaacggccugaccagcaucaagugggccgacaacaacugcuaccuggcgaccgcccuccugacccugcagcagaucgagcucaaguucaaccccccggcccugcaggacgccuacuaccgggcgcgcgccggggaggccgccaacuucugcgcccugauccucgcguacugcaacaagacggugggcgagcugggcgacguccgggagaccauguccuaccuguuccagcacgccaaccucgacagcugcaagcgcgugcugaacgucgugugcaagaccugcgggcagcagcagaccacccugaagggcguggaggccgucauguacauggggacgcucuccuacgagcaguucaagaagggcgugcagauccccugcaccugcgggaagcaggccaccaaguaccuggugcagcaggagagccccuucgucaugauguccgcccccccggcgcaguacgagcugaagcacggcaccuucacgugcgccagcgaguacaccggcaacuaccagugcgggcacuacaagcacaucaccuccaaggagacccucuacugcaucgacggcgcccugcugacgaagagcagcgaguacaaggggcccaucaccgacguguucuacaaggagaacuccuacaccaccacgaucaagcccgugaccuacaagcucgacggcgucgugugcaccgagaucgaccccaagcuggacaacuacuacaagaaggacaacagcuacuucaccgagcagccgaucgaccuggugcccaaccagcccuaccccaacgccuccuucgacaacuucaaguucgucugcgacaacaucaaguucgccgacgaccucaaccagcugacgggguacaagaagccggcgagccgggagcugaaggugaccuucuuccccgaccucaacggcgacguggucgccaucgacuacaagcacuacacccccuccuucaagaagggcgccaagcugcugcacaagcccaucguguggcacgugaacaacgccaccaacaaggcgacguacaagccgaacaccuggugcauccgcugccucuggagcaccaagcccgucgagaccuccaacagcuucgacgugcugaaguccgaggacgcccaggggauggacaaccuggccugcgaggaccucaagcccgugagcgaggaggucguggagaaccccacgauccagaaggacgugcuggagugcaacgucaagaccaccgagguggugggcgacaucauccugaagccggccaacaacucccucaagaucaccgaggaggucgggcacacggaccugauggccgcguacguggacaacagcucccugaccaucaagaagcccaacgagcucagccgggugcugggccugaagacccucgccacccacgggcuggccgccgucaacuccgugcccugggacacgaucgccaacuacgcgaagccguuccugaacaagguggucagcaccaccaccaacaucgugacgcgcugccucaaccgcgugugcaccaacuacaugcccuacuucuucacccugcugcuccagcugugcaccuucacccgguccacgaacagccgcaucaaggccuccaugcccaccaccaucgccaagaacaccgucaagagcgugggcaaguucugccuggaggccagcuucaacuaccucaagucccccaacuucagcaagcugaucaacaucaucaucugguuccugcuccuguccgugugccugggcagccucaucuacuccacggccgcgcuggggguccugaugagcaaccucggcaugccguccuacugcaccggguaccgggagggcuaccugaacagcaccaacgugaccaucgccacguacugcaccggcuccauccccugcagcgugugccuguccgggcucgacagccuggacaccuaccccucccuggagaccauccagaucacgaucagcuccuucaagugggaccucaccgccuucggccuggucgccgagugguuccuggccuacauccucuucacccgcuucuucuacgugcuggggcuggcggccaucaugcagcucuucuucagcuacuucgccgugcacuucaucuccaacagcuggcugauguggcugaucaucaaccugguccagauggcccccaucuccgcgauggugcggauguacaucuucuucgccagcuucuacuacguguggaagagcuacguccacgugguggacggcugcaacuccagcaccugcaugaugugcuacaagcgcaaccgggccacgcgcgucgagugcaccaccaucgugaacgggguccggcgcuccuucuacguguacgccaacggcggcaagggguucugcaagcuccacaacuggaacugcgugaacugcgacaccuucugcgccggcagcacguucaucuccgacgaggucgcgcgggaccugagccugcaguucaagcgcccgaucaaccccaccgaccaguccagcuacaucguggacuccgugaccgucaagaacgggagcauccaccucuacuucgacaaggccggccagaagaccuacgagcggcacucccugagccacuucgugaaccuggacaaccuccgcgccaacaacacgaaggggucccugcccaucaacgugaucgucuucgacggcaagagcaagugcgaggaguccagcgccaaguccgccagcguguacuacucccagcugaugugccagcccauccuccugcuggaccaggcgcucgugagcgacgucggcgacagcgccgagguggccgugaagauguucgacgccuacgucaacaccuucuccagcaccuucaacgugccgauggagaagcugaagacccugguggccacggcggaggccgagcucgccaagaacgucucccuggacaacgugcugagcaccuucaucuccgccgcgcggcagggguucguggacagcgacgucgagaccaaggacgugguggagugccucaagcugucccaccagagcgacaucgaggucaccggcgacuccugcaacaacuacaugcugacguacaacaagguggagaacaugaccccccgcgaccucggggccugcaucgacugcagcgcccggcacaucaacgcccagguggccaagucccacaacaucgcgcugaucuggaacgucaaggacuucaugagccuguccgagcagcuccgcaagcagauccggagcgccgccaagaagaacaaccugcccuucaagcugaccugcgccaccacgcgccagguggugaacgucgugaccaccaagaucgcccucaagggcgggugaggacuagucccuguucccagagcccacuuuuuuuucuuuuuuugaaauaaaauagccugucuuucagaucucaaaggcucuuuucagagccaccaaaaaaaaaaaaaaaaaaaaaaaaaaaaaaaaaaaaaaaaaaaaaaaaaaaaaaaaaaaaaaaaaaaaaaaaaaaaaaaaaaaaaaaaaaaaaaaaaaaaa

SEQ ID NO: 19628 - RNA, 6113 nt, Artificial Sequence
  SARS-CoV-2__MT846623.1__non-structural protein 3 (NSP3) mRNA gc
aggagagucccgcagucggcguccagcggcucugcuuguucgugugugugucguugcaggccuuauucaagcuuaccauggcccccaccaaggugaccuucggcgacgacacggucaucgaggugcagggguacaagagcgugaacaucaccuucgagcuggacgagcgcaucgacaagguccucaacgagaagugcuccgccuacaccguggagcugggcaccgaggugaacgaguucgcgugcgucguggccgacgccgugaucaagacgcugcagccggucagcgagcuccugaccccccuggggaucgaccucgacgagugguccauggccaccuacuaccuguucgacgagagcggcgaguucaagcuggccucccacauguacugcagcuucuacccccccgacgaggacgaggaggagggggacugcgaggaggaggaguucgagccguccacccaguacgaguacggcacggaggacgacuaccagggcaagccccucgaguucggggcgaccagcgccgcccugcagcuggaggaggagcaggaggaggacuggcucgacgacgacucccagcagaccgugggccagcaggacgggagcgaggacaaccagaccacgaccauccagaccaucguggagguccagccccagcuggagauggagcugacccccguggugcagacgaucgaggucaacuccuucagcggcuaccucaagcugaccgacaacguguacaucaagaacgccgacaucguggaggaggcgaagaaggucaagccgaccgugguggucaacgccgccaacguguaccugaagcacgggggcggcguggccggggcccucaacaaggcgaccaacaacgccaugcaggucgaguccgacgacuacaucgccacgaacggcccccugaagguggggggcagcugcguccuguccggccacaaccucgccaagcacugccugcacgugguggggcccaacgucaacaagggcgaggacauccagcugcucaagagcgccuacgagaacuucaaccagcacgaggugcugcuggcgccccuccuguccgccgggaucuucggcgccgacccgauccacagccugcgggugugcgucgacaccgugcgcaccaacguguaccucgccgucuucgacaagaaccuguacgacaagcugguguccagcuuccucgagaugaagagcgagaagcagguggagcagaagaucgccgagauccccaaggaggaggucaagcccuucaucaccgaguccaagcccagcguggagcagcggaagcaggacgacaagaagaucaaggcgugcguggaggaggucacgaccacccuggaggagaccaaguuccugacggagaaccuccugcuguacaucgacaucaacgggaaccuccacccggacuccgccacccuggugagcgacaucgacaucaccuuccugaagaaggacgcccccuacaucgugggcgacgucgugcaggagggcgugcucaccgccgucgugauccccacgaagaaggccgggggcaccaccgagaugcuggcgaaggcccugcgcaaggugcccaccgacaacuacaucacgaccuacccggggcagggccucaacggguacaccgucgaggaggccaagaccgugcugaagaagugcaaguccgccuucuacauccugcccagcaucaucuccaacgagaagcaggagauccucggcaccgugagcuggaaccugcgggagaugcuggcgcacgccgaggagacgcgcaagcugaugcccgucugcguggagaccaaggccaucguguccaccauccagcggaaguacaagggcaucaagauccaggagggggucguggacuacggcgcccgcuucuacuucuacaccagcaagacgaccguggccucccucaucaacacccugaacgaccugaacgagacccucgucacgaugccccugggguacgugacccacggccugaaccucgaggaggcggcccgguacaugcgcagccugaaggugccggccaccgucuccgugagcucccccgacgccgugaccgccuacaacggguaccugacgagcuccagcaagacccccgaggagcacuucaucgagaccaucucccucgcgggcagcuacaaggacuggagcuacuccggccagagcacccagcuggggaucgaguuccugaagcggggcgacaaguccgucuacuacacgagcaaccccaccaccuuccaccucgacggggaggugaucaccuucgacaaccugaagacgcugcucucccugcgcgaggugcggaccaucaaggucuucaccaccguggacaacaucaaccugcacacgcagguggucgacaugagcaugaccuacggccagcaguucggcccgaccuaccucgacggggccgacgugaccaagaucaagccccacaacucccacgagggcaagacguucuacgugcugcccaacgacgacacccugcgcgucgaggccuucgaguacuaccacaccaccgacccgagcuuccucgggcgguacauguccgcccugaaccacacgaagaaguggaaguacccccaggugaacggccugaccagcaucaagugggccgacaacaacugcuaccucgcgaccgcccugcugacccuccagcagaucgagcugaaguucaacccccccgcccugcaggacgccuacuaccgcgcgcgggccggggaggccgccaacuucugcgcccucauccuggcguacugcaacaagacggugggcgagcugggcgacguccgcgagaccauguccuaccucuuccagcacgccaaccuggacagcugcaagcgggugcugaacgucgugugcaagaccugcgggcagcagcagaccacccucaagggcguggaggccgucauguacauggggacgcuguccuacgagcaguucaagaagggcgugcagaucccgugcaccugcgggaagcaggccaccaaguaccuggugcagcaggagagccccuucgucaugauguccgccccccccgcgcaguacgagcucaagcacggcaccuucacgugcgccagcgaguacaccggcaacuaccagugcgggcacuacaagcacaucaccuccaaggagacccuguacugcaucgacggcgcccugcucacgaagagcagcgaguacaaggggccgaucaccgacguguucuacaaggagaacuccuacaccaccacgaucaagcccgugaccuacaagcuggacggcgucgugugcaccgagaucgaccccaagcuggacaacuacuacaagaaggacaacagcuacuucaccgagcagcccaucgaccucgugccgaaccagcccuaccccaacgccuccuucgacaacuucaaguucgucugcgacaacaucaaguucgccgacgaccugaaccagcugacgggguacaagaagcccgcgagccgcgagcucaaggugaccuucuucccggaccugaacggcgacguggucgccaucgacuacaagcacuacacccccuccuucaagaagggcgccaagcugcuccacaagcccaucguguggcacgugaacaacgccaccaacaaggcgacguacaagcccaacaccuggugcauccggugccuguggagcaccaagccggucgagaccuccaacagcuucgacgugcugaaguccgaggacgcccaggggauggacaaccucgccugcgaggaccugaagcccgugagcgaggaggucguggagaaccccacgauccagaaggacgugcuggagugcaacgucaagaccaccgagguggugggcgacaucauccucaagcccgccaacaacucccugaagaucaccgaggaggucgggcacacggaccugauggccgcguacguggacaacagcucccucaccaucaagaagccgaacgagcugagccgcgugcugggccucaagacccuggccacccacgggcuggccgccgucaacuccgugcccugggacacgaucgccaacuacgcgaagcccuuccucaacaagguggucagcaucaccaccaacaucgugacccgcugccugaaccgggugugcacgaacuacaugccguacuucuucacccugcuccugcagcugugcaccuucacccgcuccaccaacagccggaucaaggccuccaugcccacgaccaucgccaagaacaccgucaagagcgugggcaaguucugccucgaggccagcuucaacuaccugaagucccccaacuucagcaagcugaucaacaucaucaucugguuccuccugcuguccgugugccucggcagccugaucuacuccaccgccgcgcuggggguccucaugagcaaccugggcaugcccuccuacugcacgggguaccgcgagggcuaccugaacagcaccaacgugaccaucgccaccuacugcacgggcuccaucccgugcagcgugugccucuccgggcuggacagccuggacaccuaccccucccucgagaccauccagaucaccaucagcuccuucaagugggaccugacggccuucggccuggucgccgagugguuccucgccuacauccuguucacccgguucuucuacgugcuggggcucgcggccaucaugcagcuguucuucagcuacuucgccgugcacuucaucuccaacagcuggcugauguggcugaucaucaaccucguccagauggcccccaucuccgcgauggugcgcauguacaucuucuucgccagcuucuacuacguguggaagagcuacguccacgugguggacggcugcaacuccagcaccugcaugaugugcuacaagcggaaccgcgccacccgggucgagugcacgaccaucgugaacgggguccgccgguccuucuacguguacgccaacggcggcaagggguucugcaagcugcacaacuggaacugcgugaacugcgacaccuucugcgccggcagcaccuucaucuccgacgaggucgcgcgcgaccugagccuccaguucaagcggcccaucaacccgacggaccaguccagcuacaucguggacuccgugaccgucaagaacgggagcauccaccuguacuucgacaaggccggccagaagaccuacgagcgccacucccugagccacuucgugaaccucgacaaccugcgggccaacaacaccaaggggucccugcccaucaacgugaucgucuucgacggcaagagcaagugcgaggaguccagcgccaaguccgccagcguguacuacucccagcucaugugccagcccauccugcugcucgaccaggcgcuggugagcgacgucggcgacagcgccgagguggccgugaagauguucgacgccuacgucaacacguucuccagcaccuucaacgugcccauggagaagcugaagacccucguggccaccgcggaggccgagcuggccaagaacgucucccuggacaacgugcucagcacguucaucuccgccgcgcgccagggguucguggacagcgacgucgagaccaaggacgugguggagugccugaagcugucccaccagagcgacaucgaggucaccggcgacuccugcaacaacuacaugcucaccuacaacaagguggagaacaugacgccgcgggaccugggggccugcaucgacugcagcgcccgccacaucaacgcccagguggccaagucccacaacaucgcgcugaucuggaacgucaaggacuucaugagccucuccgagcagcugcggaagcagauccgcagcgccgccaagaagaacaaccugcccuucaagcucaccugcgccaccacccgccagguggugaacgucgugacgaccaagaucgcccugaagggcgggugaggacuagucccuguucccagagcccacuuuuuuuucuuuuuuugaaauaaaauagccugucuuucagaucucaaaggcucuuuucagagccaccaaaaaaaaaaaaaaaaaaaaaaaaaaaaaaaaaaaaaaaaaaaaaaaaaaaaaaaaaaaaaaaaaaaaaaaaaaaaaaaaaaaaaaaaaaaaaaaaaaaaa

SEQ ID NO: 19629 - RNA, 6113 nt, Artificial Sequence
  SARS-CoV-2__MT846644.1__non-structural protein 3 (NSP3) mRNA gc
aggagagucccgcagucggcguccagcggcucugcuuguucgugugugugucguugcaggccuuauucaagcuuaccauggcccccaccaaggugaccuucggcgacgacacggucaucgaggugcagggguacaagagcgugaacaucaccuucgagcuggacgagcgcaucgacaagguccucaacgagaagugcuccgccuacaccguggagcugggcaccgaggugaacgaguucgcgugcgucguggccgacgccgugaucaagacgcugcagccggucagcgagcuccugaccccccuggggaucgaccucgacgagugguccauggccaccuacuaccuguucgacgagagcggcgacuucaagcuggccucccacauguacugcagcuucuacccccccgacgaggacgaggaggagggggacugcgaggaggaggaguucgagccguccacccaguacgaguacggcacggaggacgacuaccagggcaagccccucgaguucggggcgaccagcgccgcccugcagcccgaggaggagcaggaggaggacuggcuggacgacgacucccagcagaccgugggccagcaggacgggagcgaggacaaccagaccacgaccauccagaccaucguggagguccagccccagcucgagauggagcugaccccgguggugcagacgaucgaggucaacuccuucagcggcuaccugaagcucaccgacaacguguacaucaagaacgccgacaucguggaggaggcgaagaaggucaagcccaccgugguggucaacgccgccaacguguaccugaagcacgggggcggcguggccggggcccugaacaaggcgaccaacaacgccaugcaggucgaguccgacgacuacaucgccacgaacggcccccucaagguggggggcagcugcguccuguccggccacaaccuggccaagcacugccuccacgugguggggcccaacgucaacaagggcgaggacauccagcugcugaagagcgccuacgagaacuucaaccagcacgaggugcuccuggcgccgcugcucuccgccgggaucuucggcgccgaccccauccacagccugcgggugugcgucgacaccgugcgcaccaacguguaccuggccgucuucgacaagaaccucuacgacaagcugguguccagcuuccuggagaugaagagcgagaagcagguggagcagaagaucgccgagauccccaaggaggaggucaagcccuucaucaccgaguccaagccgagcguggagcagcggaagcaggacgacaagaagaucaaggcgugcguggaggaggucacgaccacccucgaggagaccaaguuccugacggagaaccugcuccuguacaucgacaucaacgggaaccugcaccccgacuccgccacccucgugagcgacaucgacaucaccuuccugaagaaggacgcccccuacaucgugggcgacgucgugcaggagggcgugcugaccgccgucgugauccccacgaagaaggccgggggcaccaccgagaugcucgcgaaggcccugcgcaaggugccgaccgacaacuacaucacgaccuaccccgggcagggccugaacggguacaccgucgaggaggccaagaccgugcucaagaagugcaaguccgccuucuacauccugcccagcaucaucuccaacgagaagcaggagauccugggcaccgugagcuggaaccuccgggagaugcuggcgcacgccgaggagacgcgcaagcugaugcccgucugcguggagaccaaggccaucguguccaccauccagcggaaguacaagggcaucaagauccaggagggggucguggacuacggcgcccgcuucuacuucuacaccagcaagacgaccguggccucccugaucaacacccucaacgaccugaacgagacccuggucacgaugccgcucggguacgugacccacggccugaaccuggaggaggcggcccgguacaugcgcagccucaaggugcccgccaccgucuccgugagcucccccgacgccgugaccgccuacaacggguaccugacgagcuccagcaagacccccgaggagcacuucaucgagaccaucucccuggcgggcagcuacaaggacuggagcuacuccggccagagcacccagcucgggaucgaguuccugaagcggggcgacaaguccgucuacuacacgagcaacccgaccaccuuccaccuggacggggaggugaucaccuucgacaaccucaagacgcugcugucccuccgcgaggugcggaccaucaaggucuucaccaccguggacaacaucaaccugcacacgcagguggucgacaugagcaugaccuacggccagcaguucggccccaccuaccuggacggggccgacgugaccaagaucaagccccacaacucccacgagggcaagacguucuacgugcucccgaacgacgacacccugcgcgucgaggccuucgaguacuaccacaccaccgaccccagcuuccuggggcgguacauguccgcccucaaccacacgaagaaguggaaguacccccaggugaacggccugaccagcaucaagugggccgacaacaacugcuaccuggcgaccgcccuccugacccugcagcagaucgagcucaaguucaaccccccggcccugcaggacgccuacuaccgcgcgcgggccggggaggccgccaacuucugcgcccugauccucgcguacugcaacaagacggugggcgagcugggcgacguccgcgagaccauguccuaccuguuccagcacgccaaccucgacagcugcaagcgggugcugaacgucgugugcaagaccugcgggcagcagcagaccacccugaagggcguggaggccgucauguacauggggacgcucuccuacgagcaguucaagaagggcgugcagauccccugcaccugcgggaagcaggccaccaaguaccuggugcagcaggagagccccuucgucaugauguccgcccccccggcgcaguacgagcugaagcacggcaccuucacgugcgccagcgaguacaccggcaacuaccagugcgggcacuacaagcacaucaccuccaaggagacccucuacugcaucgacggcgcccugcugacgaagagcagcgaguacaaggggcccaucaccgacguguucuacaaggagaacuccuacaccaccacgaucaagcccgugaccuacaagcucgacggcgucgugugcaccgagaucgaccccaagcuggacaacuacuacaagaaggacaacagcuacuucaccgagcagccgaucgaccuggugcccaaccagcccuaccccaacgccuccuucgacaacuucaaguucgucugcgacaacaucaaguucgccgacgaccucaaccagcugacgggguacaagaagccggcgagccgcgagcugaaggugaccuucuuccccgaccucaacggcgacguggucgccaucgacuacaagcacuacacccccuccuucaagaagggcgccaagcugcugcacaagcccaucguguggcacgugaacaacgccaccaacaaggcgacguacaagccgaacaccuggugcauccggugccucuggagcaccaagcccgucgagaccuccaacagcuucgacgugcugaaguccgaggacgcccaggggauggacaaccuggccugcgaggaccucaagcccgugagcgaggaggucguggagaaccccacgauccagaaggacgugcuggagugcaacgucaagaccaccgagguggugggcgacaucauccugaagccggccaacaacucccucaagaucaccgaggaggucgggcacacggaccugauggccgcguacguggacaacagcucccugaccaucaagaagcccaacgagcucagccgcgugcugggccugaagacccucgccacccacgggcuggccgccgucaacuccgugcccugggacacgaucgccaacuacgcgaagccguuccugaacaagguggucagcaccaccaccaacaucgugacgcgcugccucaaccgggugugcaccaacuacaugcccuacuucuucacccugcugcuccagcugugcaccuucacccgcuccacgaacagccggaucaaggccuccaugcccaccaccaucgccaagaacaccgucaagagcgugggcaaguucugccuggaggccagcuucaacuaccucaagucccccaacuucagcaagcugaucaacaucaucaucugguuccugcuccuguccgugugccugggcagccucaucuacuccacggccgcgcuggggguccugaugagcaaccucggcaugccguccuacugcaccggguaccgcgagggcuaccugaacagcaccaacgugaccaucgccacguacugcaccggcuccauccccugcagcgugugccuguccgggcucgacagccuggacaccuaccccucccuggagaccauccagaucacgaucagcuccuucaagugggaccucaccgccuucggccuggucgccgagugguuccuggccuacauccucuucacccgguucuucuacgugcuggggcuggcggccaucaugcagcucuucuucagcuacuucgccgugcacuucaucuccaacagcuggcugauguggcugaucaucaaccugguccagauggcccccaucuccgcgauggugcgcauguacaucuucuucgccagcuucuacuacguguggaagagcuacguccacgugguggacggcugcaacuccagcaccugcaugaugugcuacaagcggaaccgcgccacgcgggucgagugcaccaccaucgugaacgggguccgccgguccuucuacguguacgccaacggcggcaagggguucugcaagcuccacaacuggaacugcgugaacugcgacaccuucugcgccggcagcacguucaucuccgacgaggucgcgcgcgaccugagccugcaguucaagcggccgaucaaccccaccgaccaguccagcuacaucguggacuccgugaccgucaagaacgggagcauccaccucuacuucgacaaggccggccagaagaccuacgagcgccacucccugagccacuucgugaaccuggacaaccuccgggccaacaacacgaaggggucccugcccaucaacgugaucgucuucgacggcaagagcaagugcgaggaguccagcgccaaguccgccagcguguacuacucccagcugaugugccagcccauccuccugcuggaccaggcgcucgugagcgacgucggcgacagcgccgagguggccgugaagauguucgacgccuacgucaacaccuucuccagcaccuucaacgugccgauggagaagcugaagacccugguggccacggcggaggccgagcucgccaagaacgucucccuggacaacgugcugagcaccuucaucuccgccgcgcgccagggguucguggacagcgacgucgagaccaaggacgugguggagugccucaagcugucccaccagagcgacaucgaggucaccggcgacuccugcaacaacuacaugcugacguacaacaagguggagaacaugaccccccgggaccucggggccugcaucgacugcagcgcccgccacaucaacgcccagguggccaagucccacaacaucgcgcugaucuggaacgucaaggacuucaugagccuguccgagcagcuccggaagcagauccgcagcgccgccaagaagaacaaccugcccuucaagcugaccugcgccaccacgcgccagguggugaacgucgugaccaccaagaucgcccucaagggcgggugaggacuagucccuguucccagagcccacuuuuuuuucuuuuuuugaaauaaaauagccugucuuucagaucucaaaggcucuuuucagagccaccaaaaaaaaaaaaaaaaaaaaaaaaaaaaaaaaaaaaaaaaaaaaaaaaaaaaaaaaaaaaaaaaaaaaaaaaaaaaaaaaaaaaaaaaaaaaaaaaaaaaa

SEQ ID NO: 19630 - RNA, 6113 nt, Artificial Sequence
  SARS-CoV-2__MT846686.1__non-structural protein 3 (NSP3) mRNA gc
aggagagucccgcagucggcguccagcggcucugcuuguucgugugugugucguugcaggccuuauucaagcuuaccauggcccccaccaaggugaccuucggcgacgacacggucaucgaggugcagggguacaagagcgugaacaucaccuucgagcuggacgagcgcaucgacaagguccucaacgagaagugcuccgccuacaccguggagcugggcaccgaggugaacgaguucgcgugcgucguggccgacgccgugaucaagacgcugcagccggucagcgagcuccugaccccccuggggaucgaccucgacgagugguccauggccaccuacuaccuguucgacgagagcggcgaguucaagcuggccucccacauguacugcagcuucuacccccccgacgaggacgaggaggagggggacugcgaggaggaggaguucgagccguccacccaguacgaguacggcacggaggacgacuaccagggcaagccccucgaguucggggcgaccagcgccgcccugcagcccgaggaggagcaggaggaggacuggcuggacgacgacucccagcagaccgugggccagcaggacgggagcgaggacaaccagaccacgaccauccagaccaucguggagguccagccccagcucgagauggagcugaccccgguggugcagacgaucgaggucaacuccuucagcggcuaccugaagcucaccgacaacguguacaucaagaacgccgacaucguggaggaggcgaagaaggucaagcccaccgugguggucaacgccgccaacguguaccugaagcacgggggcggcguggccggggcccugaacaaggcgaccaacaacgccaugcaggucgaguccgacgacuacaucgccacgaacggcccccucaagguggggggcagcugcguccuguccggccacaaccuggccaagcacugccuccacgugguggggcccaacgucaacaagggcgaggacauccagcugcugaagagcgccuacgagaacuucaaccagcacgaggugcuccuggcgccgcugcucuccgccgggaucuucggcgccgaccccauccacagccugcgggugugcgucgacaccgugcgcaccaacguguaccuggccgucuucgacaagaaccucuacgacaagcugguguccagcuuccuggagaugaagagcgagaagcagguggagcagaagaucgccgagauccccaaggaggaggucaagcccuucaucaccgaguccaagccgagcguggagcagcggaagcaggacgacaagaagaucaaggcgugcguggaggaggucacgaccacccucgaggagaccaaguuccugacggagaaccugcuccuguacaucgacaucaacgggaaccugcaccccgacuccgccacccucgugagcgacaucgacaucaccuuccugaagaaggacgcccccuacaucgugggcgacgucgugcaggagggcgugcugaccgccgucgugauccccacgaagaaggccgggggcaccaccgagaugcucgcgaaggcccugcgcaaggugccgaccgacaacuacaucacgaccuaccccgggcagggccugaacggguacaccgucgaggaggccaagaccgugcucaagaagugcaaguccgccuucuacauccugcccagcaucaucuccaacgagaagcaggagauccugggcaccgugagcuggaaccuccgggagaugcuggcgcacgccgaggagacgcgcaagcugaugcccgucugcguggagaccaaggccaucguguccaccauccagcggaaguacaagggcaucaagauccaggagggggucguggacuacggcgcccgcuucuacuucuacaccagcaagacgaccguggccucccugaucaacacccucaacgaccugaacgagacccuggucacgaugccgcucggguacgugacccacggccugaaccuggaggaggcggcccgguacaugcgcagccucaaggugcccgccaccgucuccgugagcucccccgacgccgugaccgccuacaacggguaccugacgagcuccagcaagacccccgaggagcacuucaucgagaccaucucccuggcgggcagcuacaaggacuggagcuacuccggccagagcacccagcucgggaucgaguuccugaagcggggcgacaaguccgucuacuacacgagcaacccgaccaccuuccaccuggacggggaggugaucaccuucgacaaccucaagacgcugcugucccuccgcgaggugcggaccaucaaggucuucaccaccguggacaacaucaaccugcacacgcagguggucgacaugagcaugaccuacggccagcaguucggccccaccuaccuggacggggccgacgugaccaagaucaagccccacaacucccacgagggcaagacguucuacgugcucccgaacgacgacacccugcgcgucgaggccuucgaguacuaccacaccaccgaccccagcuuccuggggcgguacauguccgcccucaaccacacgaagaaguggaaguacccccaggugaacggccugaccagcaucaagugggccgacaacaacugcuaccuggcgaccgcccuccugacccugcagcagaucgagcucaaguucaaccccccggcccugcaggacgccuacuaccgcgcgcgggccggggaggccgccaacuucugcgcccugauccucgcguacugcaacaagacggugggcgagcugggcgacguccgcgagaccauguccuaccuguuccagcacgccaaccucgacagcugcaagcgggugcugaacgucgugugcaagaccugcgggcagcagcagaccacccugaagggcguggaggccgucauguacauggggacgcucuccuacgagcaguucaagaagggcgugcagauccccugcaccugcgggaagcaggccaccaaguaccuggugcagcaggagagccccuucgucaugauguccgcccccccggcgcaguacgagcugaagcacggcaccuucacgugcgccagcgaguacaccggcaacuaccagugcgggcacuacaagcacaucaccuccaaggagacccucuacugcaucgacggcgcccugcugacgaagagcagcgaguacaaggggcccaucaccgacguguucuacaaggagaacuccuacaccaccacgaucaagcccgugaccuacaagcucgacggcgucgugugcaccgagaucgaccccaagcuggacaacuacuacaagaaggacaacagcuacuucaccgagcagccgaucgaccuggugcccaaccagcccuaccccaacgccuccuucgacaacuucaaguucgucugcgacaacaucaaguucgccgacgaccucaaccagcugacgggguacaagaagccggcgagccgcgagcugaaggugaccuucuuccccgaccucaacggcgacguggucgccaucgacuacaagcacuacacccccuccuucaagaagggcgccaagcugcugcacaagcccaucguguggcacgugaacaacgccaccaacaaggcgacguacaagccgaacaccuggugcauccggugccucuggagcaccaagcccgucgagaccuccaacagcuucgacgugcugaaguccgaggacgcccaggggauggacaaccuggccugcgaggaccucaagcccgugagcgaggaggucguggagaaccccacgauccagaaggacgugcuggagugcaacgucaagaccaccgagguggugggcgacaucauccugaagccggccaacaacucccucaagaucaccgaggaggucgggcacacggaccugauggccgcguacguggacaacagcucccugaccaucaagaagcccaacgagcucagccgcgugcugggccugaagacccucgccacccacgggcuggccgccgucaacuccgugcccugggacacgaucgccaacuacgcgaagccguuccugaacaagguggucagcaccaccaccaacaucgugacgcgcugccucaaccgggugugcaccaacuacaugcccuacuucuucacccugcugcuccagcugugcaccuucacccgcuccacgaacagccggaucaaggccuccaugcccaccaccaucgccaagaacaccgucaagagcgugggcaaguucugccuggaggccagcuucaacuaccucaagucccccaacuucagcaagcugaucaacaucaucaucugguuccugcuccuguccgugugccugggcagccucaucuacuccacggccgcgcuggggguccugaugagcaaccucggcaugccguccuacugcaccggguaccgcgagggcuaccugaacagcaccaacgugaccaucgccacguacugcaccggcuccauccccugcagcgugugccuguccgggcucgacagccuggacaccuaccccucccuggagaccauccagaucacgaucagcuccuucaagugggaccucaccgccuucggccuggucgccgagugguuccuggccuacauccucuucacccgguucuucuacgugcuggggcuggcggccaucaugcagcucuucuucagcuacuucgccgugcacuucaucuccaacagcuggcugauguggcugaucaucaaccugguccagauggcccccaucuccgcgauggugcgcauguacaucuucuucgccagcuucuacuacguguggaagagcuacguccacgugguggacggcugcaacuccagcaccugcaugaugugcuacaagcggaaccgcgccacgcgggucgagugcaccaccaucgugaacggggucaagcgcuccuucuacguguacgccaacggcggcaagggguucugcaagcuccacaacuggaacugcgugaacugcgacaccuucugcgccggcagcacguucaucuccgacgaggucgcgcgggaccugagccugcaguucaagcgcccgaucaaccccaccgaccaguccagcuacaucguggacuccgugaccgucaagaacgggagcauccaccucuacuucgacaaggccggccagaagaccuacgagcggcacucccugagccacuucgugaaccuggacaaccuccgcgccaacaacacgaaggggucccugcccaucaacgugaucgucuucgacggcaagagcaagugcgaggaguccagcgccaaguccgccagcguguacuacucccagcugaugugccagcccauccuccugcuggaccaggcgcucgugagcgacgucggcgacagcgccgagguggccgugaagauguucgacgccuacgucaacaccuucuccagcaccuucaacgugccgauggagaagcugaagacccugguggccacggcggaggccgagcucgccaagaacgucucccuggacaacgugcugagcaccuucaucuccgccgcgcggcagggguucguggacagcgacgucgagaccaaggacgugguggagugccucaagcugucccaccagagcgacaucgaggucaccggcgacuccugcaacaacuacaugcugacguacaacaagguggagaacaugaccccccgcgaccucggggccugcaucgacugcagcgcccggcacaucaacgcccagguggccaagucccacaacaucgcgcugaucuggaacgucaaggacuucaugagccuguccgagcagcuccgcaagcagauccggagcgccgccaagaagaacaaccugcccuucaagcugaccugcgccaccacgcgccagguggugaacgucgugaccaccaagaucgcccucaagggcgggugaggacuagucccuguucccagagcccacuuuuuuuucuuuuuuugaaauaaaauagccugucuuucagaucucaaaggcucuuuucagagccaccaaaaaaaaaaaaaaaaaaaaaaaaaaaaaaaaaaaaaaaaaaaaaaaaaaaaaaaaaaaaaaaaaaaaaaaaaaaaaaaaaaaaaaaaaaaaaaaaaaaaa

SEQ ID NO: 19631 - RNA, 6113 nt, Artificial Sequence
  SARS-CoV-2__MT847211.1__non-structural protein 3 (NSP3) mRNA gc
aggagagucccgcagucggcguccagcggcucugcuuguucgugugugugucguugcaggccuuauucaagcuuaccauggcccccaccaaggugaccuucggcgacgacacggucaucgaggugcagggguacaagagcgugaacaucaccuucgagcuggacgagcgcaucgacaagguccucaacgagaagugcuccgccuacaccguggagcugggcaccgaggugaacgaguucgcgugcgucguggccgacgccgugaucaagacgcugcagccggucagcgagcuccugaccccccuggggaucgaccucgacgagugguccauggccaccuacuaccuguucgacgagagcggcgaguucaagcuggccucccacauguacugcagcuucuacccccccgacgaggacgaggaggagggggacugcgaggaggaggaguucgagccguccacccaguacgaguacggcacggaggacgacuaccagggcaagccccucgaguucggggcgaccagcgccgcccugcagcccgaggaggagcaggaggaggacuggcuggacgacgacucccagcagaccgugggccagcaggacgggagcgaggacaaccagaccacgaccauccagaccaucguggagguccagccccagcucgagauggagcugaccccgguggugcagacgaucgaggucaacuccuucagcggcuaccugaagcucaccgacaacguguacaucaagaacgccgacaucguggaggaggcgaagaaggucaagcccaccgugguggucaacgccgccaacguguaccugaagcacgggggcggcguggccggggcccugaacaaggcgaccaacaacgccaugcaggucgaguccgacgacuacaucgccacgaacggcccccucaagguggggggcagcugcguccuguccggccacaaccuggccaagcacugccuccacgugguggggcccaacgucaacaagggcgaggacauccagcugcugaagagcgccuacgagaacuucaaccagcacgaggugcuccuggcgccgcugcucuccgccgggaucuucggcgccgaccccauccacagccugcgggugugcgucgacaccgugcgcaccaacguguaccuggccgucuucgacaagaaccucuacgacaagcugguguccagcuuccuggagaugaagagcgagaagcagguggagcagaagaucgccgagauccccaaggaggaggucaagcccuucaucaccgaguccaagccgagcguggagcagcggaagcaggacgacaagaagaucaaggcgugcguggaggaggucacgaccacccucgaggagaccaaguuccugacggagaaccugcuccuguacaucgacaucaacgggaaccugcaccccgacuccgccacccucgugagcgacaucgacaucaccuuccugaagaaggacgcccccuacaucgugggcgacgucgugcaggagggcgugcugaccgccgucgugauccccacgaagaaggccgggggcaccaccgagaugcucgcgaaggcccugcgcaaggugccgaccgacaacuacaucacgaccuaccccgggcagggccugaacggguacaccgucgaggaggccaagaccgugcucaagaagugcaaguccgccuucuacauccugcccagcaucaucuccaacgagaagcaggagauccugggcaccgugagcuggaaccuccgggagaugcuggcgcacgccgaggagacgcgcaagcugaugcccgucugcguggagaccaaggccaucguguccaccauccagcggaaguacaagggcaucaagauccaggagggggucguggacuacggcgcccgcuucuacuucuacaccagcaagacgaccguggccucccugaucaacacccucaacgaccugaacgagacccuggucacgaugccgcucggguacgugacccacggccugaaccuggaggaggcggcccgguacaugcgcagccucaaggugcccgccaccgucuccgugagcucccccgacgccgugaccgccuacaacggguaccugacgagcuccagcaagacccccgaggagcacuucaucgagaccaucucccuggcgggcagcuacaaggacuggagcuacuccggccagagcacccagcucgggaucgaguuccugaagcggggcgacaaguccgucuacuacacgagcaacccgaccaccuuccaccuggacggggaggugaucaccuucgacaaccucaagacgcugcugucccuccgcgaggugcggaccaucaaggucuucaccaccguggacaacaucaaccugcacacgcagguggucgacaugagcaugaccuacggccagcaguucggccccaccuaccuggacggggccgacgugaccaagaucaagccccacaacucccacgagggcaagacguucuacgugcucccgaacgacgacacccugcgcgucgaggccuucgaguacuaccacaccaccgaccccagcuuccuggggcgguacauguccgcccucaaccacacgaagaaguggaaguacccccaggugaacggccugaccagcaucaagugggccgacaacaacugcuaccuggcgaccgcccuccugacccugcagcagaucgagcucaaguucaaccccccggcccugcaggacgccuacuaccgcgcgcgggccggggaggccgccaacuucugcgcccugauccucgcguacugcaacaagacggugggcgagcugggcgacguccgcgagaccauguccuaccuguuccagcacgccaaccucgacagcugcaagcgggugcugaacgucgugugcaagaccugcgggcagcagcagaccacccugaagggcguggaggccgucauguacauggggacgcucuccuacgagcaguucaagaagggcgugcagauccccugcaccugcgggaagcaggccaccaaguaccuggugcagcaggagagccccuucgucaugauguccgcccccccggcgcaguacgagcugaagcacggcaccuucacgugcgccagcgaguacaccggcaacuaccagugcgggcacuacaagcacaucaccuccaaggagacccucuacugcaucgacggcgcccugcugacgaagagcagcgaguacaaggggcccaucaccgacguguucuacaaggagaacuccuacaccaccacgaucaagcccgugaccuacaagcucgacggcgucgugugcaccgagaucgaccccaagcuggacaacuacuacaagaaggacaacagcuacuucaccgagcagccgaucgaccuggugcccaaccagcccuaccccaacgccuccuucgacaacuucaaguucgucugcgacaacaucaaguucgccgacgaccucaaccagcugacgggguacaagaagccggcgagccgcgagcugaaggugaccuucuuccccgaccucaacggcgacguggucgccaucgacuacaagcacuacacccccuccuucaagaagggcgccaagcugcugcacaagcccaucguguggcacgugaacaacgccaccaacaaggcgacguacaagccgaacaccuggugcauccggugccucuggagcaccaagcccgucgagaccuccaacagcuucgacgugcugaaguccgaggacgcccaggggauggacaaccuggccugcgaggaccucaagcccgugagcgaggaggucguggagaaccccacgauccagaaggacgugcuggagugcaacgucaagaccaccgagguggugggcgacaucauccugaagccggccaacaacucccucaagaucaccgaggaggucgggcacacggaccugauggccgcguacguggacaacagcucccugaccaucaagaagcccaacgagcucagccgcgugcugggccugaagacccucgccacccacgggcuggccgccgucaacuccgugcccugggacacgaucgccaacuacgcgaagccguuccugaacaagguggucagcaccaccaccaacaucgugacguggugccucaaccgcgugugcaccaacuacaugcccuacuucuucacccugcugcuccagcugugcaccuucacccgguccacgaacagccgcaucaaggccuccaugcccaccaccaucgccaagaacaccgucaagagcgugggcaaguucugccuggaggccagcuucaacuaccucaagucccccaacuucagcaagcugaucaacaucaucaucugguuccugcuccuguccgugugccugggcagccucaucuacuccacggccgcgcuggggguccugaugagcaaccucggcaugccguccuacugcaccggguaccgggagggcuaccugaacagcaccaacgugaccaucgccacguacugcaccggcuccauccccugcagcgugugccuguccgggcucgacagccuggacaccuaccccucccuggagaccauccagaucacgaucagcuccuucaagugggaccucaccgccuucggccuggucgccgagugguuccuggccuacauccucuucacccgcuucuucuacgugcuggggcuggcggccaucaugcagcucuucuucagcuacuucgccgugcacuucaucuccaacagcuggcugauguggcugaucaucaaccugguccagauggcccccaucuccgcgauggugcggauguacaucuucuucgccagcuucuacuacguguggaagagcuacguccacgugguggacggcugcaacuccagcaccugcaugaugugcuacaagcgcaaccgggccacgcgcgucgagugcaccaccaucgugaacgggguccggcgcuccuucuacguguacgccaacggcggcaagggguucugcaagcuccacaacuggaacugcgugaacugcgacaccuucugcgccggcagcacguucaucuccgacgaggucgcgcgggaccugagccugcaguucaagcgcccgaucaaccccaccgaccaguccagcuacaucguggacuccgugaccgucaagaacgggagcauccaccucuacuucgacaaggccggccagaagaccuacgagcggcacucccugagccacuucgugaaccuggacaaccuccgcgccaacaacacgaaggggucccugcccaucaacgugaucgucuucgacggcaagagcaagugcgaggaguccagcgccaaguccgccagcguguacuacucccagcugaugugccagcccauccuccugcuggaccaggcgcucgugagcgacgucggcgacagcgccgagguggccgugaagauguucgacgccuacgucaacaccuucuccagcaccuucaacgugccgauggagaagcugaagacccugguggccacggcggaggccgagcucgccaagaacgucucccuggacaacgugcugagcaccuucaucuccgccgcgcggcagggguucguggacagcgacgucgagaccaaggacgugguggagugccucaagcugucccaccagagcgacaucgaggucaccggcgacuccugcaacaacuacaugcugacguacaacaagguggagaacaugaccccccgcgaccucggggccugcaucgacugcagcgcccggcacaucaacgcccagguggccaagucccacaacaucgcgcugaucuggaacgucaaggacuucaugagccuguccgagcagcuccgcaagcagauccggagcgccgccaagaagaacaaccugcccuucaagcugaccugcgccaccacgcgccagguggugaacgucgugaccaccaagaucgcccucaagggcgggugaggacuagucccuguucccagagcccacuuuuuuuucuuuuuuugaaauaaaauagccugucuuucagaucucaaaggcucuuuucagagccaccaaaaaaaaaaaaaaaaaaaaaaaaaaaaaaaaaaaaaaaaaaaaaaaaaaaaaaaaaaaaaaaaaaaaaaaaaaaaaaaaaaaaaaaaaaaaaaaaaaaaa

SEQ ID NO: 19632 - RNA, 6113 nt, Artificial Sequence
  SARS-CoV-2__MT847217.1__non-structural protein 3 (NSP3) mRNA gc
aggagagucccgcagucggcguccagcggcucugcuuguucgugugugugucguugcaggccuuauucaagcuuaccauggcccccaccaaggugaccuucggcgacgacacggucaucgaggugcagggguacaagagcgugaacaucaccuucgagcuggacgagcgcaucgacaagguccucaacgagaagugcuccgccuacaccguggagcugggcaccgaggugaacgaguucgcgugcgucguggccgacgccgugaucaagacgcugcagccggucagcgagcuccugaccccccuggggaucgaccucgacgagugguccauggccaccuacuaccuguucgacgagagcggcgaguucaagcuggccucccacauguacugcagcuucuacccccccgacgaggacgaggaggagggggacugcgaggaggaggaguucgagccguccacccaguacgaguacggcacggaggacgacuaccagggcaagccccucgaguucggggcgaccagcgccgcccugcagcccgaggaggagcaggaggaggacuggcuggacgacgacucccagcagaccgugggccagcaggacgggaucgaggacaaccagaccacgaccauccagaccaucguggagguccagccccagcucgagauggagcugaccccgguggugcagacgaucgaggucaacagcuucuccggcuaccugaagcucaccgacaacguguacaucaagaacgccgacaucguggaggaggcgaagaaggucaagcccaccgugguggucaacgccgccaacguguaccugaagcacgggggcggcguggccggggcccugaacaaggcgaccaacaacgccaugcaggucgagagcgacgacuacaucgccacgaacggcccccucaagguggggggcuccugcguccugagcggccacaaccuggccaagcacugccuccacgugguggggcccaacgucaacaagggcgaggacauccagcugcugaaguccgccuacgagaacuucaaccagcacgaggugcuccuggcgccgcugcucagcgccgggaucuucggcgccgaccccauccacucccugcgggugugcgucgacaccgugcgcaccaacguguaccuggccgucuucgacaagaaccucuacgacaagcuggugagcuccuuccuggagaugaagagcgagaagcagguggagcagaagaucgccgagauccccaaggaggaggucaagcccuucaucaccgagagcaagccguccguggagcagcggaagcaggacgacaagaagaucaaggcgugcguggaggaggucacgaccacccucgaggagaccaaguuccugacggagaaccugcuccuguacaucgacaucaacgggaaccugcaccccgacagcgccacccucguguccgacaucgacaucaccuuccugaagaaggacgcccccuacaucgugggcgacgucgugcaggagggcgugcugaccgccgucgugauccccacgaagaaggccgggggcaccaccgagaugcucgcgaaggcccugcgcaaggugccgaccgacaacuacaucacgaccuaccccgggcagggccugaacggguacaccgucgaggaggccaagaccgugcucaagaagugcaagagcgccuucuacauccugcccuccaucaucagcaacgagaagcaggagauccugggcaccguguccuggaaccuccgggagaugcuggcgcacgccgaggagacgcgcaagcugaugcccgucugcguggagaccaaggccaucgugagcaccauccagcggaaguacaagggcaucaagauccaggagggggucguggacuacggcgcccgcuucuacuucuacaccuccaagacgaccguggccagccugaucaacacccucaacgaccugaacgagacccuggucacgaugccgcucggguacgugacccacggccugaaccuggaggaggcggcccgguacaugcgcucccucaaggugcccgccaccgucagcguguccagccccgacgccgugaccgccuacaacggguaccugacguccagcuccaagacccccgaggagcacuucaucgagaccaucagccuggcgggcuccuacaaggacuggagcuacagcggccaguccacccagcucgggaucgaguuccugaagcggggcgacaagagcgucuacuacacguccaacccgaccaccuuccaccuggacggggaggugaucaccuucgacaaccucaagacgcugcugagccuccgcgaggugcggaccaucaaggucuucaccaccguggacaacaucaaccugcacacgcagguggucgacauguccaugaccuacggccagcaguucggccccaccuaccuggacggggccgacgugaccaagaucaagccccacaacagccacgagggcaagacguucuacgugcucccgaacgacgacacccugcgcgucgaggccuucgaguacuaccacaccaccgaccccuccuuccuggggcgguacaugagcgcccucaaccacacgaagaaguggaaguacccccaggugaacggccugaccuccaucaagugggccgacaacaacugcuaccuggcgaccgcccuccugacccugcagcagaucgagcucaaguucaaccccccggcccugcaggacgccuacuaccgcgcgcgggccggggaggccgccaacuucugcgcccugauccucgcguacugcaacaagacggugggcgagcugggcgacguccgcgagaccaugagcuaccuguuccagcacgccaaccucgacuccugcaagcgggugcugaacgucgugugcaagaccugcgggcagcagcagaccacccugaagggcguggaggccgucauguacauggggacgcucagcuacgagcaguucaagaagggcgugcagauccccugcaccugcgggaagcaggccaccaaguaccuggugcagcaggagucccccuucgucaugaugagcgcccccccggcgcaguacgagcugaagcacggcaccuucacgugcgccuccgaguacaccggcaacuaccagugcgggcacuacaagcacaucaccagcaaggagacccucuacugcaucgacggcgcccugcugacgaaguccagcgaguacaaggggcccaucaccgacguguucuacaaggagaacagcuacaccaccacgaucaagcccgugaccuacaagcucgacggcgucgugugcaccgagaucgaccccaagcuggacaacuacuacaagaaggacaacuccuacuucaccgagcagccgaucgaccuggugcccaaccagcccuaccccaacgccagcuucgacaacuucaaguucgucugcgacaacaucaaguucgccgacgaccucaaccagcugacgggguacaagaagccggcgucccgcgagcugaaggugaccuucuuccccgaccucaacggcgacguggucgccaucgacuacaagcacuacacccccagcuucaagaagggcgccaagcugcugcacaagcccaucguguggcacgugaacaacgccaccaacaaggcgacguacaagccgaacaccuggugcauccggugccucugguccaccaagcccgucgagaccagcaacuccuucgacgugcugaagagcgaggacgcccaggggauggacaaccuggccugcgaggaccucaagcccguguccgaggaggucguggagaaccccacgauccagaaggacgugcuggagugcaacgucaagaccaccgagguggugggcgacaucauccugaagccggccaacaacagccucaagaucaccgaggaggucgggcacacggaccugauggccgcguacguggacaacuccagccugaccaucaagaagcccaacgagcucucccgcgugcugggccugaagacccucgccacccacgggcuggccgccgucaacagcgugcccugggacacgaucgccaacuacgcgaagccguuccugaacaagguggucuccaccaccaccaacaucgugacgcgcugccucaaccgggugugcaccaacuacaugcccuacuucuucacccugcugcuccagcugugcaccuucacccgcagcacgaacucccggaucaaggccagcaugcccaccaccaucgccaagaacaccgucaaguccgugggcaaguucugccuggaggccagcuucaacuaccucaagagccccaacuucuccaagcugaucaacaucaucaucugguuccugcuccugagcgugugccugggcucccucaucuacagcacggccgcgcuggggguccugauguccaaccucggcaugccgagcuacugcaccggguaccgcgagggcuaccugaacuccaccaacgugaccaucgccacguacugcaccggcagcauccccugcuccgugugccugagcgggcucgacucccuggacaccuaccccagccuggagaccauccagaucacgaucuccagcuucaagugggaccucaccgccuucggccuggucgccgagugguuccuggccuacauccucuucacccgguucuucuacgugcuggggcuggcggccaucaugcagcucuucuucuccuacuucgccgugcacuucaucagcaacuccuggcugauguggcugaucaucaaccugguccagauggcccccaucagcgcgauggugcgcauguacaucuucuucgccuccuucuacuacguguggaagagcuacguccacgugguggacggcugcaacagcuccaccugcaugaugugcuacaagcggaaccgcgccacgcgggucgagugcaccaccaucgugaacgggguccgccggagcuucuacguguacgccaacggcggcaagggguucugcaagcuccacaacuggaacugcgugaacugcgacaccuucugcgccggcuccacguucaucagcgacgaggucgcgcgcgaccugucccugcaguucaagcggccgaucaaccccaccgaccagagcuccuacaucguggacagcgugaccgucaagaacggguccauccaccucuacuucgacaaggccggccagaagaccuacgagcgccacagccugucccacuucgugaaccuggacaaccuccgggccaacaacacgaaggggagccugcccaucaacgugaucgucuucgacggcaaguccaagugcgaggagagcuccgccaagagcgccuccguguacuacagccagcugaugugccagcccauccuccugcuggaccaggcgcucguguccgacgucggcgacagcgccgagguggccgugaagauguucgacgccuacgucaacaccuucagcuccaccuucaacgugccgauggagaagcugaagacccugguggccacggcggaggccgagcucgccaagaacgucagccuggacaacgugcuguccaccuucaucagcgccgcgcgccagggguucguggacuccgacgucgagaccaaggacgugguggagugccucaagcugagccaccaguccgacaucgaggucaccggcgacagcugcaacaacuacaugcugacguacaacaagguggagaacaugaccccccgggaccucggggccugcaucgacugcuccgcccgccacaucaacgcccagguggccaagagccacaacaucgcgcugaucuggaacgucaaggacuucaugucccugagcgagcagcuccggaagcagauccgcuccgccgccaagaagaacaaccugcccuucaagcugaccugcgccaccacgcgccagguggugaacgucgugaccaccaagaucgcccucaagggcgggugaggacuagucccuguucccagagcccacuuuuuuuucuuuuuuugaaauaaaauagccugucuuucagaucucaaaggcucuuuucagagccaccaaaaaaaaaaaaaaaaaaaaaaaaaaaaaaaaaaaaaaaaaaaaaaaaaaaaaaaaaaaaaaaaaaaaaaaaaaaaaaaaaaaaaaaaaaaaaaaaaaaaa

SEQ ID NO: 19633 - RNA, 6113 nt, Artificial Sequence
  SARS-CoV-2__MT847218.1__non-structural protein 3 (NSP3) mRNA gc
aggagagucccgcagucggcguccagcggcucugcuuguucgugugugugucguugcaggccuuauucaagcuuaccauggcccccaccaaggugaccuucggcgacgacacggucaucgaggugcagggguacaagagcgugaacaucaccuucgagcuggacgagcgcaucgacaagguccucaacgagaagugcuccgccuacaccguggagcugggcaccgaggugaacgaguucgcgugcgucguggccgacgccgugaucaagacgcugcagccggucagcgagcuccugaccccccuggggaucgaccucgacgagugguccauggccaccuacuaccuguucgacgagagcggcgaguucaagcuggccucccacauguacugcagcuucuacccccccgacgaggacgaggaggagggggacugcgaggaggaggaguucgagccguccacccaguacgaguacggcacggaggacgacuaccagggcaagccccucgaguucggggcgaccagcgccgccccccagcccgaggaggagcaggaggaggacuggcuggacgacgacucccagcagaccgugggccagcaggacgggagcgaggacaaccagaccacgaccauccagaccaucguggagguccagccgcagcuggagauggagcucacccccguggugcagacgaucgaggucaacuccuucagcggcuaccugaagcugaccgacaacguguacaucaagaacgccgacaucguggaggaggcgaagaaggucaagcccaccgugguggucaacgccgccaacguguaccucaagcacgggggcggcguggccggggcccugaacaaggcgaccaacaacgccaugcaggucgaguccgacgacuacaucgccacgaacggcccccugaagguggggggcagcugcguccucuccggccacaaccuggccaagcacugccugcacgugguggggccgaacgucaacaagggcgaggacauccagcuccugaagagcgccuacgagaacuucaaccagcacgaggugcugcucgcgccccugcuguccgccgggaucuucggcgccgaccccauccacagccuccgggugugcgucgacaccgugcgcaccaacguguaccuggccgucuucgacaagaaccuguacgacaagcucguguccagcuuccuggagaugaagagcgagaagcagguggagcagaagaucgccgagauccccaaggaggaggucaagccguucaucaccgaguccaagcccagcguggagcagcggaagcaggacgacaagaagaucaaggcgugcguggaggaggucacgaccacccuggaggagaccaaguuccucacggagaaccugcugcucuacaucgacaucaacgggaaccugcaccccgacuccgccacccuggugagcgacaucgacaucaccuuccucaagaaggacgcccccuacaucgugggcgacgucgugcaggagggcgugcugaccgccgucgugaucccgacgaagaaggccgggggcaccaccgagaugcuggcgaaggcccuccgcaaggugcccaccgacaacuacaucacgaccuaccccgggcagggccugaacggguacaccgucgaggaggccaagaccgugcugaagaagugcaaguccgccuucuacauccuccccagcaucaucuccaacgagaagcaggagauccugggcaccgugagcuggaaccugcgggagaugcucgcgcacgccgaggagacgcgcaagcugaugccggucugcguggagaccaaggccaucguguccaccauccagcggaaguacaagggcaucaagauccaggagggggucguggacuacggcgcccgcuucuacuucuacaccagcaagacgaccguggccucccugaucaacacccugaacgaccucaacgagacccuggucacgaugccccugggguacgugacccacggccucaaccuggaggaggcggcccgguacaugcgcagccugaaggugcccgccaccgucuccgugagcucccccgacgccgugaccgccuacaacggguaccucacgagcuccagcaagaccccggaggagcacuucaucgagaccaucucccuggcgggcagcuacaaggacuggagcuacuccggccagagcacccagcuggggaucgaguuccucaagcggggcgacaaguccgucuacuacacgagcaaccccaccaccuuccaccuggacggggaggugaucaccuucgacaaccugaagacgcuccugucccugcgcgaggugcggaccaucaaggucuucaccaccguggacaacaucaaccuccacacgcagguggucgacaugagcaugaccuacggccagcaguucggccccaccuaccuggacggggccgacgugaccaagaucaagccgcacaacucccacgagggcaagacguucuacgugcugcccaacgacgacacccuccgcgucgaggccuucgaguacuaccacaccaccgaccccagcuuccuggggcgguacauguccgcccugaaccacacgaagaaguggaaguacccccaggugaacggccucaccagcaucaagugggccgacaacaacugcuaccuggcgaccgcccugcucacccugcagcagaucgagcugaaguucaacccgcccgcccuccaggacgccuacuaccgcgcgcgggccggggaggccgccaacuucugcgcccugauccuggcguacugcaacaagacggugggcgagcucggcgacguccgcgagaccauguccuaccuguuccagcacgccaaccuggacagcugcaagcgggugcucaacgucgugugcaagaccugcgggcagcagcagaccacccugaagggcguggaggccgucauguacauggggacgcuguccuacgagcaguucaagaagggcgugcagauccccugcaccugcgggaagcaggccaccaaguaccucgugcagcaggagagccccuucgucaugauguccgccccgcccgcgcaguacgagcugaagcacggcaccuucacgugcgccagcgaguacaccggcaacuaccagugcgggcacuacaagcacaucaccuccaaggagacccuguacugcaucgacggcgcccuccugacgaagagcagcgaguacaaggggcccaucaccgacguguucuacaaggagaacuccuacaccaccacgaucaagcccgugaccuacaagcuggacggcgucgugugcaccgagaucgacccgaagcucgacaacuacuacaagaaggacaacagcuacuucaccgagcagcccaucgaccuggugcccaaccagcccuacccgaacgccuccuucgacaacuucaaguucgucugcgacaacaucaaguucgccgacgaccugaaccagcucacgggguacaagaagcccgcgagccgcgagcugaaggugaccuucuuccccgaccugaacggcgacguggucgccaucgacuacaagcacuacacccccuccuucaagaagggcgccaagcuccugcacaagccgaucguguggcacgugaacaacgccaccaacaaggcgacguacaagcccaacaccuggugcauccggugccuguggagcaccaagcccgucgagaccuccaacagcuucgacgugcucaaguccgaggacgcccaggggauggacaaccuggccugcgaggaccugaagcccgugagcgaggaggucguggagaacccgacgauccagaaggacgugcucgagugcaacgucaagaccaccgagguggugggcgacaucauccugaagcccgccaacaacucccugaagaucaccgaggaggucgggcacacggaccucauggccgcguacguggacaacagcucccugaccaucaagaagcccaacgagcugagccgcgugcucggccugaagacccuggccacccacgggcucgccgccgucaacuccgugccgugggacacgaucgccaacuacgcgaagcccuuccugaacaagguggucagcaccaccaccaacaucgugacgcgcugccugaaccgggugugcaccaacuacaugcccuacuucuucacccuccugcugcagcucugcaccuucacccgcuccacgaacagccggaucaaggccuccaugcccaccaccaucgccaagaacaccgucaagagcgugggcaaguucugccuggaggccagcuucaacuaccugaaguccccgaacuucagcaagcucaucaacaucaucaucugguuccugcugcucuccgugugccugggcagccugaucuacuccacggccgcgcucgggguccugaugagcaaccugggcaugcccuccuacugcaccggguaccgcgagggcuaccucaacagcaccaacgugaccaucgccacguacugcaccggcuccauccccugcagcgugugccuguccgggcuggacagccucgacaccuaccccucccuggagaccauccagaucacgaucagcuccuucaagugggaccugaccgccuucggccucgucgccgagugguuccuggccuacauccuguucacccgguucuucuacgugcucgggcuggcggccaucaugcagcuguucuucagcuacuucgccgugcacuucaucuccaacagcuggcucauguggcugaucaucaaccugguccagauggccccgaucuccgcgauggugcgcauguacaucuucuucgccagcuucuacuacguguggaagagcuacguccacgugguggacggcugcaacuccagcaccugcaugaugugcuacaagcggaaccgcgccacgcgggucgagugcaccaccaucgugaacgggguccgccgguccuucuacguguacgccaacggcggcaagggguucugcaagcugcacaacuggaacugcgugaacugcgacaccuucugcgccggcagcacguucaucuccgacgaggucgcgcgcgaccucagccugcaguucaagcggcccaucaaccccaccgaccaguccagcuacaucguggacuccgugaccgucaagaacgggagcauccaccuguacuucgacaaggccggccagaagaccuacgagcgccacucccucagccacuucgugaaccuggacaaccugcgggccaacaacacgaaggggucccuccccaucaacgugaucgucuucgacggcaagagcaagugcgaggaguccagcgccaaguccgccagcguguacuacucccagcugaugugccagccgauccugcuccuggaccaggcgcuggugagcgacgucggcgacagcgccgagguggccgugaagauguucgacgccuacgucaacaccuucuccagcaccuucaacgugcccauggagaagcucaagacccugguggccacggcggaggccgagcuggccaagaacgucucccucgacaacgugcugagcaccuucaucuccgccgcgcgccagggguucguggacagcgacgucgagaccaaggacgugguggagugccugaagcucucccaccagagcgacaucgaggucaccggcgacuccugcaacaacuacaugcugacguacaacaagguggagaacaugaccccccgggaccugggggccugcaucgacugcagcgcccgccacaucaacgcccagguggccaagucccacaacaucgcgcucaucuggaacgucaaggacuucaugagccuguccgagcagcugcggaagcagauccgcagcgccgccaagaagaacaaccuccccuucaagcugaccugcgccaccacgcgccagguggugaacgucgugaccaccaagaucgcccugaagggcgggugaggacuagucccuguucccagagcccacuuuuuuuucuuuuuuugaaauaaaauagccugucuuucagaucucaaaggcucuuuucagagccaccaaaaaaaaaaaaaaaaaaaaaaaaaaaaaaaaaaaaaaaaaaaaaaaaaaaaaaaaaaaaaaaaaaaaaaaaaaaaaaaaaaaaaaaaaaaaaaaaaaaaa

SEQ ID NO: 19634 - RNA, 6113 nt, Artificial Sequence
  SARS-CoV-2__MT847224.1__non-structural protein 3 (NSP3) mRNA gc
aggagagucccgcagucggcguccagcggcucugcuuguucgugugugugucguugcaggccuuauucaagcuuaccauggcccccaccaaggugaccuucggcgacgacacggucaucgaggugcagggguacaagagcgugaacaucaccuucgagcuggacgagcgcaucgacaagguccucaacgagaagugcuccgccuacaccguggagcugggcaccgaggugaacgaguucgcgugcgucguggccgacgccgugaucaagacgcugcagccggucagcgagcuccugaccccccuggggaucgaccucgacgagugguccauggccaccuacuaccuguucgacgagagcggcgaguucaagcuggccucccacauguacugcagcuucuacccccccgacgaggacgaggaggagggggacuacgaggaggaggaguucgagccguccacccaguacgaguacggcacggaggacgacuaccagggcaagccccucgaguucggggcgaccagcgccgcccugcagcccgaggaggagcaggaggaggacuggcuggacgacgacucccagcagaccgugggccagcaggacgggagcgaggacaaccagaccacgaccauccagaccaucguggagguccagccccagcucgagauggagcugaccccgguggugcagacgaucgaggucaacuccuucagcggcuaccugaagcucaccgacaacguguacaucaagaacgccgacaucguggaggaggcgaagaaggucaagcccaccgugguggucaacgccgccaacguguaccugaagcacgggggcggcguggccggggcccugaacaaggcgaccaacaacgccaugcaggucgaguccgacgacuacaucgccacgaacggcccccucaagguggggggcagcugcguccuguccggccacaaccuggccaagcacugccuccacgugguggggcccaacgucaacaagggcgaggacauccagcugcugaagagcgccuacgagaacuucaaccagcacgaggugcuccuggcgccgcugcucuccgccgggaucuucggcgccgaccccauccacagccugcgggugugcgucgacaccgugcgcaccaacguguaccuggccgucuucgacaagaaccucuacgacaagcugguguccagcuuccuggagaugaagagcgagaagcagguggagcagaagaucgccgagauccccaaggaggaggucaagcccuucaucaccgaguccaagccgagcguggagcagcggaagcaggacgacaagaagaucaaggcgugcguggaggaggucacgaccacccucgaggagaccaaguuccugacggagaaccugcuccuguacaucgacaucaacgggaaccugcaccccgacuccgccacccucgugagcgacaucgacaucaccuuccugaagaaggacgcccccuacaucgugggcgacgucgugcaggagggcgugcugaccgccgucgugauccccacgaagaaggccgggggcaccaccgagaugcucgcgaaggcccugcgcaaggugccgaccgacaacuacaucacgaccuaccccgggcagggccugaacggguacaccgucgaggaggccaagaccgugcucaagaagugcaaguccgccuucuacauccugcccagcaucaucuccaacgagaagcaggagauccugggcaccgugagcuggaaccuccgggagaugcuggcgcacgccgaggagacgcgcaagcugaugcccgucugcguggagaccaaggccaucguguccaccauccagcggaaguacaagggcaucaagauccaggagggggucguggacuacggcgcccgcuucuacuucuacaccagcaagacgaccguggccucccugaucaacacccucaacgaccugaacgagacccuggucacgaugccgcucggguacgugacccacggccugaaccuggaggaggcggcccgguacaugcgcagccucaaggugcccgccaccgucuccgugagcucccccgacgccgugaccgccuacaacggguaccugacgagcuccagcaagacccccgaggagcacuucaucgagaccaucucccuggcgggcagcuacaaggacuggagcuacuccggccagagcacccagcucgggaucgaguuccugaagcggggcgacaaguccgucuacuacacgagcaacccgaccaccuuccaccuggacggggaggugaucaccuucgacaaccucaagacgcugcugucccuccgcgaggugcggaccaucaaggucuucaccaccguggacaacaucaaccugcacacgcagguggucgacaugagcaugaccuacggccagcaguucggccccaccuaccuggacggggccgacgugaccaagaucaagccccacaacucccacgagggcaagacguucuacgugcucccgaacgacgacacccugcgcgucgaggccuucgaguacuaccacaccaccgaccccagcuuccuggggcgguacauguccgcccucaaccacacgaagaaguggaaguacccccaggugaacggccugaccagcaucaagugggccgacaacaacugcuaccuggcgaccgcccuccugacccugcagcagaucgagcucaaguucaaccccccggcccugcaggacgccuacuaccgcgcgcgggccggggaggccgccaacuucugcgcccugauccucgcguacugcaacaagacggugggcgagcugggcgacguccgcgagaccauguccuaccuguuccagcacgccaaccucgacagcugcaagcgggugcugaacgucgugugcaagaccugcgggcagcagcagaccacccugaagggcguggaggccgucauguacauggggacgcucuccuacgagcaguucaagaagggcgugcagauccccugcaccugcgggaagcaggccaccaaguaccuggugcagcaggagagccccuucgucaugauguccgcccccccggcgcaguacgagcugaagcacggcaccuucacgugcgccagcgaguacaccggcaacuaccagugcgggcacuacaagcacaucaccuccaaggagacccucuacugcaucgacggcgcccugcugacgaagagcagcgaguacaaggggcccaucaccgacguguucuacaaggagaacuccuacaccaccacgaucaagcccgugaccuacaagcucgacggcgucgugugcaccgagaucgaccccaagcuggacaacuacuacaagaaggacaacagcuacuucaccgagcagccgaucgaccuggugcccaaccagcccuaccccaacgccuccuucgacaacuucaaguucgucugcgacaacaucaaguucgccgacgaccucaaccagcugacgggguacaagaagccggcgagccgcgagcugaaggugaccuucuuccccgaccucaacggcgacguggucgccaucgacuacaagcacuacacccccuccuucaagaagggcgccaagcugcugcacaagcccaucguguggcacgugaacaacgccaccaacaaggcgacguacaagccgaacaccuggugcauccggugccucuggagcaccaagcccgucgagaccuccaacagcuucgacgugcugaaguccgaggacgcccaggggauggacaaccuggccugcgaggaccucaagcccgugagcgaggaggucguggagaaccccacgauccagaaggacgugcuggagugcaacgucaagaccaccgagguggugggcgacaucauccugaagccggccaacaacucccucaagaucaccgaggaggucgggcacaucgaccugauggccgcguacguggacaacagcucccugacgaucaagaagcccaacgagcucagccgcgugcugggccugaagacccucgccacccacgggcuggccgccgucaacuccgugcccugggacaccaucgccaacuacgcgaagccguuccugaacaagguggucagcacgaccaccaacaucgugacccgcugccucaaccgggugugcacgaacuacaugcccuacuucuucacccugcugcuccagcugugcaccuucacccgcuccaccaacagccggaucaaggccuccaugcccacgaccaucgccaagaacaccgucaagagcgugggcaaguucugccuggaggccagcuucaacuaccucaagucccccaacuucagcaagcugaucaacaucaucaucugguuccugcuccuguccgugugccugggcagccucaucuacuccaccgccgcgcuggggguccugaugagcaaccucggcaugccguccuacugcacgggguaccgcgagggcuaccugaacagcaccaacgugaccaucgccaccuacugcacgggcuccauccccugcagcgugugccuguccgggcucgacagccuggacaccuaccccucccuggagaccauccagaucaccaucagcuccuucaagugggaccucacggccuucggccuggucgccgagugguuccuggccuacauccucuucacccgguucuucuacgugcuggggcuggcggccaucaugcagcucuucuucagcuacuucgccgugcacuucaucuccaacagcuggcugauguggcugaucaucaaccugguccagauggcccccaucuccgcgauggugcgcauguacaucuucuucgccagcuucuacuacguguggaagagcuacguccacgugguggacggcugcaacuccagcaccugcaugaugugcuacaagcggaaccgcgccacccgggucgagugcacgaccaucgugaacgggguccgccgguccuucuacguguacgccaacggcggcaagggguucugcaagcuccacaacuggaacugcgugaacugcgacaccuucugcgccggcagcaccuucaucuccgacgaggucgcgcgcgaccugagccugcaguucaagcggccgaucaaccccacggaccaguccagcuacaucguggacuccgugaccgucaagaacgggagcauccaccucuacuucgacaaggccggccagaagaccuacgagcgccacucccugagccacuucgugaaccuggacaaccuccgggccaacaacaccaaggggucccugcccaucaacgugaucgucuucgacggcaagagcaagugcgaggaguccagcgccaaguccgccagcguguacuacucccagcugaugugccagcccauccuccugcuggaccaggcgcucgugagcgacgucggcgacagcgccgagguggccgugaagauguucgacgccuacgucaacacguucuccagcaccuucaacgugccgauggagaagcugaagacccugguggccaccgcggaggccgagcucgccaagaacgucucccuggacaacgugcugagcacguucaucuccgccgcgcgccagggguucguggacagcgacgucgagaccaaggacgugguggagugccucaagcugucccaccagagcgacaucgaggucaccggcgacuccugcaacaacuacaugcugaccuacaacaagguggagaacaugacgccccgggaccucggggccugcaucgacugcagcgcccgccacaucaacgcccagguggccaagucccacaacaucgcgcugaucuggaacgucaaggacuucaugagccuguccgagcagcuccggaagcagauccgcagcgccgccaagaagaacaaccugcccuucaagcugaccugcgccaccacccgccagguggugaacgucgugacgaccaagaucgcccucaagggcgggugaggacuagucccuguucccagagcccacuuuuuuuucuuuuuuugaaauaaaauagccugucuuucagaucucaaaggcucuuuucagagccaccaaaaaaaaaaaaaaaaaaaaaaaaaaaaaaaaaaaaaaaaaaaaaaaaaaaaaaaaaaaaaaaaaaaaaaaaaaaaaaaaaaaaaaaaaaaaaaaaaaaaa

SEQ ID NO: 19635 - RNA, 6113 nt, Artificial Sequence
  SARS-CoV-2__MT847228.1__non-structural protein 3 (NSP3) mRNA gc
aggagagucccgcagucggcguccagcggcucugcuuguucgugugugugucguugcaggccuuauucaagcuuaccauggcccccaccaaggugaccuucggcgacgacacggucaucgaggugcagggguacaagagcgugaacaucaccuucgagcuggacgagcgcaucgacaagguccucaacgagaagugcuccgccuacaccguggagcugggcaccgaggugaacgaguucgcgugcgucguggccgacgccgugaucaagacgcugcagccggucagcgagcuccugaccccccuggggaucgaccucgacgagugguccauggccaccuacuaccuguucgacgagagcggcgaguucaagcuggccucccacauguacugcagcuucuacccccccgacgaggacgaggaggagggggacugcgaggaggaggaguucgagccguccacccaguacgaguacggcacggaggacgacuaccagggcaagccccucgaguucggggcgaccagcgccgcccugcagcccgaggaggagcaggaggaggacuggcuggacgacgacucccagcagaccgugggccagcaggacgggagcgaggacaaccagaccacgaccauccagaccaucguggagguccagccccagcucgagauggagcugaccccgguggugcagacgaucgaggucaacuccuucagcggcuaccugaagcucaccgacaacguguacaucaagaacgccgacaucguggaggaggcgaagaaggucaagcccaccgugguggucaacgccgccaacguguaccugaagcacgggggcggcguggccggggcccugaacaaggcgaccaacaacgccaugcaggucgaguccgacgacuacaucgccacgaacggcccccucaagguggggggcagcugcguccuguccggccacaaccuggccaagcacugccuccacgugguggggcccaacgucaacaagggcgaggacauccagcugcugaagagcgccuacgagaacuucaaccagcacgaggugcuccuggcgccgcugcucuccgccgggaucuucggcgccgaccccauccacagccugcgggugugcgucgacaccgugcgcaccaacguguaccuggccgucuucgacaagaaccucuacgacaagcugguguccagcuuccuggagaugaagagcgagaagcagguggagcagaagaucgccgagauccccaaggaggaggucaagcccuucaucaccgaguccaagccgagcguggagcagcggaagcaggacgacaagaagaucaaggcgugcguggaggaggucacgaccacccucgaggagaccaaguuccugacggagaaccugcuccuguacaucgacaucaacgggaaccugcaccccgacuccgccacccucgugagcgacaucgacaucaccuuccugaagaaggacgcccccuacaucgugggcgacgucgugcaggagggcgugcugaccgccgucgugauccccacgaagaaggccgggggcaccaccgagaugcucgcgaaggcccugcgcaaggugccgaccgacaacuacaucacgaccuaccccgggcagggccugaacggguacaccgucgaggaggccaagaccgugcucaagaagugcaaguccgccuucuacauccugcccagcaucaucuccaacgagaagcaggagauccugggcaccgugagcuggaaccuccgggagaugcuggcgcacgccgaggagacgcgcaagcugaugcccgucugcguggagaccaaggccaucguguccaccauccagcggaaguacaagggcaucaagauccaggagggggucguggacuacggcgcccgcuucuacuucuacaccagcaagacgaccguggccucccugaucaacacccucaacgaccugaacgagacccuggucacgaugccgcucggguacgugacccacggccugaaccuggaggaggcggcccgguacaugcgcagccucaaggugcccgccaccgucuccgugagcucccccgacgccgugaccgccuacaacggguaccugacgagcuccagcaagacccccgaggagcacuucaucgagaccaucucccuggcgggcagcuacaaggacuggagcuacuccggccagagcacccagcucgggaucgaguuccugaagcggggcgacaaguccgucuacuacacgagcaacccgaccaccuuccaccuggacggggaggugaucaccuucgacaaccucaagacgcugcugucccuccgcgaggugcggaccaucaaggucuucaccaccguggacaacaucaaccugcacacgcagguggucgacaugagcaugaccuacggccagcaguucggccccaccuaccuggacggggccgacgugaccaagaucaagccccacaacucccacgagggcaagacguucuacgugcucccgaacgacgacacccugcgcgucgaggccuucgaguacuaccacaccaccgaccccagcuuccuggggcgguacauguccgcccucaaccacacgaagaaguggaaguacccccaggugaacggccugaccagcaucaagugggccgacaacaacugcuaccuggcgaccgcccuccugacccugcagcagaucgagcucaaguucaaccccccggcccugcaggacgccuacuaccgcgcgcgggccggggaggccgccaacuucugcgcccugauccucgcguacugcaacaagacggugggcgagcugggcgacguccgcgagaccauguccuaccuguuccagcacgccaaccucgacagcugcaagcgggugcugaacgucgugugcaagaccugcgggcagcagcagaccauccugaagggcguggaggccgucauguacauggggacccucuccuacgagcaguucaagaagggcgugcagauccccugcacgugcgggaagcaggccaccaaguaccuggugcagcaggagagccccuucgucaugauguccgcccccccggcgcaguacgagcugaagcacggcaccuucaccugcgccagcgaguacacgggcaacuaccagugcgggcacuacaagcacaucaccuccaaggagacccucuacugcaucgacggcgcccugcugaccaagagcagcgaguacaaggggcccaucacggacguguucuacaaggagaacuccuacaccaccaccaucaagcccgugacguacaagcucgacggcgucgugugcaccgagaucgaccccaagcuggacaacuacuacaagaaggacaacagcuacuucaccgagcagccgaucgaccuggugcccaaccagcccuaccccaacgccuccuucgacaacuucaaguucgucugcgacaacaucaaguucgccgacgaccucaaccagcugaccggguacaagaagccggcgagccgcgagcugaaggugacguucuuccccgaccucaacggcgacguggucgccaucgacuacaagcacuacacccccuccuucaagaagggcgccaagcugcugcacaagcccaucguguggcacgugaacaacgccaccaacaaggcgaccuacaagccgaacacguggugcauccggugccucuggagcaccaagcccgucgagaccuccaacagcuucgacgugcugaaguccgaggacgcccaggggauggacaaccuggccugcgaggaccucaagcccgugagcgaggaggucguggagaaccccaccauccagaaggacgugcuggagugcaacgucaagacgaccgagguggugggcgacaucauccugaagccggccaacaacucccucaagaucaccgaggaggucgggcacaccgaccugauggccgcguacguggacaacagcucccugacgaucaagaagcccaacgagcucagccgcgugcugggccugaagacccucgccacccacgggcuggccgccgucaacuccgugcccugggacaccaucgccaacuacgcgaagccguuccugaacaagguggucagcacgaccaccaacaucgugacccgcugccucaaccgggugugcacgaacuacaugcccuacuucuucacccugcugcuccagcugugcaccuucacccgcuccaccaacagccggaucaaggccuccaugcccacgaccaucgccaagaacaccgucaagagcgugggcaaguucugccuggaggccagcuucaacuaccucaagucccccaacuucagcaagcugaucaacaucaucaucugguuccugcuccuguccgugugccugggcagccucaucuacuccaccgccgcgcuggggguccugaugagcaaccucggcaugccguccuacugcacgggguaccgcgagggcuaccugaacagcaccaacgugaccaucgccaccuacugcacgggcuccauccccugcagcgugugccuguccgggcucgacagccuggacaccuaccccucccuggagaccauccagaucaccaucagcuccuucaagugggaccucacggccuucggccuggucgccgagugguuccuggccuacauccucuucacccgguucuucuacgugcuggggcuggcggccaucaugcagcucuucuucagcuacuucgccgugcacuucaucuccaacagcuggcugauguggcugaucaucaaccugguccagauggcccccaucuccgcgauggugcgcauguacaucuucuucgccagcuucuacuacguguggaagagcuacguccacgugguggacggcugcaacuccagcaccugcaugaugugcuacaagcggaaccgcgccacccgggucgagugcacgaccaucgugaacgggguccgccgguccuucuacguguacgccaacggcggcaagggguucugcaagcuccacaacuggaacugcgugaacugcgacaccuucugcgccggcagcaccuucaucuccgacgaggucgcgcgcgaccugagccugcaguucaagcggccgaucaaccccacggaccaguccagcuacaucguggacuccgugaccgucaagaacgggagcauccaccucuacuucgacaaggccggccagaagaccuacgagcgccacucccugagccacuucgugaaccuggacaaccuccgggccaacaacaccaaggggucccugcccaucaacgugaucgucuucgacggcaagagcaagugcgaggaguccagcgccaaguccgccagcguguacuacucccagcugaugugccagcccauccuccugcuggaccaggcgcucgugagcgacgucggcgacagcgccgagguggccgugaagauguucgacgccuacgucaacacguucuccagcaccuucaacgugccgauggagaagcugaagacccugguggccaccgcggaggccgagcucgccaagaacgucucccuggacaacgugcugagcacguucaucuccgccgcgcgccagggguucguggacagcgacgucgagaccaaggacgugguggagugccucaagcugucccaccagagcgacaucgaggucaccggcgacuccugcaacaacuacaugcugaccuacaacaagguggagaacaugacgccccgggaccucggggccugcaucgacugcagcgcccgccacaucaacgcccagguggccaagucccacaacaucgcgcugaucuggaacgucaaggacuucaugagccuguccgagcagcuccggaagcagauccgcagcgccgccaagaagaacaaccugcccuucaagcugaccugcgccaccacccgccagguggugaacgucgugacgaccaagaucgcccucaagggcgggugaggacuagucccuguucccagagcccacuuuuuuuucuuuuuuugaaauaaaauagccugucuuucagaucucaaaggcucuuuucagagccaccaaaaaaaaaaaaaaaaaaaaaaaaaaaaaaaaaaaaaaaaaaaaaaaaaaaaaaaaaaaaaaaaaaaaaaaaaaaaaaaaaaaaaaaaaaaaaaaaaaaaa

SEQ ID NO: 19636 - RNA, 6113 nt, Artificial Sequence
  SARS-CoV-2__MT843297.1__non-structural protein 3 (NSP3) mRNA gc
aggagagucccgcagucggcguccagcggcucugcuuguucgugugugugucguugcaggccuuauucaagcuuaccauggcccccaccaaggugaccuucggcgacgacacggucaucgaggugcagggguacaagagcgugaacaucaccuucgagcuggacgagcgcaucgacaagguccucaacgagaagugcuccgccuacaccguggagcugggcaccgaggugaacgaguucgcgugcgucguggccgacgccgugaucaagacgcugcagccggucagcgagcuccugaccccccuggggaucgaccucgacgagugguccauggccaccuacuaccuguucgacgagagcggcgaguucaagcuggccucccacauguacugcagcuucuacccccccgacgaggacgaggaggagggggacugcgaggaggaggaguucgagccguccacccaguacgaguacggcacggaggacgacuaccagggcaagcaccucgaguucggggcgaccagcgccgcccugcagcccgaggaggagcaggaggaggacuggcuggacgacgacucccagcagaccgugggccagcaggacgggagcgaggacaaccagaccacgaccauccagaccaucguggagguccagccccagcucgagauggagcugacccccguggugcagacgaucgaggucaacuccuucagcggcuaccugaagcucaccgacaacguguacaucaagaacgccgacaucguggaggaggcgaagaaggucaagccgaccgugguggucaacgccgccaacguguaccugaagcacgggggcggcguggccggggcccugaacaaggcgaccaacaacgccaugcaggucgaguccgacgacuacaucgccacgaacggcccccucaagguggggggcagcugcguccuguccggccacaaccuggccaagcacugccuccacgugguggggcccaacgucaacaagggcgaggacauccagcugcugaagagcgccuacgagaacuucaaccagcacgaggugcuccuggcgccccugcucuccgccgggaucuucggcgccgacccgauccacagccugcgggugugcgucgacaccgugcgcaccaacguguaccuggccgucuucgacaagaaccucuacgacaagcugguguccagcuuccuggagaugaagagcgagaagcagguggagcagaagaucgccgagauccccaaggaggaggucaagcccuucaucaccgaguccaagcccagcguggagcagcggaagcaggacgacaagaagaucaaggcgugcguggaggaggucacgaccacccucgaggagaccaaguuccugacggagaaccugcuccuguacaucgacaucaacgggaaccugcacccggacuccgccacccucgugagcgacaucgacaucaccuuccugaagaaggacgcccccuacaucgugggcgacgucgugcaggagggcgugcugaccgccgucgugauccccacgaagaaggccgggggcaccaccgagaugcucgcgaaggcccugcgcaaggugcccaccgacaacuacaucacgaccuacccggggcagggccugaacggguacaccgucgaggaggccaagaccgugcucaagaagugcaaguccgccuucuacauccugcccagcaucaucuccaacgagaagcaggagauccugggcaccgugagcuggaaccuccgggagaugcuggcgcacgccgaggagacgcgcaagcugaugcccgucugcguggagaccaaggccaucguguccaccauccagcggaaguacaagggcaucaagauccaggagggggucguggacuacggcgcccgcuucuacuucuacaccagcaagacgaccguggccucccugaucaacacccucaacgaccugaacgagacccuggucacgaugccccucggguacgugacccacggccugaaccuggaggaggcggcccgguacaugcgcagccucaaggugccggccaccgucuccgugagcucccccgacgccgugaccgccuacaacggguaccugacgagcuccagcaagacccccgaggagcacuucaucgagaccaucucccuggcgggcagcuacaaggacuggagcuacuccggccagagcacccagcucgggaucgaguuccugaagcggggcgacaaguccgucuacuacacgagcaaccccaccaccuuccaccuggacggggaggugaucaccuucgacaaccucaagacgcugcugucccuccgcgaggugcggaccaucaaggucuucaccaccguggacaacaucaaccugcacacgcagguggucgacaugagcaugaccuacggccagcaguucggcccgaccuaccuggacggggccgacgugaccaagaucaagccccacaacucccacgagggcaagacguucuacgugcuccccaacgacgacacccugcgcgucgaggccuucgaguacuaccacaccaccgacccgagcuuccuggggcgguacauguccgcccucaaccacacgaagaaguggaaguacccccaggugaacggccugaccagcaucaagugggccgacaacaacugcuaccuggcgaccgcccuccugacccugcagcagaucgagcucaaguucaacccccccgcccugcaggacgccuacuaccgcgcgcgggccggggaggccgccaacuucugcgcccugauccucgcguacugcaacaagacggugggcgagcugggcgacguccgcgagaccauguccuaccuguuccagcacgccaaccucgacagcugcaagcgggugcugaacgucgugugcaagaccugcgggcagcagcagaccacccugaagggcguggaggccgucauguacauggggacgcucuccuacgagcaguucaagaagggcgugcagaucccgugcaccugcgggaagcaggccaccaaguaccuggugcagcaggagagccccuucgucaugauguccgccccccccgcgcaguacgagcugaagcacggcaccuucacgugcgccagcgaguacaccggcaacuaccagugcgggcacuacaagcacaucaccuccaaggagacccucuacugcaucgacggcgcccugcugacgaagagcagcgaguacaaggggccgaucaccgacguguucuacaaggagaacuccuacaccaccacgaucaagcccgugaccuacaagcucgacggcgucgugugcaccgagaucgaccccaagcuggacaacuacuacaagaaggacaacagcuacuucaccgagcagcccaucgaccuggugccgaaccagcccuaccccaacgccuccuucgacaacuucaaguucgucugcgacaacaucaaguucgccgacgaccucaaccagcugacgggguacaagaagcccgcgagccgcgagcugaaggugaccuucuucccggaccucaacggcgacguggucgccaucgacuacaagcacuacacccccuccuucaagaagggcgccaagcugcugcacaagcccaucguguggcacgugaacaacgccaccaacaaggcgacguacaagcccaacaccuggugcauccggugccucuggagcaccaagccggucgagaccuccaacagcuucgacgugcugaaguccgaggacgcccaggggauggacaaccuggccugcgaggaccucaagcccgugagcgaggaggucguggagaaccccacgauccagaaggacgugcuggagugcaacgucaagaccaccgagguggugggcgacaucauccugaagcccgccaacaacucccucaagaucaccgaggaggucgggcacacggaccugauggccgcguacguggacaacagcucccugaccaucaagaagccgaacgagcucagccgcgugcugggccugaagacccucgccacccacgggcuggccgccgucaacuccgugcccugggacacgaucgccaacuacgcgaagcccuuccugaacaagguggucagcaccaccaccaacaucgugacgcgcugccucaaccgggugugcaccaacuacaugccguacuucuucacccugcugcuccagcugugcaccuucacccgcuccacgaacagccggaucaaggccuccaugcccaccaccaucgccaagaacaccgucaagagcgugggcaaguucugccuggaggccagcuucaacuaccucaagucccccaacuucagcaagcugaucaacaucaucaucugguuccugcuccuguccgugugccugggcagccucaucuacuccacggccgcgcuggggguccugaugagcaaccucggcaugcccuccuacugcaccggguaccgcgagggcuaccugaacagcaccaacgugaccaucgccacguacugcaccggcuccaucccgugcagcgugugccuguccgggcucgacagccuggacaccuaccccucccuggagaccauccagaucacgaucagcuccuucaagugggaccucaccgccuucggccuggucgccgagugguuccuggccuacauccucuucacccgguucuucuacgugcuggggcuggcggccaucaugcagcucuucuucagcuacuucgccgugcacuucaucuccaacagcuggcugauguggcugaucaucaaccugguccagauggcccccaucuccgcgauggugcgcauguacaucuucuucgccagcuucuacuacguguggaagagcuacguccacgugguggacggcugcaacuccagcaccugcaugaugugcuacaagcggaaccgcgccacgcgggucgagugcaccaccaucgugaacgggguccgccgguccuucuacguguacgccaacggcggcaagggguucugcaagcuccacaacuggaacugcgugaacugcgacaccuucugcgccggcagcacguucaucuccgacgaggucgcgcgcgaccugagccugcaguucaagcggcccaucaacccgaccgaccaguccagcuacaucguggacuccgugaccgucaagaacgggagcauccaccucuacuucgacaaggccggccagaagaccuacgagcgccacucccugagccacuucgugaaccuggacaaccuccgggccaacaacacgaaggggucccugcccaucaacgugaucgucuucgacggcaagagcaagugcgaggaguccagcgccaaguccgccagcguguacuacucccagcugaugugccagcccauccuccugcuggaccaggcgcucgugagcgacgucggcgacagcgccgagguggccgugaagauguucgacgccuacgucaacaccuucuccagcaccuucaacgugcccauggagaagcugaagacccugguggccacggcggaggccgagcucgccaagaacgucucccuggacaacgugcugagcaccuucaucuccgccgcgcgccagggguucguggacagcgacgucgagaccaaggacgugguggagugccucaagcugucccaccagagcgacaucgaggucaccggcgacuccugcaacaacuacaugcugacguacaacaagguggagaacaugaccccgcgggaccucggggccugcaucgacugcagcgcccgccacaucaacgcccagguggccaagucccacaacaucgcgcugaucuggaacgucaaggacuucaugagccuguccgagcagcuccggaagcagauccgcagcgccgccaagaagaacaaccugcccuucaagcugaccugcgccaccacgcgccagguggugaacgucgugaccaccaagaucgcccucaagggcgggugaggacuagucccuguucccagagcccacuuuuuuuucuuuuuuugaaauaaaauagccugucuuucagaucucaaaggcucuuuucagagccaccaaaaaaaaaaaaaaaaaaaaaaaaaaaaaaaaaaaaaaaaaaaaaaaaaaaaaaaaaaaaaaaaaaaaaaaaaaaaaaaaaaaaaaaaaaaaaaaaaaaaa

SEQ ID NO: 19637 - RNA, 6113 nt, Artificial Sequence
  SARS-CoV-2__MT843319.1__non-structural protein 3 (NSP3) mRNA gc
aggagagucccgcagucggcguccagcggcucugcuuguucgugugugugucguugcaggccuuauucaagcuuaccauggcccccaccaaggugaccuucggcgacgacacggucaucgaggugcagggguacaagagcgugaacaucaccuucgagcuggacgagcgcaucgacaagguccucaacgagaagugcuccgccuacaccguggagcugggcaccgaggugaacgaguucgcgugcgucguggccgacgccgugaucaagacgcugcagccggucagcgagcuccugaccccccuggggaucgaccucgacgagugguccauggccaccuacuaccuguucgacgagagcggcgaguucaagcuggccucccacauguacugcagcuucuacccccccgacgaggacgaggaggagggggacugcgaggaggaggaguucgagccguccacccaguacgaguacggcacggaggacgacuaccagggcaagccccucgaguucggggcgaccagcgccgcccugcagcccgaggaggagcaggaggaggacuggcuggacgacgacucccagcagaccgugggccagcaggacgggagcgaggacaaccagaccacgaccauccagaccaucguggagguccagccccagcucgagauggagcugaccccgguggugcagacgaucgaggucaacuccuucagcggcuaccugaagcucaccgacaacguguacaucaagaacgccgacaucguggaggaggcgaagaaggucaagcccaccgugguggucaacgccgccaacguguaccugaagcacgggggcggcguggccggggcccugaacaaggcgaccaacaacgccaugcaggucgaguccgacgacuacaucgccacgaacggcccccucaagguggggggcagcugcguccuguccggccacaaccuggccaagcacugccuccacgugguggggcccaacgucaacaagggcgaggacauccagcugcugaagagcgccuacgagaacuucaaccagcacgaggugcuccuggcgccgcugcucuccgccgggaucuucggcgccgaccccauccacagccugcgggugugcgucgacaccgugcgcaccaacguguaccuggccgucuucgacaagaaccucuacgacaagcugguguccagcuuccuggagaugaagagcgagaagcagguggagcagaagaucgccgagauccccaaggaggaggucaagcccuucaucaccgaguccaagccgagcguggagcagcggaagcaggacgacaagaagaucaaggcgugcguggaggaggucacgaccacccucgaggagaccaaguuccugacggagaaccugcuccuguacaucgacaucaacgggaaccugcaccccgacuccgccacccucgugagcgacaucgacaucaccuuccugaagaaggacgcccccuacaucgugggcgacgucgugcaggagggcgugcugaccgccgucgugauccccacgaagaaggccgggggcaccaccgagaugcucgcgaaggcccugcgcaaggugccgaccgacaacuacaucacgaccuaccccgggcagggccugaacggguacaccgucgaggaggccaagaccgugcucaagaagugcaaguccgccuucuacauccugcccagcaucaucuccaacgagaagcaggagauccugggcaccgugagcuggaaccuccgggagaugcuggcgcacgccgaggagacgcgcaagcugaugcccgucugcguggagaccaaggccaucguguccaccauccagcggaaguacaagggcaucaagauccaggagggggucguggacuacggcgcccgcuucuacuucuacaccagcaagacgaccguggccucccugaucaacacccucaacgaccugaacgagacccuggucacgaugccgcucggguacgugacccacggccugaaccuggaggaggcggcccgguacaugcgcagccucaaggugcccgccaccgucuccgugagcucccccgacgccgugaccgccuacaacggguaccugacgagcuccagcaagacccccgaggagcacuucaucgagaccaucucccuggcgggcagcuacaaggacuggagcuacuccggccagagcacccagcucgggaucgaguuccugaagcggggcgacaaguccgucuacuacacgagcaacccgaccaccuuccaccuggacggggaggugaucaccuucgacaaccucaagacgcugcugucccuccgcgaggugcggaccaucaaggucuucaccaccguggacaacaucaaccugcacacgcagguggucgacaugagcaugaccuacggccagcaguucggccccaccuaccuggacggggccgacgugaccaagaucaagccccacaacucccacgagggcaagacguucuacgugcucccgaacgacgacacccugcgcgucgaggccuucgaguacuaccacaccaccgaccccagcuuccuggggcgguacauguccgcccucaaccacacgaagaaguggaaguacccccaggugaacggccugaccagcaucaagugggccgacaacaacugcuaccuggcgaccgcccuccugacccugcagcagaucgagcucaaguucaaccccccggcccugcaggacgccuacuaccgcgcgcgggccggggaggccgccaacuucugcgcccugauccucgcguacugcaacaagacggugggcgagcugggcgacguccgcgagaccauguccuaccuguuccagcacgccaaccucgacagcugcaagcgggugcugaacgucgugugcaagaccugcgggcagcagcagaccacccugaagggcguggaggccgucauguacauggggacgcucuccuacgagcaguucaagaagggcgugcagauccccugcaccugcgggaagcaggccaccaaguaccuggugcagcaggagagccccuucgucaugauguccgcccccccggcgcaguacgagcugaagcacggcaccuucacgugcgccagcgaguacaccggcaacuaccagugcgggcacuacaagcacaucaccuccaaggagacccucuacugcaucgacggcgcccugcugacgaagagcagcgaguacaaggggcccaucaccgacguguucuacaaggagaacuccuacaccaccacgaucaagcccgugaccuacaagcucgacggcgucgugugcaccgagaucgaccccaagcuggacaacuacuacaagaaggacaacagcuacuucaccgagcagccgaucgaccuggugcccaaccagcccuaccccaacgccuccuucgacaacuucaaguucgucugcgacaacaucaaguucgccgacgaccucaaccagcugacgggguacaagaagccggcgagccgcgagcugaaggugaccuucuuccccgaccucaacggcgacguggucgccaucgacuacaagcacuacacccccuccuucaagaagggcgccaagcugcugcacaagcccaucguguggcacgugaacaacgccaccaacaaggcgacguacaagccgaacaccuggugcauccggugccucuggagcaccaagcccgucgagaccuccaacagcuucgacgugcugaaguccgaggacgcccaggggauggacaaccuggccugcgaggaccucaagcccgugagcgaggaggucguggagaaccccacgauccagaaggacgugcuggagugcaacgucaagaccaccgagguggugggcgacaucauccugaagccggccaacaacucccucaagaucaccgaggaggucgggcacacggaccugauggccgcguacguggacaacagcucccugaccaucaagaagcccaacgagcucagccgcgugcugggccugaagacccucgccacccacgggcuggccgccgucaacuccgugcccugggacacgaucgccaacuacgcgaagccguuccugaacaagguggucagcaccaccaccaacaucgugacgcgcugccucaaccgggugugcaccaacuacaugcccuacuucuucacccugcugcuccagcugugcaccuucacccgcuccacgaacagccggaucaaggccuccaugcccaccaccaucgccaagaacaccgucaagagcgugggcaaguucugccuggaggccagcuucaacuaccucaagucccccaacuucagcaagcugaucaacaucaucaucugguuccugcuccuguccgugugccugggcagccucaucuacuccacggccgcgcuggggguccugaugagcaaccucggcaugccguccuacugcaccggguaccgcgagggcuaccugaacagcaccaacgugaccaucgccacguacugcaccggcuccauccccugcagcgugugccuguccgggcucgacagccuggacaccuaccccucccuggagaccauccagaucacgaucagcuccuucaagugggaccucaccgccuucggccuggucgccgagugguuccuggccuacauccucuucacccgguucuucuacgugcuggggcuggcggccaucaugcagcucuucuucagcuacuucgccgugcacuucaucuccaacagcuggcugauguggcugaucaucaaccugguccagauggcccccaucuccgcgauggugcgcauguacaucuucuucgccagcuucuacuacguguggaagagcuacguccacgugguggacggcugcaacuccagcaccugcaugaugugcuacaagcggaaccgcgccacgcgggucgagugcaccaccaucgugaacgggguccgccgguccuucuacguguacgccaacggcggcaagggguucugcaagcuccacaacuggaacugcgugaacugcgacaccuucugcgccggcagcacguucaucuccgacgaggucgcgcgcgaccugagccugcaguucaagcggccgaucaaccccaccgaccaguccagcuacaucguggacuccgugaccgucaagaacgggagcauccaccucuacuucgacaaggccggccagaagaccuacgagcgccacucccugagccacuucgugaaccuggacaaccuccgggccaacaacacgaaggggucccugcccaucaacgugaucgucuucgacggcaagagcaagugcgaggaguccagcgccaaguccgccagcguguacuacucccagcugaugugccagcccauccuccugcuggaccaggcgcucgugagcgacgucggcgacagcgccgagguggccgugaagauguucgacgccuacgucaacaccuucuccagcaccuucaacgugccgauggagaagcugaagacccugguggccacggcggaggccgagcucgccaagaacgucucccuggacaacgugcugagcaccuucaucuccgccgcgcgccagggguucguggacagcgacgucgagaccaaggacgugguggagugccucaagcugucccaccagagcgacaucgaggucaccggcgacuccugcaacaacuacaugcugacguacaacaagguggagaacaugaccccccgggaccucggggccugcaucgacugcagcgcccgccacaucaacgcccagguggccaagucccacaacaucgcgcugaucuggaacgucaaggacuucaugagccuguccgagcagcuccggaagaagauccgcagcgccgccaagaagaacaaccugcccuucaagcugaccugcgccaccacgcgccagguggugaacgucgugaccaccaagaucgcccucaagggcgggugaggacuagucccuguucccagagcccacuuuuuuuucuuuuuuugaaauaaaauagccugucuuucagaucucaaaggcucuuuucagagccaccaaaaaaaaaaaaaaaaaaaaaaaaaaaaaaaaaaaaaaaaaaaaaaaaaaaaaaaaaaaaaaaaaaaaaaaaaaaaaaaaaaaaaaaaaaaaaaaaaaaaa

SEQ ID NO: 19638 - RNA, 6113 nt, Artificial Sequence
  SARS-CoV-2__MT843738.1__non-structural protein 3 (NSP3) mRNA gc
aggagagucccgcagucggcguccagcggcucugcuuguucgugugugugucguugcaggccuuauucaagcuuaccauggcccccaccaaggugaccuucggcgacgacacggucaucgaggugcagggguacaagagcgugaacaucaccuucgagcuggacgagcgcaucgacaagguccucaacgagaagugcuccgccuacaccguggagcugggcaccgaggugaacgaguucgcgugcgucguggccgacgccgugaucaagacgcugcagccggucuucgagcuccugaccccccuggggaucgaccucgacgaguggagcauggccaccuacuaccuguucgacgaguccggcgaguucaagcuggccagccacauguacugcuccuucuacccccccgacgaggacgaggaggagggggacugcgaggaggaggaguucgagccgagcacccaguacgaguacggcacggaggacgacuaccagggcaagccccucgaguucggggcgaccuccgccgcccugcagcccgaggaggagcaggaggaggacuggcuggacgacgacagccagcagaccgugggccagcaggacggguccgaggacaaccagaccacgaccauccagaccaucguggagguccagccccagcucgagauggagcugaccccgguggugcagacgaucgaggucaacagcuucuccggcuaccugaagcucaccgacaacguguacaucaagaacgccgacaucguggaggaggcgaagaaggucaagcccaccgugguggucaacgccgccaacguguaccugaagcacgggggcggcguggccggggcccugaacaaggcgaccaacaacgccaugcaggucgagagcgacgacuacaucgccacgaacggcccccucaagguggggggcuccugcguccugagcggccacaaccuggccaagcacugccuccacgugguggggcccaacgucaacaagggcgaggacauccagcugcugaaguccgccuacgagaacuucaaccagcacgaggugcuccuggcgccgcugcucagcgccgggaucuucggcgccgaccccauccacucccugcgggugugcgucgacaccgugcgcaccaacguguaccuggccgucuucgacaagaaccucuacgacaagcuggugagcuccuuccuggagaugaagagcgagaagcagguggagcagaagaucgccgagauccccaaggaggaggucaagcccuucaucaccgagagcaagccguccguggagcagcggaagcaggacgacaagaagaucaaggcgugcguggaggaggucacgaccacccucgaggagaccaaguuccugacggagaaccugcuccuguacaucgacaucaacgggaaccugcaccccgacagcgccacccucguguccgacaucgacaucaccuuccugaagaaggacgcccccuacaucgugggcgacgucgugcaggagggcgugcugaccgccgucgugauccccacgaagaaggccgggggcaccaccgagaugcucgcgaaggcccugcgcaaggugccgaccgacaacuacaucacgaccuaccccgggcagggccugaacggguacaccgucgaggaggccaagaccgugcucaagaagugcaagagcgccuucuacauccugcccuccaucaucagcaacgagaagcaggagauccugggcaccguguccuggaaccuccgggagaugcuggcgcacgccgaggagacgcgcaagcugaugcccgucugcguggagaccaaggccaucgugagcaccauccagcggaaguacaagggcaucaagauccaggagggggucguggacuacggcgcccgcuucuacuucuacaccuccaagacgaccguggccagccugaucaacacccucaacgaccugaacgagacccuggucacgaugccgcucggguacgugacccacggccugaaccuggaggaggcggcccgguacaugcgcucccucaaggugcccgccaccgucagcguguccagccccgacgccgugaccgccuacaacggguaccugacguccagcuccaagacccccgaggagcacuucaucgagaccaucagccuggcgggcuccuacaaggacuggagcuacagcggccaguccacccagcucgggaucgaguuccugaagcggggcgacaagagcgucuacuacacguccaacccgaccaccuuccaccuggacggggaggugaucaccuucgacaaccucaagacgcugcugagccuccgcgaggugcggaccaucaaggucuucaccaccguggacaacaucaaccugcacacgcagguggucgacauguccaugaccuacggccagcaguucggccccaccuaccuggacggggccgacgugaccaagaucaagccccacaacagccacgagggcaagacguucuacgugcucccgaacgacgacacccugcgcgucgaggccuucgaguacuaccacaccaccgaccccuccuuccuggggcgguacaugagcgcccucaaccacacgaagaaguggaaguacccccaggugaacggccugaccuccaucaagugggccgacaacaacugcuaccuggcgaccgcccuccugacccugcagcagaucgagcucaaguucaaccccccggcccugcaggacgccuacuaccgcgcgcgggccggggaggccgccaacuucugcgcccugauccucgcguacugcaacaagacggugggcgagcugggcgacguccgcgagaccaugagcuaccuguuccagcacgccaaccucgacuccugcaagcgggugcugaacgucgugugcaagaccugcgggcagcagcagaccacccugaagggcguggaggccgucauguacauggggacgcucagcuacgagcaguucaagaagggcgugcagauccccugcaccugcgggaagcaggccaccaaguaccuggugcagcaggagucccccuucgucaugaugagcgcccccccggcgcaguacgagcugaagcacggcaccuucacgugcgccuccgaguacaccggcaacuaccagugcgggcacuacaagcacaucaccagcaaggagacccucuacugcaucgacggcgcccugcugacgaaguccagcgaguacaaggggcccaucaccgacguguucuacaaggagaacagcuacaccaccacgaucaagcccgugaccuacaagcucgacggcgucgugugcaccgagaucgaccccaagcuggacaacuacuacaagaaggacaacuccuacuucaccgagcagccgaucgaccuggugcccaaccagcccuaccccaacgccagcuucgacaacuucaaguucgucugcgacaacaucaaguucgccgacgaccucaaccagcugacgggguacaagaagccggcgucccgcgagcugaaggugaccuucuuccccgaccucaacggcgacguggucgccaucgacuacaagcacuacacccccagcuucaagaagggcgccaagcugcugcacaagcccaucguguggcacgugaacaacgccaccaacaaggcgacguacaagccgaacaccuggugcauccggugccucugguccaccaagcccgucgagaccagcaacuccuucgacgugcugaagagcgaggacgcccaggggauggacaaccuggccugcgaggaccucaagcccguguccgaggaggucguggagaaccccacgauccagaaggacgugcuggagugcaacgucaagaccaccgagguggugggcgacaucauccugaagccggccaacaacagccucaagaucaccgaggaggucgggcacacggaccugauggccgcguacguggacaacuccagccugaccaucaagaagcccaacgagcucucccgcgugcugggccugaagacccucgccacccacgggcuggccgccgucaacagcgugcccugggacacgaucgccaacuacgcgaagccguuccugaacaagguggucuccaccaccaccaacaucgugacgcgcugccucaaccgggugugcaccaacuacaugcccuacuucuucacccugcugcuccagcugugcaccuucacccgcagcacgaacucccggaucaaggccagcaugcccaccaccaucgccaagaacaccgucaaguccgugggcaaguucugccuggaggccagcuucaacuaccucaagagccccaacuucuccaagcugaucaacaucaucaucugguuccugcuccugagcgugugccugggcucccucaucuacagcacggccgcgcuggggguccugauguccaaccucggcaugccgagcuacugcaccggguaccgcgagggcuaccugaacuccaccaacgugaccaucgccacguacugcaccggcagcauccccugcuccgugugccugagcgggcucgacucccuggacaccuaccccagccuggagaccauccagaucacgaucuccagcuucaagugggaccucaccgccuucggccuggucgccgagugguuccuggccuacauccucuucacccgguucuucuacgugcuggggcuggcggccaucaugcagcucuucuucuccuacuucgccgugcacuucaucagcaacuccuggcugauguggcugaucaucaaccugguccagauggcccccaucagcgcgauggugcgcauguacaucuucuucgccuccuucuacuacguguggaagagcuacguccacgugguggacggcugcaacagcuccaccugcaugaugugcuacaagcggaaccgcgccacgcgggucgagugcaccaccaucgugaacgggguccgccggagcuucuacguguacgccaacggcggcaagggguucugcaagcuccacaacuggaacugcgugaacugcgacaccuucugcgccggcuccacguucaucagcgacgaggucgcgcgcgaccugucccugcaguucaagcggccgaucaaccccaccgaccagagcuccuacaucguggacagcgugaccgucaagaacggguccauccaccucuacuucgacaaggccggccagaagaccuacgagcgccacagccugucccacuucgugaaccuggacaaccuccgggccaacaacacgaaggggagccugcccaucaacgugaucgucuucgacggcaaguccaagugcgaggagagcuccgccaagagcgccuccguguacuacagccagcugaugugccagcccauccuccugcuggaccaggcgcucguguccgacgucggcgacagcgccgagguggccgugaagauguucgacgccuacgucaacaccuucagcuccaccuucaacgugccgauggagaagcugaagacccugguggccacggcggaggccgagcucgccaagaacgucagccuggacaacgugcuguccaccuucaucagcgccgcgcgccagggguucguggacuccgacgucgagaccaaggacgugguggagugccucaagcugagccaccaguccgacaucgaggucaccggcgacagcugcaacaacuacaugcugacguacaacaagguggagaacaugaccccccgggaccucggggccugcaucgacugcuccgcccgccacaucaacgcccagguggccaagagccacaacaucgcgcugaucuggaacgucaaggacuucaugucccugagcgagcagcuccggaagcagauccgcuccgccgccaagaagaacaaccugcccuucaagcugaccugcgccaccacgcgccagguggugaacgucgugaccaccaagaucgcccucaagggcgggugaggacuagucccuguucccagagcccacuuuuuuuucuuuuuuugaaauaaaauagccugucuuucagaucucaaaggcucuuuucagagccaccaaaaaaaaaaaaaaaaaaaaaaaaaaaaaaaaaaaaaaaaaaaaaaaaaaaaaaaaaaaaaaaaaaaaaaaaaaaaaaaaaaaaaaaaaaaaaaaaaaaaa

SEQ ID NO: 19639 - RNA, 6113 nt, Artificial Sequence
  SARS-CoV-2__MT844021.1__non-structural protein 3 (NSP3) mRNA gc
aggagagucccgcagucggcguccagcggcucugcuuguucgugugugugucguugcaggccuuauucaagcuuaccauggcccccaccaaggugaccuucggcgacgacacggucaucgaggugcagggguacaagagcgugaacaucaccuucgagcuggacgagcgcaucgacaagguccucaacgagaagugcuccgccuacaccguggagcugggcaccgaggugaacgaguucgcgugcgucguggccgacgccgugaucaagacgcugcagccggucagcgagcuccugaccccccuggggaucgaccucgacgagugguccauggccaccuacuaccuguucgacgagagcggcgaguucaagcuggccucccacauguacugcagcuucuacccccccgacgaggacgaggaggagggggacugcgaggaggaggaguucgagccguccacccaguacgaguacggcacggaggacgacuaccagggcaagccccucgaguucggggcgaccagcgccgcccugcagcccgaggaggagcaggaggaggacuggcuggacgacgacucccagcagaccgugggccagcaggacgggagcgaggacaaccagaccacgaccauccagaccaucguggagguccagccccagcucgagauggagcugaccccgguggugcagacgaucgaggucaacuccuucagcggcuaccugaagcucaccgacaacguguacaucaagaacgccgacaucguggaggaggcgaagaaggucaagcccaccgugguggucaacgccgccaacguguaccugaagcacgggggcggcguggccggggcccugaacaaggcgaccaacaacgccaugcaggucgaguccgacgacuacaucgccacgaacggcccccucaagguggggggcagcugcguccuguccggccacaaccuggccaagcacugccuccacgugguggggcccaacgucaacaagggcgaggacauccagcugcugaagagcgccuacgagaacuucaaccagcacgaggugcuccuggcgccgcugcucuccgccgggaucuucggcgccgaccccauccacagccugcgggugugcgucgacaccgugcgcaccaacguguaccuggccgucuucgacaagaaccucuacgacaagcugguguccagcuuccuggagaugaagagcgagaagcagguggagcagaagaucgccgagauccccaaggaggaggucaagcccuucaucaccgaguccaagccgagcguggagcagcggaagcaggacgacaagaagaucaaggcgugcguggaggaggucacgaccacccucgaggagaccaaguuccugacggagaaccugcuccuguacaucgacaucaacgggaaccugcaccccgacuccgccacccucgugagcgacaucgacaucaccuuccugaagaaggacgcccccuacaucgugggcgacgucgugcaggagggcgugcugaccgccgucgugauccccacgaagaaggccgggggcaccaccgagaugcucgcgaaggcccugcgcaaggugccgaccgacaacuacaucacgaccuaccccgggcagggccugaacggguacaccgucgaggaggccaagaccgugcucaagaagugcaaguccgccuucuacauccugcccagcaucaucuccaacgagaagcaggagauccugggcaccgugagcuggaaccuccgggagaugcuggcgcacgccgaggagacgcgcaagcugaugcccgucugcguggagaccaaggccaucguguccaccauccagcggaaguacaagggcaucaagauccaggagggggucguggacuacggcgcccgcuucuacuucuacaccagcaagacgaccguggccucccugaucaacacccucaacgaccugaacgagacccuggucacgaugccgcucggguacgugacccacggccugaaccuggaggaggcggcccgguacaugcgcagccucaaggugcccgccaccgucuccgugagcucccccgacgccgugaccgccuacaacggguaccugacgagcuccagcaagacccccgaggagcacuucaucgagaccaucucccuggcgggcagcuacaaggacuggagcuacuccggccagagcacccagcucgggaucgaguuccugaagcggggcgacaaguccgucuacuacacgagcaacccgaccaccuuccaccuggacggggaggugaucaccuucgacaaccucaagacgcugcugucccuccgcgaggugcggaccaucaaggucuucaccaccguggacaacaucaaccugcacacgcagguggucgacaugagcaugaccuacggccagcaguucggccccaccuaccuggacggggccgacgugaccaagaucaagccccacaacucccacgagggcaagacguucuacgugcucccgaacgacgacacccugcgcgucgaggccuucgaguacuaccacaccaccgaccugagcuuccucgggcgguacauguccgcccugaaccacacgaagaaguggaaguacccccaggugaacggccugaccagcaucaagugggccgacaacaacugcuaccucgcgaccgcccugcugacccuccagcagaucgagcugaaguucaacccccccgcccugcaggacgccuacuaccgcgcgcgggccggggaggccgccaacuucugcgcccucauccuggcguacugcaacaagacggugggcgagcugggcgacguccgcgagaccauguccuaccucuuccagcacgccaaccuggacagcugcaagcgggugcugaacgucgugugcaagaccugcgggcagcagcagaccacccucaagggcguggaggccgucauguacauggggacgcuguccuacgagcaguucaagaagggcgugcagaucccgugcaccugcgggaagcaggccaccaaguaccuggugcagcaggagagccccuucgucaugauguccgccccccccgcgcaguacgagcucaagcacggcaccuucacgugcgccagcgaguacaccggcaacuaccagugcgggcacuacaagcacaucaccuccaaggagacccuguacugcaucgacggcgcccugcucacgaagagcagcgaguacaaggggccgaucaccgacguguucuacaaggagaacuccuacaccaccacgaucaagcccgugaccuacaagcuggacggcgucgugugcaccgagaucgaccccaagcuggacaacuacuacaagaaggacaacagcuacuucaccgagcagcccaucgaccucgugccgaaccagcccuaccccaacgccuccuucgacaacuucaaguucgucugcgacaacaucaaguucgccgacgaccugaaccagcugacgggguacaagaagcccgcgagccgcgagcucaaggugaccuucuucccggaccugaacggcgacguggucgccaucgacuacaagcacuacacccccuccuucaagaagggcgccaagcugcuccacaagcccaucguguggcacgugaacaacgccaccaacaaggcgacguacaagcccaacaccuggugcauccggugccuguggagcaccaagccggucgagaccuccaacagcuucgacgugcugaaguccgaggacgcccaggggauggacaaccucgccugcgaggaccugaagcccgugagcgaggaggucguggagaaccccacgauccagaaggacgugcuggagugcaacgucaagaccaccgagguggugggcgacaucauccucaagcccgccaacaacucccugaagaucaccgaggaggucgggcacacggaccugauggccgcguacguggacaacagcucccucaccaucaagaagccgaacgagcugagccgcgugcugggccucaagacccuggccacccacgggcuggccgccgucaacuccgugcccugggacacgaucgccaacuacgcgaagcccuuccucaacaagguggucagcaccaccaccaacaucgugacgcgcugccugaaccgggugugcaccaacuacaugccguacuucuucacccugcuccugcagcugugcaccuucacccgcuccacgaacagccggaucaaggccuccaugcccaccaccaucgccaagaacaccgucaagagcgugggcaaguucugccucgaggccagcuucaacuaccugaagucccccaacuucagcaagcugaucaacaucaucaucugguuccuccugcuguccgugugccucggcagccugaucuacuccacggccgcgcuggggguccucaugagcaaccugggcaugcccuccuacugcaccggguaccgcgagggcuaccugaacagcaccaacgugaccaucgccacguacugcaccggcuccaucccgugcagcgugugccucuccgggcuggacagccuggacaccuaccccucccucgagaccauccagaucacgaucagcuccuucaagugggaccugaccgccuucggccuggucgccgagugguuccucgccuacauccuguucacccgguucuucuacgugcuggggcucgcggccaucaugcagcuguucuucagcuacuucgccgugcacuucaucuccaacagcuggcugauguggcugaucaucaaccucguccagauggcccccaucuccgcgauggugcgcauguacaucuucuucgccagcuucuacuacguguggaagagcuacguccacgugguggacggcugcaacuccagcaccugcaugaugugcuacaagcggaaccgcgccacgcgggucgagugcaccaccaucgugaacgggguccgccgguccuucuacguguacgccaacggcggcaagggguucugcaagcugcacaacuggaacugcgugaacugcgacaccuucugcgccggcagcacguucaucuccgacgaggucgcgcgcgaccugagccuccaguucaagcggcccaucaacccgaccgaccaguccagcuacaucguggacuccgugaccgucaagaacgggagcauccaccuguacuucgacaaggccggccagaagaccuacgagcgccacucccugagccacuucgugaaccucgacaaccugcgggccaacaacacgaaggggucccugcccaucaacgugaucgucuucgacggcaagagcaagugcgaggaguccagcgccaaguccgccagcguguacuacucccagcucaugugccagcccauccugcugcucgaccaggcgcuggugagcgacgucggcgacagcgccgagguggccgugaagauguucgacgccuacgucaacaccuucuccagcaccuucaacgugcccauggagaagcugaagacccucguggccacggcggaggccgagcuggccaagaacgucucccuggacaacgugcucagcaccuucaucuccgccgcgcgccagggguucguggacagcgacgucgagaccaaggacgugguggagugccugaagcugucccaccagagcgacaucgaggucaccggcgacuccugcaacaacuacaugcucacguacaacaagguggagaacaugaccccgcgggaccugggggccugcaucgacugcagcgcccgccacaucaacgcccagguggccaagucccacaacaucgcgcugaucuggaacgucaaggacuucaugagccucuccgagcagcugcggaagcagauccgcagcgccgccaagaagaacaaccugcccuucaagcucaccugcgccaccacgcgccagguggugaacgucgugaccaccaagaucgcccugaagggcgggugaggacuagucccuguucccagagcccacuuuuuuuucuuuuuuugaaauaaaauagccugucuuucagaucucaaaggcucuuuucagagccaccaaaaaaaaaaaaaaaaaaaaaaaaaaaaaaaaaaaaaaaaaaaaaaaaaaaaaaaaaaaaaaaaaaaaaaaaaaaaaaaaaaaaaaaaaaaaaaaaaaaaa

SEQ ID NO: 19640 - RNA, 6113 nt, Artificial Sequence
  SARS-CoV-2__MT844044.1__non-structural protein 3 (NSP3) mRNA gc
aggagagucccgcagucggcguccagcggcucugcuuguucgugugugugucguugcaggccuuauucaagcuuaccauggcccccaccaaggugaccuucggcgacgacacggucaucgaggugcagggguacaagagcgugaacaucaccuucgagcuggacgagcgcaucgacaagguccucaacgagaagugcuccgccuacaccguggagcugggcaccgaggugaacgaguucgcgugcgucguggccgacgccgugaucaagacgcugcagccggucagcgagcuccugaccccccuggggaucgaccucgacgagugguccauggccaccuacuaccuguucgacgagagcggcgaguucaagcuggccucccacauguacugcagcuucuacccccccgacgaggacgaggaggagggggacugcgaggaggaggaguucgagccguccacccaguacgaguacggcacggaggacgacuaccagggcaagccccucgaguucggggcgaccagcgccgcccugcagcccgaggaggagcaggaggaggacuggcuggacgacgacucccagcagaccgugggccagcaggacgggagcgaggacaaccagaccacgaccauccagaccaucguggagguccagccccagcucgagauggagcugaccccgguggugcagacgaucgaggucaacuccuucagcggcuaccugaagcucaccgacaacguguacaucaagaacgccgacaucguggaggaggcgaagaaggucaagcccaccgugguggucaacgccgccaacguguaccugaagcacgggggcggcguggccggggcccugaacaaggcgaccaacaacgccaugcaggucgaguccgacgacuacaucgccacgaacggcccccucaagguggggggcagcugcguccuguccggccacaaccuggccaagcacugccuccacgugguggggcccaacgucaacaagggcgaggacauccagcugcugaagagcgccuacgagaacuucaaccagcacgaggugcuccuggcgccgcugcucuccgccgggaucuucggcgccgaccccauccacagccugcgggugugcgucgacaccgugcgcaccaacguguaccuggccgucuucgacaagaaccucuacgacaagcugguguccagcuuccuggagaugaagagcgagaagcagguggagcagaagaucgccgagauccccaaggaggaggucaagcccuucaucaccgaguccaagccgagcguggagcagcggaagcaggacgacaagaagaucaaggcgugcguggaggaggucacgaccacccucgaggagaccaaguuccugacggagaaccugcuccuguacaucgacaucaacgggaaccugcaccccgacuccgccacccucgugagcgacaucgacaucaccuuccugaagaaggacgcccccuacaucgugggcgacgucgugcaggagggcgugcugaccgccgucgugauccccacgaagaaggccgggggcaccaccgggaugcucgcgaaggcccugcgcaaggugccgaccgacaacuacaucacgaccuaccccggccaggggcugaacggcuacaccgucgaggaggccaagaccgugcucaagaagugcaaguccgccuucuacauccugcccagcaucaucuccaacgagaagcaggagauccugggcaccgugagcuggaaccuccgggagaugcuggcgcacgccgaggagacgcgcaagcugaugcccgucugcguggagaccaaggccaucguguccaccauccagcggaaguacaaggggaucaagauccaggagggcgucguggacuacggggcccgcuucuacuucuacaccagcaagacgaccguggccucccugaucaacacccucaacgaccugaacgagacccuggucacgaugccgcucggcuacgugacccacgggcugaaccuggaggaggcggcccgguacaugcgcagccucaaggugcccgccaccgucuccgugagcucccccgacgccgugaccgccuacaacggcuaccugacgagcuccagcaagacccccgaggagcacuucaucgagaccaucucccuggcgggcagcuacaaggacuggagcuacuccgggcagagcacccagcucggcaucgaguuccugaagcggggggacaaguccgucuacuacacgagcaacccgaccaccuuccaccuggacggcgaggugaucaccuucgacaaccucaagacgcugcugucccuccgcgaggugcggaccaucaaggucuucaccaccguggacaacaucaaccugcacacgcagguggucgacaugagcaugaccuacggccagcaguucgggcccaccuaccuggacggcgccgacgugaccaagaucaagccccacaacucccacgaggggaagacguucuacgugcucccgaacgacgacacccugcgcgucgaggccuucgaguacuaccacaccaccgaccccagcuuccugggccgguacauguccgcccucaaccacacgaagaaguggaaguacccccaggugaacgggcugaccagcaucaagugggccgacaacaacugcuaccuggcgaccgcccuccugacccugcagcagaucgagcucaaguucaaccccccggcccugcaggacgccuacuaccgcgcgcgggccggcgaggccgccaacuucugcgcccugauccucgcguacugcaacaagacggugggcgagcugggggacguccgcgagaccauguccuaccuguuccagcacgccaaccucgacagcugcaagcgggugcugaacgucgugugcaagaccugcggccagcagcagaccacccugaaggggguggaggccgucauguacaugggcacgcucuccuacgagcaguucaagaagggggugcagauccccugcaccugcggcaagcaggccaccaaguaccuggugcagcaggagagccccuucgucaugauguccgcccccccggcgcaguacgagcugaagcacggcaccuucacgugcgccagcgaguacaccgggaacuaccagugcggccacuacaagcacaucaccuccaaggagacccucuacugcaucgacggggcccugcugacgaagagcagcgaguacaagggccccaucaccgacguguucuacaaggagaacuccuacaccaccacgaucaagcccgugaccuacaagcucgacggggucgugugcaccgagaucgaccccaagcuggacaacuacuacaagaaggacaacagcuacuucaccgagcagccgaucgaccuggugcccaaccagcccuaccccaacgccuccuucgacaacuucaaguucgucugcgacaacaucaaguucgccgacgaccucaaccagcugacgggcuacaagaagccggcgagccgcgagcugaaggugaccuucuuccccgaccucaacggcgacguggucgccaucgacuacaagcacuacacccccuccuucaagaagggggccaagcugcugcacaagcccaucguguggcacgugaacaacgccaccaacaaggcgacguacaagccgaacaccuggugcauccggugccucuggagcaccaagcccgucgagaccuccaacagcuucgacgugcugaaguccgaggacgcccagggcauggacaaccuggccugcgaggaccucaagcccgugagcgaggaggucguggagaaccccacgauccagaaggacgugcuggagugcaacgucaagaccaccgagguggugggggacaucauccugaagccggccaacaacucccucaagaucaccgaggaggucggccacacggaccugauggccgcguacguggacaacagcucccugaccaucaagaagcccaacgagcucagccgcgugcuggggcugaagacccucgccacccacggccuggccgccgucaacuccgugcccugggacacgaucgccaacuacgcgaagccguuccugaacaagguggucagcaccaccaccaacaucgugacgcgcugccucaaccgggugugcaccaacuacaugcccuacuucuucacccugcugcuccagcugugcaccuucacccgcuccacgaacagccggaucaaggccuccaugcccaccaccaucgccaagaacaccgucaagagcgugggcaaguucugccuggaggccagcuucaacuaccucaagucccccaacuucagcaagcugaucaacaucaucaucugguuccugcuccuguccgugugccuggggagccucaucuacuccacggccgcgcugggcguccugaugagcaaccucgggaugccguccuacugcaccggcuaccgcgagggcuaccugaacagcaccaacgugaccaucgccacguacugcaccggguccauccccugcagcgugugccuguccggccucgacagccuggacaccuaccccucccuggagaccauccagaucacgaucagcuccuucaagugggaccucaccgccuucgggcuggucgccgagugguuccuggccuacauccucuucacccgguucuucuacgugcugggccuggcggccaucaugcagcucuucuucagcuacuucgccgugcacuucaucuccaacagcuggcugauguggcugaucaucaaccugguccagauggcccccaucuccgcgauggugcgcauguacaucuucuucgccagcuucuacuacguguggaagagcuacguccacgugguggacgggugcaacuccagcaccugcaugaugugcuacaagcggaaccgcgccacgcgggucgagugcaccaccaucgugaacggcguccgccgguccuucuacguguacgccaacggcgggaagggcuucugcaagcuccacaacuggaacugcgugaacugcgacaccuucugcgccgggagcacguucaucuccgacgaggucgcgcgcgaccugagccugcaguucaagcggccgaucaaccccaccgaccaguccagcuacaucguggacuccgugaccgucaagaacggcagcauccaccucuacuucgacaaggccgggcagaagaccuacgagcgccacucccugagccacuucgugaaccuggacaaccuccgggccaacaacacgaagggcucccugcccaucaacgugaucgucuucgacggcaagagcaagugcgaggaguccagcgccaaguccgccagcguguacuacucccagcugaugugccagcccauccuccugcuggaccaggcgcucgugagcgacgucggggacagcgccgagguggccgugaagauguucgacgccuacgucaacaccuucuccagcaccuucaacgugccgauggagaagcugaagacccugguggccacggcggaggccgagcucgccaagaacgucucccuggacaacgugcugagcaccuucaucuccgccgcgcgccagggcuucguggacagcgacgucgagaccaaggacgugguggagugccucaagcugucccaccagagcgacaucgaggucaccggggacuccugcaacaacuacaugcugacguacaacaagguggagaacaugaccccccgggaccucggcgccugcaucgacugcagcgcccgccacaucaacgcccagguggccaagucccacaacaucgcgcugaucuggaacgucaaggacuucaugagccuguccgagcagcuccggaagcagauccgcagcgccgccaagaagaacaaccugcccuucaagcugaccugcgccaccacgcgccagguggugaacgucgugaccaccaagaucgcccucaaggggggcugaggacuagucccuguucccagagcccacuuuuuuuucuuuuuuugaaauaaaauagccugucuuucagaucucaaaggcucuuuucagagccaccaaaaaaaaaaaaaaaaaaaaaaaaaaaaaaaaaaaaaaaaaaaaaaaaaaaaaaaaaaaaaaaaaaaaaaaaaaaaaaaaaaaaaaaaaaaaaaaaaaaaa

SEQ ID NO: 19641 - RNA, 6113 nt, Artificial Sequence
  SARS-CoV-2__MT831129.1__non-structural protein 3 (NSP3) mRNA gc
aggagagucccgcagucggcguccagcggcucugcuuguucgugugugugucguugcaggccuuauucaagcuuaccauggcccccaccaaggugaccuucggcgacgacacggucaucgaggugcagggguacaagagcgugaacaucaccuucgagcuggacgagcgcaucgacaagguccucaacgagaagugcuccgccuacaccguggagcugggcaccgaggugaacgaguucgcgugcgucguggccgacgccgugaucaagacgcugcagccggucagcgagcuccugaccccccuggggaucgaccucgacgagugguccauggccaccuacuaccuguucgacgagagcggcgaguucaagcuggccucccacauguacugcagcuucuacccccccgacgaggacgaggaggagggggacugcgaggaggaggaguucgagccguccacccaguacgaguacggcacggaggacgacuaccagggcaagccccucgaguucggggcgaccagcgccgcccugcagcccgaggaggagcaggaggaggacuggcuggacgacgacucccagcagaccgugggccagcaggacgggagcgaggacaaccagaccacgaccauccagaccaucguggagguccagccccagcucgagauggagcugaccccgguggugcagacgaucgaggucaacuccuucagcggcuaccugaagcucaccgacaacguguacaucaagaacgccgacaucguggaggaggcgaagaaggucaagcccaccgugguggucaacgccgccaacguguaccugaagcacgggggcggcguggccggggcccugaacaaggcgaccaacaacgccaugcaggucgaguccgacgacuacaucgccacgaacggcccccucaagguggggggcagcugcguccuguccggccacaaccuggccaagcacugccuccacgugguggggcccaacgucaacaagggcgaggacauccagcugcugaagagcgccuacgagaacuucaaccagcacgaggugcuccuggcgccgcugcucuccgccgggaucuucggcgccgaccccauccacagccugcgggugugcgucgacaccgugcgcaccaacguguaccuggccgucuucgacaagaaccucuacgacaagcugguguccagcuuccuggagaugaagagcgagaagcagguggagcagaagaucgccgagauccccaaggaggaggucaagcccuucaucaccgaguccaagccgagcguggagcagcggaagcaggacgacaagaagaucaaggcgugcguggaggaggucacgaccacccucgaggagaccaaguuccugacggagaaccugcuccuguacaucgacaucaacgggaaccugcaccccgacuccgccacccucgugagcgacaucgacaucaccuuccugaagaaggacgcccccuacaucgugggcgacgucgugcaggagggcgugcugaccgccgucgugauccccacgaagaaggccgggggcaccaccgagaugcucgcgaaggcccugcgcaaggugccgaccgacaacuacaucacgaccuaccccgggcagggccugaacggguacaccgucgaggacgccaagaccgugcucaagaagugcaaguccgccuucuacauccugcccagcaucaucuccaacgagaagcaggagauccugggcaccgugagcuggaaccuccgggagaugcuggcgcacgccgaggagacgcgcaagcugaugcccgucugcguggagaccaaggccaucguguccaccauccagcggaaguacaagggcaucaagauccaggagggggucguggacuacggcgcccgcuucuacuucuacaccagcaagacgaccguggccucccugaucaacacccucaacgaccugaacgagacccuggucacgaugccgcucggguacgugacccacggccugaaccuggaggaggcggcccgguacaugcgcagccucaaggugcccgccaccgucuccgugagcucccccgacgccgugaccgccuacaacggguaccugacgagcuccagcaagacccccgaggagcacuucaucgagaccaucucccuggcgggcagcuacaaggacuggagcuacuccggccagagcacccagcucgggaucgaguuccugaagcggggcgacaaguccgucuacuacacgagcaacccgaccaccuuccaccuggacggggaggugaucaccuucgacaaccucaagacgcugcugucccuccgcgaggugcggaccaucaaggucuucaccaccguggacaacaucaaccugcacacgcagguggucgacaugagcaugaccuacggccagcaguucggccccaccuaccuggacggggccgacgugaccaagaucaagccccacaacucccacgagggcaagacguucuacgugcucccgaacgacgacacccugcgcgucgaggccuucgaguacuaccacaccaccgaccccagcuuccuggggcgguacauguccgcccucaaccacacgaagaaguggaaguacccccaggugaacggccugaccagcaucaagugggccgacaacaacugcuaccuggcgaccgcccuccugacccugcagcagaucgagcucaaguucaaccccccggcccugcaggacgccuacuaccgcgcgcgggccggggaggccgccaacuucugcgcccugauccucgcguacugcaacaagacggugggcgagcugggcgacguccgcgagaccauguccuaccuguuccagcacgccaaccucgacagcugcaagcgggugcugaacgucgugugcaagaccugcgggcagcagcagaccacccugaagggcguggaggccgucauguacauggggacgcucuccuacgagcaguucaagaagggcgugcagauccccugcaccugcgggaagcaggccaccaaguaccuggugcagcaggagagccccuucgucaugauguccgcccccccggcgcaguacgagcugaagcacggcaccuucacgugcgccagcgaguacaccggcaacuaccagugcgggcacuacaagcacaucaccuccaaggagacccucuacugcaucgacggcgcccugcugacgaagagcagcgaguacaaggggcccaucaccgacguguucuacaaggagaacuccuacaccaccacgaucaagcccgugaccuacaagcucgacggcgucgugugcaccgagaucgaccccaagcuggacaacuacuacaagaaggacaacagcuacuucaccgagcagccgaucgaccuggugcccaaccagcccuaccccaacgccuccuucgacaacuucaaguucgucugcgacaacaucaaguucgccgacgaccucaaccagcugacgggguacaagaagccggcgagccgcgagcugaaggugaccuucuuccccgaccucaacggcgacguggucgccaucgacuacaagcacuacacccccuccuucaagaagggcgccaagcugcugcacaagcccaucguguggcacgugaacaacgccaccaacaaggcgacguacaagccgaacaccuggugcauccggugccucuggagcaccaagcccgucgagaccuccaacagcuucgacgugcugaaguccgaggacgcccaggggauggacaaccuggccugcgaggaccucaagcccgugagcgaggaggucguggagaaccccacgauccagaaggacgugcuggagugcaacgucaagaccaccgagguggugggcgacaucauccugaagccggccaacaacucccucaagaucaccgaggaggucgggcacacggaccugauggccgcguacguggacaacagcucccugaccaucaagaagcccaacgagcucagccgcgugcugggccugaagacccucgccacccacgggcuggccgccgucaacuccgugcccugggacacgaucgccaacuacgcgaagccguuccugaacaagguggucagcaccaccaccaacaucgugacgcgcugccucaaccgggugugcaccaacuacaugcccuacuucuucacccugcugcuccagcugugcaccuucacccgcuccacgaacagccggaucaaggccuccaugcccaccaccaucgccaagaacaccgucaagagcgugggcaaguucugccuggaggccagcuucaacuaccucaagucccccaacuucagcaagcugaucaacaucaucaucugguuccugcuccuguccgugugccugggcagccucaucuacuccacggccgcgcuggggguccugaugagcaaccucggcaugccguccuacugcaccggguaccgcgagggcuaccugaacagcaccaacgugaccaucgccacguacugcaccggcuccauccccugcagcgugugccuguccgggcucgacagccuggacaccuaccccucccuggagaccauccagaucacgaucagcuccuucaagugggaccucaccgccuucggccuggucgccgagugguuccuggccuacauccucuucacccgguucuucuacgugcuggggcuggcggccaucaugcagcucuucuucagcuacuucgccgugcacuucaucuccaacagcuggcugauguggcugaucaucaaccugguccagauggcccccaucuccgcgauggugcgcauguacaucuucuucgccagcuucuacuacguguggaagagcuacguccacgugguggacggcugcaacuccagcaccugcaugaugugcuacaagcggaaccgcgccacgcgggucgagugcaccaccaucgugaacgggguccgccgguccuucuacguguacgccaacggcggcaagggguucugcaagcuccacaacuggaacugcgugaacugcgacaccuucugcgccggcagcacguucaucuccgacgaggucgcgcgcgaccugagccugcaguucaagcggccgaucaaccccaccgaccaguccagcuacaucguggacuccgugaccgucaagaacgggagcauccaccucuacuucgacaaggccggccagaagaccuacgagcgccacucccugagccacuucgugaaccuggacaaccuccgggccaacaacacgaaggggucccugcccaucaacgugaucgucuucgacggcaagagcaagugcgaggaguccagcgccaaguccgccagcguguacuacucccagcugaugugccagcccauccuccugcuggaccaggcgcucgugagcgacgucggcgacagcgccgagguggccgugaagauguucgacgccuacgucaacaccuucuccagcaccuucaacgugccgauggagaagcugaagacccugguggccacggcggaggccgagcucgccaagaacgucucccuggacaacgugcugagcaccuucaucuccgccgcgcgccagggguucguggacagcgacgucgagaccaaggacgugguggagugccucaagcugucccaccagagcgacaucgaggucaccggcgacuccugcaacaacuacaugcugacguacaacaagguggagaacaugaccccccgggaccucggggccugcaucgacugcagcgcccgccacaucaacgcccagguggccaagucccacaacaucgcgcugaucuggaacgucaaggacuucaugagccuguccgagcagcuccggaagcagauccgcagcgccgccaagaagaacaaccugcccuucaagcugaccugcgccaccacgcgccagguggugaacgucgugaccaccaagaucgcccucaagggcgggugaggacuagucccuguucccagagcccacuuuuuuuucuuuuuuugaaauaaaauagccugucuuucagaucucaaaggcucuuuucagagccaccaaaaaaaaaaaaaaaaaaaaaaaaaaaaaaaaaaaaaaaaaaaaaaaaaaaaaaaaaaaaaaaaaaaaaaaaaaaaaaaaaaaaaaaaaaaaaaaaaaaaa

SEQ ID NO: 19642 - RNA, 6113 nt, Artificial Sequence
  SARS-CoV-2__MT831131.1__non-structural protein 3 (NSP3) mRNA gc
aggagagucccgcagucggcguccagcggcucugcuuguucgugugugugucguugcaggccuuauucaagcuuaccauggcccccaccaaggugaccuucggcgacgacacggucaucgaggugcagggguacaagagcgugaacaucaccuucgagcuggacgagcgcaucgacaagguccucaacgagaagugcuccgccuacaccguggagcugggcaccgaggugaacgaguucgcgugcgucguggccgacgccgugaucaagacgcugcagccggucagcgagcuccugaccccccuggggaucgaccucgacgagugguccauggccaccuacuaccuguucgacgagagcggcgaguucaagcuggccucccacauguacugcagcuucuacccccccgacgaggacgaggaggagggggacugcgaggaggaggaguucgagccguccacccaguacgaguacggcacggaggacgacuaccagggcaagccccucgaguucggggcgaccagcgccgcccugcagcccgaggaggagcaggaggaggacuggcuggacgacgacucccagcagaccgugggccagcaggacgggagcgaggacaaccagaccacgaccauccagaccaucguggagguccagccccagcucgagauggagcugaccccgguggugcagacgaucgaggucaacuccuucagcggcuaccugaagcucaccgacaacguguacaucaagaacgccgacaucguggaggaggcgaagaaggucaagcccaccgugguggucaacgccgccaacguguaccugaagcacgggggcggcguggccggggcccugaacaaggcgaccaacaacgccaugcaggucgaguccgacgacuacaucgccacgaacggcccccucaagguggggggcagcugcguccuguccggccacaaccuggccaagcacugccuccacgugguggggcccaacgucaacaagggcgaggacauccagcugcugaagagcgccuacgagaacuucaaccagcacgaggugcuccuggcgccgcugcucuccgccgggaucuucggcgccgaccccauccacagccugcgggugugcgucgacaccgugcgcaccaacguguaccuggccgucuucgacaagaaccucuacgacaagcugguguccagcuuccuggagaugaagagcgagaagcagguggagcagaagaucgccgagauccccaaggaggaggucaagcccuucaucaccgaguccaagccgagcguggagcagcggaagcaggacgacaagaagaucaaggcgugcguggaggaggucacgaccacccucgaggagaccaaguuccugacggagaaccugcuccuguacaucgacaucaacgggaaccugcaccccgacuccgccacccucgugagcgacaucgacaucaccuuccugaagaaggacgcccccuacaucgugggcgacgucgugcaggagggcgugcugaccgccgucgugauccccacgaagaaggccgggggcaccaccgagaugcucgcgaaggcccugcgcaaggugccgaccgacaacuacaucacgaccuaccccgggcagggccugaacggguacaccgucgaggaggccaagaccgugcucaagaagugcaaguccgccuucuacauccugcccagcaucaucuccaacgagaagcaggagauccugggcaccgugagcuggaaccuccgggagaugcuggcgcacgccgaggagacgcgcaagcugaugcccgucugcguggagaccaaggccaucguguccaccauccagcggaaguacaagggcaucaagauccaggagggggucguggacuacggcgcccgcuucuacuucuacaccagcaagacgaccguggccucccugaucaacacccucaacgaccugaacgagacccuggucacgaugccgcucggguacgugacccacggccugaaccuggaggaggcggcccgguacaugcgcagccucaaggugcccgccaccgucuccgugagcucccccgacgccgugaccgccuacaacggguaccugacgagcuccagcaagacccccgaggagcacuucaucgagaccaucucccuggcgggcagcuacaaggacuggagcuacuccggccagagcacccagcucgggaucgaguuccugaagcggggcgacaaguccgucuacuacacgagcaacccgaccaccuuccaccuggacggggaggugaucaccuucgacaaccucaagacgcugcugucccuccgcgaggugcggaccaucaaggucuucaccaccguggacaacaucaaccugcacacgcagguggucgacaugagcaugaccuacggccagcaguucggccccaccuaccuggacggggccgacgugaccaagaucaagccccacaacucccacgagggcaagacguucuacgugcucccgaacgacgacacccugcgcgucgaggccuucgaguacuaccacaccaccgaccccagcuuccuggggcgguacauguccgcccucaaccacacgaagaaguggaaguacccccaggugaacggccugaccagcaucaagugggccgacaacaacugcuaccuggcgaccgcccuccugacccugcagcagaucgagcucaaguucaaccccccggcccugcaggacgccuacuaccgcgcgcgggccggggaggccgccaacuucugcgcccugauccucgcguacugcaacaagacggugggcgagcugggcgacguccgcgagaccauguccuaccuguuccagcacgccaaccucgacagcugcaagcgggugcugaacgucgugugcaagaccugcgggcagcagcagaccacccugaagggcguggaggccgucauguacauggggacgcucuccuacgagcaguucaagaagggcgugcagauccccugcaccugcgggaagcaggccaccaaguaccuggugcagcaggagagccccuucgucaugauguccgcccccccggcgcaguacgagcugaagcacggcaccuucacgugcgccagcgaguacaccggcaacuaccagugcgggcacuacaagcacaucaccuccaaggagacccucuacugcaucgacggcgcccugcugacgaagagcagcgaguacaaggggcccaucaccgacguguucuacaaggagaacuccuacaccaccacgaucaagcccgugaccuacaagcucgacggcgucgugugcaccgagaucgaccccaagcuggacaacuacuacaagaaggacaacagcuacuucaccgagcagccgaucgaccuggugcccaaccagcccuaccccaacgccuccuucgacaacuucaaguucgucugcgacaacaucaaguucgccgacgaccucaaccagcugacgggguacaagaagccggcgagccgcgagcugaaggugaccuucuuccccgaccucaacggcgacguggucgccaucgacuacaagcacuacacccccuccuucaagaagggcgccaagcugcugcacaagcccaucguguggcacgugaacaacgccaccaacaaggcgacguacaagccgaacaccuggugcauccggugccucuggagcaccaagcccgucgagaccuccaacagcuucgacgugcugaaguccgaggacgcccaggggauggacaaccuggccugcgaggaccucaagcccgugagcgaggaggucguggagaaccccacgauccagaaggacgugcuggagugcaacgucaagaccaccgagguggugggcgacaucauccugaagccggccaacaacucccucaagaucaccgaggaggucgggcacacggaccugauggccgcguacguggacaacagcucccugaccaucaagaagcccaacgagcucagccgcgugcugggccugaagacccucgccacccacgggcuggccgccgucaacuccgugcccugggacacgaucgccaacuacgcgaagccguuccugaacaagguggucagcaccaccaccaacaucgugacgcgcugccucaaccgggugugcaccaacuacaugcccuacuucuucacccugcugcuccagcugugcaccuucacccgcuccacgaacagccggaucaaggccuccaugcccaccaccaucgccaagaacaccgucaagagcgugggcaaguucugccuggaggccagcuucaacuaccucaagucccccaacuucagcaagcugaucaacaucaucaucugguuccugcuccuguccgugugccugggcagccucaucuacuccacggccgcgcuggggguccugaugagcaaccucggcaugccguccuacugcaccggguaccgcgagggcuaccugaacagcaccaacgugaccaucgccacguacugcaccggcuccauccccugcagcgugugccuguccgggcucgacagccuggacaccuaccccucccuggagaccauccagaucacgaucagcuccuucaagugggaccucaccgccuucggccuggucgccgagugguuccuggccuacauccucuucacccgguucuucuacgugcuggggcuggcggccaucaugcagcucuucuucagcuacuucgccgugcacuucaucuccaacagcuggcugauguggcugaucaucaaccugguccagauggcccccaucuccgcgauggugcgcauguacaucuucuucgccagcuucuacuacguguggaagagcuacguccacgugguggacggcugcaacuccagcaccugcaugaugugcuacaagcggaaccgcgccacgcgggucgagugcaccaccaucgugaacgggguccgccgguccuucuacguguacgccaacggcggcaagggguucugcaagcuccacaacuggaacugcgugaacugcgacaccuucugcgccggcagcacguucaucuccgacgaggucgcgcgcgaccugagccugcaguucaagcggccgaucaaccccaccgaccaguccagcuacaucguggacuccgugaccgucaagaacgggagcauccaccucuacuucgacaaggccggccagaagaccuacgagcgccacucccugagccacuucgugaaccuggacaaccuccgggccaacaacacgaaggggucccugcccaucaacgugaucgucuucgacggcaagagcaagugcgaggaguccagcgccaaguccgccagcguguacuacucccagcugaugugccagcccauccuccugcuggaccaggcgcucgugagcgacgucggcgacagcgccgagguggccgugaagauguucgacgccuacgucaacaccuucuccagcaccuucaacaucccgauggagaagcugaagacccugguggccacggcggaggccgagcucgccaagaacgugucccuggacaacguccugagcaccuucaucuccgccgcgcgccagggguucguggacagcgacguggagaccaaggacgucguggagugccucaagcugucccaccagagcgacaucgaggugaccggcgacuccugcaacaacuacaugcugacguacaacaaggucgagaacaugaccccccgggaccucggggccugcaucgacugcagcgcccgccacaucaacgcccagguggccaagucccacaacaucgcgcugaucuggaacgugaaggacuucaugagccuguccgagcagcuccggaagcagauccgcagcgccgccaagaagaacaaccugcccuucaagcugaccugcgccaccacgcgccaggucgugaacguggucaccaccaagaucgcccucaagggcgggugaggacuagucccuguucccagagcccacuuuuuuuucuuuuuuugaaauaaaauagccugucuuucagaucucaaaggcucuuuucagagccaccaaaaaaaaaaaaaaaaaaaaaaaaaaaaaaaaaaaaaaaaaaaaaaaaaaaaaaaaaaaaaaaaaaaaaaaaaaaaaaaaaaaaaaaaaaaaaaaaaaaaa

SEQ ID NO: 19643 - RNA, 6113 nt, Artificial Sequence
  SARS-CoV-2__MT831162.1__non-structural protein 3 (NSP3) mRNA gc
aggagagucccgcagucggcguccagcggcucugcuuguucgugugugugucguugcaggccuuauucaagcuuaccauggcccccaccaaggugaccuucggcgacgacacggucaucgaggugcagggguacaagagcgugaacaucaccuucgagcuggacgagcgcaucgacaagguccucaacgagaagugcuccgccuacaccguggagcugggcaccgaggugaacgaguucgcgugcgucguggccgacgccgugaucaagacgcugcagccggucagcgagcuccugaccccccuggggaucgaccucgacgagugguccauggccaccuacuaccuguucgacgagagcggcgaguucaagcuggccucccacauguacugcagcuucuacccccccgacgaggacgaggaggagggggacugcgaggaggaggaguucgagccguccacccaguacgaguacggcacggaggacgacuaccagggcaagccccucgaguucggggcgaccagcgccgcccugcagcccgaggaggagcaggaggaggacuggcuggacgacgacucccagcagaccgugggccagcaggacgggagcgaggacaaccagaccacgaccauccagaccaucguggagguccagccccagcucgagauggagcugaccccgguggugcagacgaucgaggucaacuccuucagcggcuaccugaagcucaccgacaacguguacaucaagaacgccgacaucguggaggaggcgaagaaggucaagcccaccgugguggucaacgccgccaacguguaccugaagcacgggggcggcguggccggggcccugaacaaggcgaccaacaacgccaugcaggucgaguccgacgacuacaucgccacgaacggcccccucaagguggggggcagcugcguccuguccggccacaaccuggccaagcacugccuccacgugguggggcccaacgucaacaagggcgaggacauccagcugcugaagagcgccuacgagaacuucaaccagcacgaggugcuccuggcgccgcugcucuccgccgggaucuucggcgccgaccccauccacagccugcgggugugcgucgacaccgugcgcaccaacguguaccuggccgucuucgacaagaaccucuacgacaagcugguguccagcuuccuggagaugaagagcgagaagcagguggagcagaagaucgccgagauccccaaggaggaggucaagcccuucaucaccgaguccaagccgagcguggagcagcggaagcaggacgacaagaagaucaaggcgugcguggaggaggucacgaccacccucgaggagaccaaguuccugacggagaaccugcuccuguacaucgacaucaacgggaaccugcaccccgacuccgccacccucgugagcgacaucgacaucaccuuccugaagaaggacgcccccuacaucgugggcgacgucgugcaggagggcgugcugaccgccgucgugauccccacgaagaaggccgggggcaccaccgagaugcucgcgaaggcccugcgcaaggugccgaccgacaacuacaucacgaccuaccccgggcagggccugaacggguacaccgucgaggaggccaagaccgugcucaagaagugcaaguccgccuucuacauccugcccagcaucaucuccaacgagaagcaggagauccugggcaccgugagcuggaaccuccgggagaugcuggcgcacgccgaggagacgcgcaagcugaugcccgucugcguggagaccaaggccaucguguccaccauccagcggaaguacaagggcaucaagauccaggagggggucguggacuacggcgcccgcuucuacuucuacaccagcaagacgaccguggccucccugaucaacacccucaacgaccugaacgagacccuggucacgaugccgcucggguacgugacccacggccugaaccuggaggaggcggcccgguacaugcgcagccucaaggugcccgccaccgucuccgugagcucccccgacgccgugaccgccuacaacggguaccugacgagcuccagcaagacccccgaggagcacuucaucgagaccaucucccuggcgggcagcuacaaggacuggagcuacuccggccagagcacccagcucgggaucgaguuccugaagcggggcgacaaguccgucuacuacacgagcaacccgaccaccuuccaccuggacggggaggugaucaccuucgacaaccucaagacgcugcugucccuccgcgaggugcggaccaucaaggucuucaccaccguggacaacaucaaccugcacacgcagguggucgacaugagcaugaccuacggccagcaguucggccccaccuaccuggacggggccgacgugaccaagaucaagccccacaacucccacgagggcaagacguucuacgugcucccgaacgacgacacccugcgcgucgaggccuucgaguacuaccacaccaccgaccccagcuuccuggggcgguacauguccgcccucaaccacacgaagaaguggaaguacccccaggugaacggccugaccagcaucaagugggccgacaacaacugcuaccuggcgaccgcccuccugacccugcagcagaucgagcucaaguucaaccccccggcccugcaggacgccuacuaccgcgcgcgggccggggaggccgccaacuucugcgcccugauccucgcguacugcaacaagacggugggcgagcugggcgacguccgcgagaccauguccuaccuguuccagcacgccaaccucgacagcugcaagcgggugcugaacgucgugugcaagaccugcgggcagcagcagaccacccugaagggcguggaggccgucauguacauggggacgcucuccuacgagcaguucaagaagggcgugcagauccccugcaccugcgggaagcaggccaccaaguaccuggugcagcaggagagccccuucgucaugauguccgcccccccggcgcaguacgagcugaagcacggcaccuucacgugcgccagcgaguacaccggcaacuaccagugcgggcacuacaagcacaucaccuccaaggagacccucuacugcaucgacggcgcccugcugacgaagagcagcgaguacaaggggcccaucaccgacguguucuacaaggagaacuccuacaccaccacgaucaagcccgugaccuacaagcucgacggcgucgugugcaccgagaucgaccccaagcuggacaacuacuacaagaaggacaacagcuacuucaccgagcagccgaucgaccuggugcccaaccagcccuaccccaacgccuccuucgacaacuucaaguucgucugcgacaacaucaaguucgccgacgaccucaaccagcugacgggguacaagaagccggcgagccgcgagcugaaggugaccuucuuccccgaccucaacggcgacguggucgccaucgacuacaagcacuacacccccuccuucaagaagggcgccaagcugcugcacaagcccaucguguggcacgugaacaacgccaccaacaaggcgacguacaagccgaacaccuggugcauccggugccucuggagcaccaagcccgucgagaccuccaacagcuucgacgugcugaaguccgaggacgcccaggggauggacaaccuggccugcgaggaccucaagcccgugagcgaggaggucguggagaaccccacgauccagaaggacgugcuggagugcaacgucaagaccaccgagguggugggcgacaucauccugaagccggccaacaacucccucaagaucaccgaggaggucgggcacacggaccugauggccgcguacguggacaacagcucccugaccaucaagaagcccaacgagcucagccgcgugcugggccugaagacccucgccacccacgggcuggccgccgucaacuccgugcccugggacacgaucgccaacuacgcgaagccguuccugaacaagguggucagcaccaccaccaacaucgugacgcgcugccucaaccgggugugcaccaacuacaugcccuacuucuucacccugcugcuccagcugugcaccuucacccgcuccacgaacagccggaucaaggccuccaugcccaccaccaucgccaagaacaccgucaagagcgugggcaaguucugccuggaggccagcuucaacuaccucaagucccccaacuucagcaagcugaucaacaucaucaucugguuccugcuccuguccgugugccugggcagccucaucuacuccacggccgcgcuggggguccugaugagcaaccucggcaugccguccuacugcaccggguaccgcgagggcuaccugaacagcaccaacgugaccaucgccacguacugcaccggcuccauccccugcagcgugugccuguccgggcucgacagccuggacaccuaccccucccuggagaccauccagaucacgaucagcuccuucaagugggaccucaccgccuucggccuggucgccgagugguuccuggccuacauccucuucacccgguucuucuacgugcuggggcuggcggccaucaugcagcucuucuucagcuacuucgccgugcacuucaucuccaacagcuggcugauguggcugaucaucaaccugguccagauggcccccaucuccgcgauggugcgcauguacaucuucuucgccagcuucuacuacguguggaagagcuacguccacgugguggacggcugcaacuccagcaccugcaugaugugcuacaagcggaaccgcgccacgcgggucgagugcaccaccaucgugaacgggguccgccgguccuucuacguguacgccaacggcggcaagggguucugcaagcuccacaacuggaacugcgugaacugcgacaccuucugcgccggcagcacguucaucuccgacgaggucgcgcgcgaccugagccugcaguucaagcggccgaucaaccccaccgaccaguccagcuacaucguggacuccgugaccgucaagaacgggagcauccaccucuacuucgacaaggccggccagaagaccuacgagcgccacucccugagccacuucgugaaccuggacaaccuccgggccaacaacaucaaggggucccugcccaucaacgugaucgucuucgacggcaagagcaagugcgaggaguccagcgccaaguccgccagcguguacuacucccagcugaugugccagcccauccuccugcuggaccaggcgcucgugagcgacgucggcgacagcgccgagguggccgugaagauguucgacgccuacgucaacacguucuccagcaccuucaacgugccgauggagaagcugaagacccugguggccaccgcggaggccgagcucgccaagaacgucucccuggacaacgugcugagcacguucaucuccgccgcgcgccagggguucguggacagcgacgucgagaccaaggacgugguggagugccucaagcugucccaccagagcgacaucgaggucaccggcgacuccugcaacaacuacaugcugaccuacaacaagguggagaacaugacgccccgggaccucggggccugcaucgacugcagcgcccgccacaucaacgcccagguggccaagucccacaacaucgcgcugaucuggaacgucaaggacuucaugagccuguccgagcagcuccggaagcagauccgcagcgccgccaagaagaacaaccugcccuucaagcugaccugcgccaccacccgccagguggugaacgucgugacgaccaagaucgcccucaagggcgggugaggacuagucccuguucccagagcccacuuuuuuuucuuuuuuugaaauaaaauagccugucuuucagaucucaaaggcucuuuucagagccaccaaaaaaaaaaaaaaaaaaaaaaaaaaaaaaaaaaaaaaaaaaaaaaaaaaaaaaaaaaaaaaaaaaaaaaaaaaaaaaaaaaaaaaaaaaaaaaaaaaaaa

SEQ ID NO: 19644 - RNA, 6113 nt, Artificial Sequence
  SARS-CoV-2__MT831168.1__non-structural protein 3 (NSP3) mRNA gc
aggagagucccgcagucggcguccagcggcucugcuuguucgugugugugucguugcaggccuuauucaagcuuaccauggcccccaccaaggugaccuucggcgacgacacggucaucgaggugcagggguacaagagcgugaacaucaccuucgagcuggacgagcgcaucgacaagguccucaacgagaagugcuccgccuacaccguggagcugggcaccgaggugaacgaguucgcgugcgucguggccgacgccgugaucaagacgcugcagccggucagcgagcuccugaccccccuggggaucgaccucgacgagugguccauggccaccuacuaccuguucgacgagagcggcgaguucaagcuggccucccacauguacugcagcuucuacccccccgacgaggacgaggaggagggggacugcgaggaggaggaguucgagccguccacccaguacgaguacggcacggaggacgacuaccagggcaagccccucgaguucggggcgaccagcgccgcccugcagcccgaggaggagcaggaggaggacuggcuggacgacgacucccagcagaccgugggccagcaggacgggagcgaggacaaccagaccacgaccauccagaccaucguggagguccagccccagcucgagauggagcugaccccgguggugcagacgaucgaggucaacuccuucagcggcuaccugaagcucaccgacaacguguacaucaagaacgccgacaucguggaggaggcgaagaaggucaagcccaccgugguggucaacgccgccaacguguaccugaagcacgggggcggcguggccggggcccugaacaaggcgaccaacaacgccaugcaggucgaguccgacgacuacaucgccacgaacggcccccucaagguggggggcagcugcguccuguccggccacaaccuggccaagcacugccuccacgugguggggcccaacgucaacaagggcgaggacauccagcugcugaagagcgccuacgagaacuucaaccagcacgaggugcuccuggcgccgcugcucuccgccgggaucuucggcgccgaccccauccacagccugcgggugugcgucgacaucgugcgcaccaacguguaccuggccgucuucgacaagaaccucuacgacaagcugguguccagcuuccuggagaugaagagcgagaagcagguggagcagaagaucgccgagauccccaaggaggaggucaagcccuucaucaccgaguccaagccgagcguggagcagcggaagcaggacgacaagaagaucaaggcgugcguggaggaggucaccacgacccucgaggagaccaaguuccugaccgagaaccugcuccuguacaucgacaucaacgggaaccugcaccccgacuccgccacgcucgugagcgacaucgacaucaccuuccugaagaaggacgcccccuacaucgugggcgacgucgugcaggagggcgugcugaccgccgucgugauccccaccaagaaggccgggggcacgaccgagaugcucgcgaaggcccugcgcaaggugccgaccgacaacuacaucaccacguaccccgggcagggccugaacggguacaccgucgaggaggccaagaccgugcucaagaagugcaaguccgccuucuacauccugcccagcaucaucuccaacgagaagcaggagauccugggcaccgugagcuggaaccuccgggagaugcuggcgcacgccgaggagacccgcaagcugaugcccgucugcguggagacgaaggccaucguguccaccauccagcggaaguacaagggcaucaagauccaggagggggucguggacuacggcgcccgcuucuacuucuacaccagcaagaccacgguggccucccugaucaacacccucaacgaccugaacgagacccuggucaccaugccgcucggguacgugacgcacggccugaaccuggaggaggcggcccgguacaugcgcagccucaaggugcccgccaccgucuccgugagcucccccgacgccgugaccgccuacaacggguaccugaccagcuccagcaagacgcccgaggagcacuucaucgagaccaucucccuggcgggcagcuacaaggacuggagcuacuccggccagagcacccagcucgggaucgaguuccugaagcggggcgacaaguccgucuacuacaccagcaacccgacgaccuuccaccuggacggggaggugaucaccuucgacaaccucaagacccugcugucccuccgcgaggugcggacgaucaaggucuucaccaccguggacaacaucaaccugcacacccagguggucgacaugagcaugacguacggccagcaguucggccccaccuaccuggacggggccgacgugaccaagaucaagccccacaacucccacgagggcaagaccuucuacgugcucccgaacgacgacacgcugcgcgucgaggccuucgaguacuaccacaccaccgaccccagcuuccuggggcgguacauguccgcccucaaccacaccaagaaguggaaguacccccaggugaacggccugacgagcaucaagugggccgacaacaacugcuaccuggcgaccgcccuccugacccugcagcagaucgagcucaaguucaaccccccggcccugcaggacgccuacuaccgcgcgcgggccggggaggccgccaacuucugcgcccugauccucgcguacugcaacaagaccgugggcgagcugggcgacguccgcgagacgauguccuaccuguuccagcacgccaaccucgacagcugcaagcgggugcugaacgucgugugcaagaccugcgggcagcagcagaccacccugaagggcguggaggccgucauguacauggggacccucuccuacgagcaguucaagaagggcgugcagauccccugcacgugcgggaagcaggccaccaaguaccuggugcagcaggagagccccuucgucaugauguccgcccccccggcgcaguacgagcugaagcacggcaccuucaccugcgccagcgaguacacgggcaacuaccagugcgggcacuacaagcacaucaccuccaaggagacccucuacugcaucgacggcgcccugcugaccaagagcagcgaguacaaggggcccaucacggacguguucuacaaggagaacuccuacaccaccaccaucaagcccgugacguacaagcucgacggcgucgugugcaccgagaucgaccccaagcuggacaacuacuacaagaaggacaacagcuacuucaccgagcagccgaucgaccuggugcccaaccagcccuaccccaacgccuccuucgacaacuucaaguucgucugcgacaacaucaaguucgccgacgaccucaaccagcugaccggguacaagaagccggcgagccgcgagcugaaggugacguucuuccccgaccucaacggcgacguggucgccaucgacuacaagcacuacacccccuccuucaagaagggcgccaagcugcugcacaagcccaucguguggcacgugaacaacgccaccaacaaggcgaccuacaagccgaacacguggugcauccggugccucuggagcaccaagcccgucgagaccuccaacagcuucgacgugcugaaguccgaggacgcccaggggauggacaaccuggccugcgaggaccucaagcccgugagcgaggaggucguggagaaccccaccauccagaaggacgugcuggagugcaacgucaagacgaccgagguggugggcgacaucauccugaagccggccaacaacucccucaagaucaccgaggaggucgggcacaccgaccugauggccgcguacguggacaacagcucccugacgaucaagaagcccaacgagcucagccgcgugcugggccugaagacccucgccacccacgggcuggccgccgucaacuccgugcccugggacaccaucgccaacuacgcgaagccguuccugaacaagguggucagcacgaccaccaacaucgugacccgcugccucaaccgggugugcacgaacuacaugcccuacuucuucacccugcugcuccagcugugcaccuucacccgcuccaccaacagccggaucaaggccuccaugcccacgaccaucgccaagaacaccgucaagagcgugggcaaguucugccuggaggccagcuucaacuaccucaagucccccaacuucagcaagcugaucaacaucaucaucugguuccugcuccuguccgugugccugggcagccucaucuacuccaccgccgcgcuggggguccugaugagcaaccucggcaugccguccuacugcacgggguaccgcgagggcuaccugaacagcaccaacgugaccaucgccaccuacugcacgggcuccauccccugcagcgugugccuguccgggcucgacagccuggacaccuaccccucccuggagaccauccagaucaccaucagcuccuucaagugggaccucacggccuucggccuggucgccgagugguuccuggccuacauccucuucacccgguucuucuacgugcuggggcuggcggccaucaugcagcucuucuucagcuacuucgccgugcacuucaucuccaacagcuggcugauguggcugaucaucaaccugguccagauggcccccaucuccgcgauggugcgcauguacaucuucuucgccagcuucuacuacguguggaagagcuacguccacgugguggacggcugcaacuccagcaccugcaugaugugcuacaagcggaaccgcgccacccgggucgagugcacgaccaucgugaacgggguccgccgguccuucuacguguacgccaacggcggcaagggguucugcaagcuccacaacuggaacugcgugaacugcgacaccuucugcgccggcagcaccuucaucuccgacgaggucgcgcgcgaccugagccugcaguucaagcggccgaucaaccccacggaccaguccagcuacaucguggacuccgugaccgucaagaacgggagcauccaccucuacuucgacaaggccggccagaagaccuacgagcgccacucccugagccacuucgugaaccuggacaaccuccgggccaacaacaccaaggggucccugcccaucaacgugaucgucuucgacggcaagagcaagugcgaggaguccagcgccaaguccgccagcguguacuacucccagcugaugugccagcccauccuccugcuggaccaggcgcucgugagcgacgucggcgacagcgccgagguggccgugaagauguucgacgccuacgucaacacguucuccagcaccuucaacgugccgauggagaagcugaagacccugguggccaccgcggaggccgagcucgccaagaacgucucccuggacaacgugcugagcacguucaucuccgccgcgcgccagggguucguggacagcgacgucgagaccaaggacgugguggagugccucaagcugucccaccagagcgacaucgaggucaccggcgacuccugcaacaacuacaugcugaccuacaacaagguggagaacaugacgccccgggaccucggggccugcaucgacugcagcgcccgccacaucaacgcccagguggccaagucccacaacaucgcgcugaucuggaacgucaaggacuucaugagccuguccgagcagcuccggaagcagauccgcagcgccgccaagaagaacaaccugcccuucaagcugaccugcgccaccacccgccagguggugaacgucgugacgaccaagaucgcccucaagggcgggugaggacuagucccuguucccagagcccacuuuuuuuucuuuuuuugaaauaaaauagccugucuuucagaucucaaaggcucuuuucagagccaccaaaaaaaaaaaaaaaaaaaaaaaaaaaaaaaaaaaaaaaaaaaaaaaaaaaaaaaaaaaaaaaaaaaaaaaaaaaaaaaaaaaaaaaaaaaaaaaaaaaaa

SEQ ID NO: 19645 - RNA, 6113 nt, Artificial Sequence
  SARS-CoV-2__MT831173.1__non-structural protein 3 (NSP3) mRNA gc
aggagagucccgcagucggcguccagcggcucugcuuguucgugugugugucguugcaggccuuauucaagcuuaccauggcccccaccaaggugaccuucggcgacgacacggucaucgaggugcagggguacaagagcgugaacaucaccuucgagcuggacgagcgcaucgacaagguccucaacgagaagugcuccgccuacaccguggagcugggcaccgaggugaacgaguucgcgugcgucguggccgacgccgugaucaagacgcugcagccggucagcgagcuccugaccccccuggggaucgaccucgacgagugguccauggccaccuacuaccuguucgacgagagcggcgaguucaagcuggccucccacauguacugcagcuucuacccccccgacgaggacgaggaggagggggacugcgaggaggaggaguucgagccguccacccaguacgaguacggcacggaggacgacuaccagggcaagccccucgaguucggggcgaccagcgccgcccugcagcccgaggaggagcaggaggaggacuggcuggacgacgacucccagcagaccgugggccagcaggacgggagcgaggacaaccagaccacgaccauccagaccaucguggagguccagccccagcucgagauggagcugaccccgguggugcagacgaucgaggucaacuccuucagcggcuaccugaagcucaccgacaacguguacaucaagaacgccgacaucguggaggaggcgaagaaggucaagcccaccgugguggucaacgccgccaacguguaccugaagcacgggggcggcguggccggggcccugaacaaggcgaccaacaacgccaugcaggucgaguccgacgacuacaucgccacgaacggcccccucaagguggggggcagcugcguccuguccggccacaaccuggccaagcacugccuccacgugguggggcccaacgucaacaagggcgaggacauccagcugcugaagagcgccuacgagaacuucaaccagcacgaggugcuccuggcgccgcugcucuccgccgggaucuucggcgccgaccccauccacagccugcgggugugcgucgacaccgugcgcaccaacguguaccuggccgucuucgacaagaaccucuacgacaagcugguguccagcuuccuggagaugaagagcgagaagcagguggagcagaagaucgccgagauccccaaggaggaggucaagcccuucaucaccgaguccaagccgagcguggagcagcggaagcaggacgacaagaagaucaaggcgugcguggaggaggucacgaccacccucgaggagaccaaguuccugacggagaaccugcuccuguacaucgacaucaacgggaaccugcaccccgacuccgccacccucgugagcgacaucgacaucaccuuccugaagaaggacgcccccuacaucgugggcgacgucgugcaggagggcgugcugaccgccgucgugauccccacgaagaaggccgggggcaccaccgagaugcucgcgaaggcccugcgcaaggugccgaccgacaacuacaucacgaccuaccccgggcagggccugaacggguacaccgucgaggaggccaagaccgugcucaagaagugcaaguccgccuucuacauccugcccagcaucaucuccaacgagaagcaggagauccugggcaccgugagcuggaaccuccgggagaugcuggcgcacgccgaggagacgcgcaagcugaugcccgucugcguggagaccaaggccaucguguccaccauccagcggaaguacaagggcaucaagauccaggagggggucguggacuacggcgcccgcuucuacuucuacaccagcaagacgaccguggccucccugaucaacacccucaacgaccugaacgagacccuggucacgaugccgcucggguacgugacccacggccugaaccuggaggaggcggcccgguacaugcgcagccucaaggugcccgccaccgucuccgugagcucccccgacgccgugaccgccuacaacggguaccugacgagcuccagcaagacccccgaggagcacuucaucgagaccaucucccuggcgggcagcuacaaggacuggagcuacuccggccagagcacccagcucgggaucgaguuccugaagcggggcgacaaguccgucuacuacacgagcaacccgaccaccuuccaccuggacggggaggugaucaccuucgacaaccucaagacgcugcugucccuccgcgaggugcggaccaucaaggucuucaccaccguggacaacaucaaccugcacacgcagguggucgacaugagcaugaccuacggccagcaguucggccccaccuaccuggacggggccgacgugaccaagaucaagccccacaacucccacgagggcaagacguucuacgugcucccgaacgacgacacccugcgcgucgaggccuucgaguacuaccacaccaccgaccccagcuuccuggggcgguacauguccgcccucaaccacacgaagaaguggaaguacccccaggugaacggccugaccagcaucaagugggccgacaacaacugcuaccuggcgaccgcccuccugacccugcagcagaucgagcucaaguucaaccccccggcccugcaggacgccuacuaccgcgcgcgggccggggaggccgccaacuucugcgcccugauccucgcguacugcaacaagacggugggcgagcugggcgacguccgcgagaccauguccuaccuguuccagcacgccaaccucgacagcugcaagcgggugcugaacgucgugugcaagaccugcgggcagcagcagaccacccugaagggcguggaggccgucauguacauggggacgcucuccuacgagcaguucaagaagggcgugcagauccccugcaccugcgggaagcaggccaccaaguaccuggugcagcaggagagccccuucgucaugauguccgcccccccggcgcaguacgagcugaagcacggcaccuucacgugcgccagcgaguacaccggcaacuaccagugcgggcacuacaagcacaucaccuccaaggagacccucuacugcaucgacggcgcccugcugacgaagagcagcgaguacaaggggcccaucaccgacguguucuacaaggagaacuccuacaccaccacgaucaagcccgugaccuacaagcucgacggcgucgugugcaccgagaucgaccccaagcuggacaacuacuacaagaaggacaacagcuacuucaccgagcagccgaucgaccuggugcccaaccagcccuaccccaacgccuccuucgacaacuucaaguucgucugcgacaacaucaaguucgccgacgaccucaaccagcugacgggguacaagaagccggcgagccgcgagcugaaggugaccuucuuccccgaccucaacggcgacguggucgccaucgacuacaagcacuacacccccuccuucaagaagggcgccaagcugcugcacaagcccaucguguggcacgugaacaacgccaccaacaaggcgacguacaagccgaacaccuggugcauccggugccucuggagcaccaagcccgucgagaccuccaacagcuucgacgugcugaaguccgaggacgcccaggggauggacaaccuggccugcgaggaccucaagcccgugagcgaggaggucguggagaaccccacgauccagaaggacgugcuggagugcaacgucaagaccaccgagguggugggcgacaucauccugaagccggccaacaacucccucaagaucaccgaggaggucgggcacacggaccugauggccgcguacguggacaacagcucccugaccaucaagaagcccaacgagcucagccgcgugcugggccugaagacccucgccacccacgggcuggccgccgucaacuccgugcccugggacacgaucgccaacuacgcgaagccguuccugaacaagguggucagcaccaccaccaacaucgugacgcgcugccucaaccgggugugcaccaacuacaugcccuacuucuucacccugcugcuccagcugugcaccuucacccgcuccacgaacagccggaucaaggccuccaugcccaccaccaucgccaagaacaccgucaagagcgugggcaaguucugccuggaggccagcuucaacuaccucaagucccccaacuucagcaagcugaucaacaucaucaucugguuccugcuccuguccgugugccugggcagccucaucuacuccacggccgcgcuggggguccugaugagcaaccucggcaugccguccuacugcaccggguaccgcgagggcuaccugaacagcaccaacgugaccaucgccacguacugcaccggcuccauccccugcagcgugugccuguccgggcucgacagccuggacaccuaccccucccuggagaccauccagaucacgaucagcuccuucaagugggaccucaccgccuucggccuggucgccgagugguuccuggccuacauccucuucacccgguucuucuacgugcuggggcuggcggccaucaugcagcucuucuucagcuacuucgccgugcacuucaucuccaacagcuggcugauguggcugaucaucaaccugguccagauggcccccaucuccgcgauggugcgcauguacaucuucuucgccagcuucuacuacguguggaagagcuacguccacgugguggacggcugcaacuccagcaccugcaugaugugcuacaagcggaaccgcgccacgcgggucgagugcaccaccaucgugaacgggguccgccgguccuucuacguguacgccaacggcggcaagggguucugcaagcuccacaacuggaacugcgugaacugcgacaccuucugcgccggcagcacguucaucuccgacgaggucgcgcgcgaccugagccugcaguucaagcggccgaucaaccccaccgaccaguccagcuacaucguggacuccgugaccgucaagaacgggagcauccaccucuacuucgacaaggccggccagaagaccuacgagcgccacucccugagccacuucgugaaccuggacaaccuccgggccaacaacacgaaggggucccugcccaucaacgugaucgucuucgacggcaagagcaagugcgaggaguccagcgccaaguccgccagcguguacuacucccagcugaugugccagcccauccuccugcuggaccaggcgcucgugagcgacgucggcgacagcgccgagguggccgugaagauguucgacgccuacgucaacaccuucuccagcaccuucaacgugccgauggagaagcugaagacccugguggccacggcggaggccgagcucgccaagaacgucucccuggacaacgugcugagcaccuucaucuccgccgcgcgccagggguucguggacagcgacgucgagaccaaggacgugguggagugccucaagcugucccaccagagcgacaucgaggucaccggcgacuccugcaacaacuacaugcugacguacaacaagguggagaacaugaccccccgggaccucggggugugcaucgacugcagcgcccgccacaucaacgcccaggucgccaagucccacaacaucgcccugaucuggaacgugaaggacuucaugagccuguccgagcagcuccggaagcagauccgcagcgcggccaagaagaacaaccugcccuucaagcugaccugcgccaccacgcgccagguggucaacguggugaccaccaagaucgcccucaagggcgggugaggacuagucccuguucccagagcccacuuuuuuuucuuuuuuugaaauaaaauagccugucuuucagaucucaaaggcucuuuucagagccaccaaaaaaaaaaaaaaaaaaaaaaaaaaaaaaaaaaaaaaaaaaaaaaaaaaaaaaaaaaaaaaaaaaaaaaaaaaaaaaaaaaaaaaaaaaaaaaaaaaaaa

SEQ ID NO: 19646 - RNA, 6113 nt, Artificial Sequence
  SARS-CoV-2__MT831177.1__non-structural protein 3 (NSP3) mRNA gc
aggagagucccgcagucggcguccagcggcucugcuuguucgugugugugucguugcaggccuuauucaagcuuaccauggcccccaccaaggugaccuucggcgacgacacggucaucgaggugcagggguacaagagcgugaacaucaccuucgagcuggacgagcgcaucgacaagguccucaacgagaagugcuccgccuacaccguggagcugggcaccgaggugaacgaguucgcgugcgucguggccgacgccgugaucaagacgcugcagccggucagcgagcuccugaccccccuggggaucgaccucgacgagugguccauggccaccuacuaccuguucgacgagagcggcgaguucaagcuggccucccacauguacugcagcuucuacccccccgacgaggacgaggaggagggggacugcgaggaggaggaguucgagccguccacccaguacgaguacggcacggaggacgacuaccagggcaagccccucgaguucggggcgaccagcgccgcccugcagcccgaggaggagcaggaggaggacuggcuggacgacgacucccagcagaccgugggccagcaggacgggagcgaggacaaccagaccacgaccauccagaccaucguggagguccagccccagcucgagauggagcugaccccgguggugcagacgaucgaggucaacuccuucagcggcuaccugaagcucaccgacaacguguacaucaagaacgccgacaucguggaggaggcgaagaaggucaagcccaccgugguggucaacgccgccaacguguaccugaagcacgggggcggcguggccggggcccugaacaaggcgaccaacaacgccaugcaggucgaguccgacgacuacaucgugacgaacggcccccucaaggucgggggcagcugcgugcuguccggccacaaccuggccaagcacugccuccacguggucgggcccaacgugaacaagggcgaggacauccagcugcugaagagcgccuacgagaacuucaaccagcacgaggugcuccuggccccgcugcucuccgcggggaucuucggcgccgaccccauccacagccugcgggucugcguggacaccgugcgcaccaacgucuaccuggccguguucgacaagaaccucuacgacaagcugguguccagcuuccuggagaugaagagcgagaagcaggucgagcagaagaucgccgagauccccaaggaggaggugaagcccuucaucaccgaguccaagccgagcguggagcagcggaagcaggacgacaagaagaucaaggccugcgucgaggaggugacgaccacccucgaggagaccaaguuccugacggagaaccugcuccuguacaucgacaucaacgggaaccugcaccccgacuccgcgacccucgugagcgacaucgacaucaccuuccugaagaaggacgcccccuacaucgucggcgacguggugcaggagggcguccugaccgccguggugauccccacgaagaaggccgggggcaccaccgagaugcucgccaaggcgcugcgcaaggucccgaccgacaacuacaucacgaccuaccccgggcagggccugaacggguacaccguggaggaggccaagaccgugcucaagaagugcaaguccgccuucuacauccugcccagcaucaucuccaacgagaagcaggagauccugggcaccgucagcuggaaccuccgggagaugcuggcccacgcggaggagacgcgcaagcugaugcccgugugcguggagaccaaggccaucgucuccaccauccagcggaaguacaagggcaucaagauccaggagggggugguggacuacggcgcccgcuucuacuucuacaccagcaagacgaccgucgccucccugaucaacacccucaacgaccugaacgagacccuggugacgaugccgcucggguacgugacccacggccugaaccuggaggaggccgcgcgguacaugcgcagccucaagguccccgccaccguguccgugagcucccccgacgccgucaccgccuacaacggguaccugacgagcuccagcaagacccccgaggagcacuucaucgagaccaucucccuggccggcagcuacaaggacuggagcuacuccggccagagcacccagcucgggaucgaguuccugaagcggggcgacaaguccguguacuacacgagcaacccgaccaccuuccaccuggacggggaggugaucaccuucgacaaccucaagacgcugcugucccuccgcgagguccggaccaucaagguguucaccaccguggacaacaucaaccugcacacgcaggucguggacaugagcaugaccuacggccagcaguucggccccaccuaccuggacggggcggacgugaccaagaucaagccccacaacucccacgagggcaagacguucuacguccucccgaacgacgacacccugcgcguggaggccuucgaguacuaccacaccaccgaccccagcuuccuggggcgguacauguccgcccucaaccacacgaagaaguggaaguacccccaggugaacggccugaccagcaucaagugggccgacaacaacugcuaccuggccaccgcgcuccugacccugcagcagaucgagcucaaguucaaccccccggcccugcaggacgccuacuaccgcgcccgggcgggggaggccgccaacuucugcgcccugauccucgccuacugcaacaagacggucggcgagcugggcgacgugcgcgagaccauguccuaccuguuccagcacgcgaaccucgacagcugcaagcggguccugaacguggugugcaagaccugcgggcagcugcagaccacccucaagggcgucgaggccgugauguacauggggacgcuguccuacgagcaguucaagaagggcgugcagauccccugcaccugcgggaagcaggccaccaaguaccugguccagcaggagagccccuucgugaugauguccgcccccccggcccaguacgagcucaagcacggcaccuucacgugcgcgagcgaguacaccggcaacuaccagugcgggcacuacaagcacaucaccuccaaggagacccuguacugcaucgacggcgcccugcucacgaagagcagcgaguacaaggggcccaucaccgacguguucuacaaggagaacuccuacaccaccacgaucaagcccgucaccuacaagcuggacggcguggugugcaccgagaucgaccccaagcuggacaacuacuacaagaaggacaacagcuacuucaccgagcagccgaucgaccucguccccaaccagcccuaccccaacgccuccuucgacaacuucaaguucgugugcgacaacaucaaguucgccgacgaccugaaccagcugacgggguacaagaagccggccagccgcgagcucaaggugaccuucuuccccgaccugaacggcgacgucguggcgaucgacuacaagcacuacacccccuccuucaagaagggcgccaagcugcuccacaagcccaucguguggcacgucaacaacgccaccaacaaggccacguacaagccgaacaccuggugcauccggugccuguggagcaccaagcccguggagaccuccaacagcuucgacgugcugaaguccgaggacgcgcaggggauggacaaccucgccugcgaggaccugaagcccgucagcgaggaggugguggagaaccccacgauccagaaggacguccuggagugcaacgugaagaccaccgagguggucggcgacaucauccucaagccggccaacaacucccugaagaucaccgaggagguggggcacacggaccugauggccgccuacguggacaacagcucccucaccaucaagaagcccaacgagcugagccgcguccugggccucaagacccuggcgacccacgggcuggccgccgugaacuccgugcccugggacacgaucgccaacuacgccaagccguuccucaacaaggucgugagcaccaccaccaacaucgugacgcgcugccugaaccgggucugcaccaacuacaugcccuacuucuucacccugcuccugcagcugugcaccuucacccgcuccacgaacagccggaucaaggcguccaugcccaccaccaucgccaagaacaccgugaagagcgugggcaaguucugccucgaggccagcuucaacuaccugaagucccccaacuucagcaagcugaucaacaucaucaucugguuccuccugcuguccgucugccucggcagccugaucuacuccacggccgcccugggggugcucaugagcaaccugggcaugccguccuacugcaccggguaccgcgagggcuaccugaacagcaccaacgugaccaucgcgacguacugcaccggcuccauccccugcagcgucugccucuccgggcuggacagccuggacaccuaccccucccucgagaccauccagaucacgaucagcuccuucaagugggaccugaccgccuucggccugguggccgagugguuccucgccuacauccuguucacccgguucuucuacgugcuggggcucgccgcgaucaugcagcuguucuucagcuacuucgccguccacuucaucuccaacagcuggcugauguggcugaucaucaaccucgugcagauggcccccaucuccgccauggugcgcauguacaucuucuucgcgagcuucuacuacgucuggaagagcuacgugcacguggucgacggcugcaacuccagcaccugcaugaugugcuacaagcggaaccgcgccacgcggguggagugcaccaccaucgucaacggggugcgccgguccuucuacguguacgccaacggcggcaagggguucugcaagcugcacaacuggaacugcgucaacugcgacaccuucugcgccggcagcacguucaucuccgacgagguggcccgcgaccugagccuccaguucaagcggccgaucaaccccaccgaccaguccagcuacaucguggacuccgucaccgugaagaacgggagcauccaccuguacuucgacaaggcgggccagaagaccuacgagcgccacucccugagccacuucgugaaccucgacaaccugcgggccaacaacacgaaggggucccugcccaucaacgucaucguguucgacggcaagagcaagugcgaggaguccagcgccaaguccgccagcguguacuacucccagcucaugugccagcccauccugcugcucgaccaggcccuggucagcgacgugggcgacagcgcggagguggccgucaagauguucgacgccuacgugaacaccuucuccagcaccuucaacgugccgauggagaagcugaagacccucgucgccacggccgaggcggagcuggccaagaacgugucccuggacaacgugcucagcaccuucaucuccgccgcccgccagggguucgucgacagcgacguggagaccaaggacguggucgagugccugaagcugucccaccagagcgacaucgaggugaccggcgacuccugcaacaacuacaugcucacguacaacaagguggagaacaugaccccccgggaccugggggcgugcaucgacugcagcgcccgccacaucaacgcccaggucgccaagucccacaacaucgcccugaucuggaacgugaaggacuucaugagccucuccgagcagcugcggaagcagauccgcagcgcggccaagaagaacaaccugcccuucaagcucaccugcgccaccacgcgccagguggucaacguggugaccaccaagaucgcccugaagggcgggugaggacuagucccuguucccagagcccacuuuuuuuucuuuuuuugaaauaaaauagccugucuuucagaucucaaaggcucuuuucagagccaccaaaaaaaaaaaaaaaaaaaaaaaaaaaaaaaaaaaaaaaaaaaaaaaaaaaaaaaaaaaaaaaaaaaaaaaaaaaaaaaaaaaaaaaaaaaaaaaaaaaaa

SEQ ID NO: 19647 - RNA, 6113 nt, Artificial Sequence
  SARS-CoV-2__MT831190.1__non-structural protein 3 (NSP3) mRNA gc
aggagagucccgcagucggcguccagcggcucugcuuguucgugugugugucguugcaggccuuauucaagcuuaccauggcccccaccaaggugaccuucggcgacgacacggucaucgaggugcagggguacaagagcgugaacaucaccuucgagcuggacgagcgcaucgacaagguccucaacgagaagugcuccgccuacaccguggagcugggcaccgaggugaacgaguucgcgugcgucguggccgacgccgugaucaagacgcugcagccggucagcgagcuccugaccccccuggggaucgaccucgacgagugguccauggccaccuacuaccuguucgacgagagcggcgaguucaagcuggccucccacauguacugcagcuucuacccccccgacgaggacgaggaggagggggacugcgaggaggaggaguucgagccguccacccaguacgaguacggcacggaggacgacuaccagggcaagccccucgaguucggggcgaccagcgccgcccugcagcccgaggaggagcaggaggaggacuggcuggacgacgacucccagcagaccgugggccagcaggacgggagcgaggacaaccagaccacgaccauccagaccaucguggagguccagccccagcucgagauggagcugaccccgguggugcagacgaucgaggucaacuccuucagcggcuaccugaagcucaccgacaacguguacaucaagaacgccgacaucguggaggaggcgaagaaggucaagcccaccgugguggucaacgccgccaacguguaccugaagcacgggggcggcguggccggggcccugaacaaggcgaccaacaacgccaugcaggucgaguccgacgacuacaucgccacgaacggcccccucaagguggggggcagcugcguccuguccggccacaaccuggccaagcacugccuccacgugguggggcccaacgucaacaagggcgaggacauccagcugcugaagagcgccuacgagaacuucaaccagcacgaggugcuccuggcgccgcugcucuccgccgggaucuucggcgccgaccccauccacagccugcgggugugcgucgacaccgugcgcaccaacguguaccuggccgucuucgacaagaaccucuacgacaagcugguguccagcuuccuggagaugaagagcgagaagcagguggagcagaagaucgccgagauccccaaggaggaggucaagcccuucaucaccgaguccaagccgagcguggagcagcggaagcaggacgacaagaagaucaaggcgugcguggaggaggucacgaccacccucgaggagaccaaguuccugacggagaaccugcuccuguacaucgacaucaacgggaaccugcaccccgacuccgccacccucgugagcgacaucgacaucaccuuccugaagaaggacgcccccuacaucgugggcgacgucgugcaggagggcgugcugaccgccgucgugauccccacgaagaaggccgggggcaccaccgagaugcucgcgaaggcccugcgcaaggugccgaccgacaacuacaucacgaccuaccccgggcagggccugaacggguacaccgucgaggaggccaagaccgugcucaagaagugcaaguccgccuucuacauccugcccagcaucaucuccaacgagaagcaggagauccugggcaccgugagcuggaaccuccgggagaugcuggcgcacgccgaggagacgcgcaagcugaugcccgucugcguggagaccaaggccaucguguccaccauccagcggaaguacaagggcaucaagauccaggagggggucguggacuacggcgcccgcuucuacuucuacaccagcaagacgaccguggccucccugaucaacacccucaacgaccugaacgagacccuggucacgaugccgcucggguacgugacccacggccugaaccuggaggaggcggcccgguacaugcgcagccucaaggugcccgccaccgucuccgugagcucccccgacgccgugaccgccuacaacggguaccugacgagcuccagcaagacccccgaggagcacuucaucgagaccaucucccuggcgggcagcuacaaggacuggagcuacuccggccagagcacccagcucgggaucgaguuccugaagcggggcgacaaguccgucuacuacacgagcaacccgaccaccuuccaccuggacggggaggugaucaccuucgacaaccucaagacgcugcugucccuccgcgaggugcggaccaucaaggucuucaccaccguggacaacaucaaccugcacacgcagguggucgacaugagcaugaccuacggccagcaguucggccccaccuaccuggacggggccgacgugaccaagaucaagccccacaacucccacgagggcaagacguucuacgugcucccgaacgacgacacccugcgcgucgaggccuucgaguacuaccacaccaccgaccccagcuuccuggggcgguacauguccgcccucaaccacacgaagaaguggaaguacccccaggugaacggccugaccagcaucaagugggccgacaacaacugcuaccuggcgaccgcccuccugacccugcagcagaucgagcucaaguucaaccccccggcccugcaggacgccuacuaccgcgcgcgggccggggaggccgccaacuucugcgcccugauccucgcguacugcaacaagacggugggcgagcugggcgacguccgcgagaccauguccuaccuguuccagcacgccaaccucgacagcugcaagcgggugcugaacgucgugugcaagaccugcgggcagcagcagaccacccugaagggcguggaggccgucauguacauggggacgcucuccuacgagcaguucaagaagggcgugcagauccccugcaccugcgggaagcaggccaccaaguaccuggugcagcaggagagccccuucgucaugauguccgcccccccggcgcaguacgagcugaagcacggcaccuucacgugcgccagcgaguacaccggcaacuaccagugcgggcacuacaagcacaucaccuccaaggagacccucuacugcaucgacggcgcccugcugacgaagagcagcgaguacaaggggcccaucaccgacguguucuacaaggagaacuccuacaccaccacgaucaagcccgugaccuacaagcucgacggcgucgugugcaccgagaucgaccccaagcuggacaacuacuacaagaaggacaacagcuacuucaccgagcagccgaucgaccuggugcccaaccagcccuaccccaacgccuccuucgacaacuucaaguucgucugcgacaacaucaaguucgccgacgaccucaaccagcugacgggguacaagaagccggcgagccgcgagcugaaggugaccuucuuccccgaccucaacggcgacguggucgccaucgacuacaagcacuacacccccuccuucaagaagggcgccaagcugcugcacaagcccaucguguggcacgugaacaacgccaccaacaaggcgacguacaagccgaacaccuggugcauccggugccucuggagcaccaagcccgucgagacccccaacuccuucgacgugcugaagagcgaggacgcccaggggauggacaaccuggccugcgaggaccucaagcccguguccgaggaggucguggagaacccgacgauccagaaggacgugcuggagugcaacgucaagaccaccgagguggugggcgacaucauccugaagcccgccaacaacagccucaagaucaccgaggaggucgggcacacggaccugauggccgcguacguggacaacuccagccugaccaucaagaagcccaacgagcucucccgcgugcugggccugaagacccucgccacccacgggcuggccgccgucaacagcgugccgugggacacgaucgccaacuacgcgaagcccuuccugaacaagguggucuccaccaccaccaacaucgugacgcgcugccucaaccgggugugcaccaacuacaugcccuacuucuucacccugcugcuccagcugugcaccuucacccgcagcacgaacucccggaucaaggccagcaugcccaccaccaucgccaagaacaccgucaaguccgugggcaaguucugccuggaggccagcuucaacuaccucaagagcccgaacuucuccaagcugaucaacaucaucaucugguuccugcuccugagcgugugccugggcucccucaucuacagcacggccgcgcuggggguccugauguccaaccucggcaugcccagcuacugcaccggguaccgcgagggcuaccugaacuccaccaacgugaccaucgccacguacugcaccggcagcauccccugcuccgugugccugagcgggcucgacucccuggacaccuaccccagccuggagaccauccagaucacgaucuccagcuucaagugggaccucaccgccuucggccuggucgccgagugguuccuggccuacauccucuucacccgguucuucuacgugcuggggcuggcggccaucaugcagcucuucuucuccuacuucgccgugcacuucaucagcaacuccuggcugauguggcugaucaucaaccugguccagauggccccgaucagcgcgauggugcgcauguacaucuucuucgccuccuucuacuacguguggaagagcuacguccacgugguggacggcugcaacagcuccaccugcaugaugugcuacaagcggaaccgcgccacgcgggucgagugcaccaccaucgugaacgggguccgccggagcuucuacguguacgccaacggcggcaagggguucugcaagcuccacaacuggaacugcgugaacugcgacaccuucugcgccggcuccacguucaucagcgacgaggucgcgcgcgaccugucccugcaguucaagcggcccaucaaccccaccgaccagagcuccuacaucguggacagcgugaccgucaagaacggguccauccaccucuacuucgacaaggccggccagaagaccuacgagcgccacagccugucccacuucgugaaccuggacaaccuccgggccaacaacacgaaggggagccugcccaucaacgugaucgucuucgacggcaaguccaagugcgaggagagcuccgccaagagcgccuccguguacuacagccagcugaugugccagccgauccuccugcuggaccaggcgcucguguccgacgucggcgacagcgccgagguggccgugaagauguucgacgccuacgucaacaccuucagcuccaccuucaacgugcccauggagaagcugaagacccugguggccacggcggaggccgagcucgccaagaacgucagccuggacaacgugcuguccaccuucaucagcgccgcgcgccagggguucguggacuccgacgucgagaccaaggacgugguggagugccucaagcugagccaccaguccgacaucgaggucaccggcgacagcugcaacaacuacaugcugacguacaacaagguggagaacaugaccccccgggaccucggggccugcaucgacugcuccgcccgccacaucaacgcccagguggccaagagccacaacaucgcgcugaucuggaacgucaaggacuucaugucccugagcgagcagcuccggaagcagauccgcuccgccgccaagaagaacaaccugcccuucaagcugaccugcgccaccacgcgccagguggugaacgucgugaccaccaagaucgcccucaagggcgggugaggacuagucccuguucccagagcccacuuuuuuuucuuuuuuugaaauaaaauagccugucuuucagaucucaaaggcucuuuucagagccaccaaaaaaaaaaaaaaaaaaaaaaaaaaaaaaaaaaaaaaaaaaaaaaaaaaaaaaaaaaaaaaaaaaaaaaaaaaaaaaaaaaaaaaaaaaaaaaaaaaaaa

SEQ ID NO: 19648 - RNA, 6113 nt, Artificial Sequence
  SARS-CoV-2__MT831198.1__non-structural protein 3 (NSP3) mRNA gc
aggagagucccgcagucggcguccagcggcucugcuuguucgugugugugucguugcaggccuuauucaagcuuaccauggcccccaccaaggugaccuucggcgacgacacggucaucgaggugcagggguacaagagcgugaacaucaccuucgagcuggacgagcgcaucgacaagguccucaacgagaagugcuccgccuacaccguggagcugggcaccgaggugaacgaguucgcgugcgucguggccgacgccgugaucaagacgcugcagccggucagcgagcuccugaccccccuggggaucgaccucgacgagugguccauggccaccuacuaccuguucgacgagagcggcgaguucaagcuggccucccacauguacugcagcuucuacccccccgacgaggacgaggaggagggggacugcgaggaggaggaguucgagccguccacccaguacgaguacggcacggaggacgacuaccagggcaagccccucgaguucggggcgaccagcgccgcccugcagcccgaggaggagcaggaggaggacuggcuggacgacgacucccagcagaccguggugcagcaggacggcagcgaggacaaccagaccacgaccauccagaccaucgucgaggugcagccccagcucgagauggagcugaccccggugguccagacgaucgaggugaacuccuucagcggguaccugaagcucaccgacaacguguacaucaagaacgccgacaucgucgaggaggcgaagaaggugaagcccaccguggucgugaacgccgccaacguguaccugaagcacggcgggggcgucgccggcgcccugaacaaggcgaccaacaacgccaugcagguggaguccgacgacuacaucgccacgaacgggccccucaaggucggcgggagcugcgugcuguccggccacaaccuggccaagcacugccuccacguggucggccccaacgugaacaagggggaggacauccagcugcugaagagcgccuacgagaacuucaaccagcacgaggugcuccuggcgccgcugcucuccgccggcaucuucggggccgaccccauccacagccugcgggucugcguggacaccgugcgcaccaacgucuaccuggccguguucgacaagaaccucuacgacaagcugguguccagcuuccuggagaugaagagcgagaagcaggucgagcagaagaucgccgagauccccaaggaggaggugaagcccuucaucaccgaguccaagccgagcguggagcagcggaagcaggacgacaagaagaucaaggcgugcgucgaggaggugacgaccacccucgaggagaccaaguuccugacggagaaccugcuccuguacaucgacaucaacggcaaccugcaccccgacuccgccacccucgugagcgacaucgacaucaccuuccugaagaaggacgcccccuacaucgucggggacguggugcaggagggcguccugaccgccguggugauccccacgaagaaggccggcgggaccaccgagaugcucgcgaaggcccugcgcaaggucccgaccgacaacuacaucacgaccuaccccggccaggggcugaacggcuacaccguggaggaggccaagaccgugcucaagaagugcaaguccgccuucuacauccugcccagcaucaucuccaacgagaagcaggagauccuggggaccgucagcuggaaccuccgggagaugcuggcgcacgccgaggagacgcgcaagcugaugcccgugugcguggagaccaaggccaucgucuccaccauccagcggaaguacaagggcaucaagauccaggagggcgugguggacuacggggcccgcuucuacuucuacaccagcaagacgaccgucgccucccugaucaacacccucaacgaccugaacgagacccuggugacgaugccgcucggcuacgugacccacgggcugaaccuggaggaggcggcccgguacaugcgcagccucaagguccccgccaccguguccgugagcucccccgacgccgucaccgccuacaacggcuaccugacgagcuccagcaagacccccgaggagcacuucaucgagaccaucucccuggcggggagcuacaaggacuggagcuacuccggccagagcacccagcucggcaucgaguuccugaagcggggggacaaguccguguacuacacgagcaacccgaccaccuuccaccuggacggcgaggugaucaccuucgacaaccucaagacgcugcugucccuccgcgagguccggaccaucaagguguucaccaccguggacaacaucaaccugcacacgcaggucguggacaugagcaugaccuacgggcagcaguucggccccaccuaccuggacggcgccgacgugaccaagaucaagccccacaacucccacgaggggaagacguucuacguccucccgaacgacgacacccugcgcguggaggccuucgaguacuaccacaccaccgaccccagcuuccugggccgguacauguccgcccucaaccacacgaagaaguggaaguacccccaggugaacgggcugaccagcaucaagugggccgacaacaacugcuaccuggcgaccgcccuccugacccugcagcagaucgagcucaaguucaaccccccggcccugcaggacgccuacuaccgcgcgcgggccggcgaggccgccaacuucugcgcccugauccucgcguacugcaacaagacggucggggagcugggcgacgugcgcgagaccauguccuaccuguuccagcacgccaaccucgacagcugcaagcggguccugaacguggugugcaagaccugcggccagcagcagaccacccugaagggggucgaggccgugauguacaugggcacgcucuccuacgagcaguucaagaagggggugcagauccccugcaccugcggcaagcaggccaccaaguaccugguccagcaggagagccccuucgugaugauguccgcccccccggcgcaguacgagcugaagcacgggaccuucacgugcgccagcgaguacaccggcaacuaccagugcggccacuacaagcacaucaccuccaaggagacccucuacugcaucgacggggcccugcugacgaagagcagcgaguacaagggccccaucaccgacguguucuacaaggagaacuccuacaccaccacgaucaagcccgucaccuacaagcucgacgggguggugugcaccgagaucgaccccaagcuggacaacuacuacaagaaggacaacagcuacuucaccgagcagccgaucgaccugguccccaaccagcccuaccccaacgccuccuucgacaacuucaaguucgugugcgacaacaucaaguucgccgacgaccucaaccagcugacgggcuacaagaagccggcgagccgcgagcugaaggugaccuucuuccccgaccucaacggggacgucguggccaucgacuacaagcacuacacccccuccuucaagaagggcgccaagcugcugcacaagcccaucguguggcacgucaacaacgccaccaacaaggcgacguacaagccgaacaccuggugcauccggugccucuggagcaccaagcccguggagaccuccaacagcuucgacgugcugaaguccgaggacgcccagggcauggacaaccuggccugcgaggaccucaagcccgucagcgaggaggugguggagaaccccacgauccagaaggacguccuggagugcaacgugaagaccaccgagguggucggggacaucauccugaagccggccaacaacucccucaagaucaccgaggaggugggccacacggaccugauggccgcguacguggacaacagcucccugaccaucaagaagcccaacgagcucagccgcguccuggggcugaagacccucgccacccacggccuggccgccgugaacuccgugcccugggacacgaucgccaacuacgcgaagccguuccugaacaaggucgugagcaccaccaccaacaucgugacgcgcugccucaaccgggucugcaccaacuacaugcccuacuucuucacccugcugcuccagcugugcaccuucacccgcuccacgaacagccggaucaaggccuccaugcccaccaccaucgccaagaacaccgugaagagcguggggaaguucugccuggaggccagcuucaacuaccucaagucccccaacuucagcaagcugaucaacaucaucaucugguuccugcuccuguccgucugccugggcagccucaucuacuccacggccgcgcugggcgugcugaugagcaaccucgggaugccguccuacugcaccggcuaccgcgagggguaccugaacagcaccaacgugaccaucgccacguacugcaccggcuccauccccugcagcgucugccuguccggccucgacagccuggacaccuaccccucccuggagaccauccagaucacgaucagcuccuucaagugggaccucaccgccuucgggcugguggccgagugguuccuggccuacauccucuucacccgguucuucuacgugcugggccuggcggccaucaugcagcucuucuucagcuacuucgccguccacuucaucuccaacagcuggcugauguggcugaucaucaaccuggugcagauggcccccaucuccgcgauggugcgcauguacaucuucuucgccagcuucuacuacgucuggaagagcuacgugcacguggucgacgggugcaacuccagcaccugcaugaugugcuacaagcggaaccgcgccacgcggguggagugcaccaccaucgucaacggcgugcgccgguccuucuacguguacgccaacgggggcaagggcuucugcaagcuccacaacuggaacugcgucaacugcgacaccuucugcgccgggagcacguucaucuccgacgagguggcgcgcgaccugagccugcaguucaagcggccgaucaaccccaccgaccaguccagcuacaucguggacuccgucaccgugaagaacggcagcauccaccucuacuucgacaaggccgggcagaagaccuacgagcgccacucccugagccacuucgugaaccuggacaaccuccgggccaacaacacgaagggcucccugcccaucaacgucaucguguucgacgggaagagcaagugcgaggaguccagcgccaaguccgccagcguguacuacucccagcugaugugccagcccauccuccugcuggaccaggcgcucgucagcgacgugggcgacagcgccgagguggccgucaagauguucgacgccuacgugaacaccuucuccagcaccuucaacaucccgauggagaagcugaagacccugguggccacggcggaggccgagcucgccaagaacgucucccuggacaacgugcugagcaccuucaucuccgccgcgcgccagggcuucguggacagcgacgucgagaccaaggacgugguggagugccucaagcugucccaccagagcgacaucgaggucaccggggacuccugcaacaacuacaugcugacguacaacaagguggagaacaugaccccccgggaccucggcgccugcaucgacugcagcgcccgccacaucaacgcccagguggccaagucccacaacaucgcgcugaucuggaacgucaaggacuucaugagccuguccgagcagcuccggaagcagauccgcagcgccgccaagaagaacaaccugcccuucaagcugaccugcgccaccacgcgccagguggugaacgucgugaccaccaagaucgcccucaaggggggcugaggacuagucccuguucccagagcccacuuuuuuuucuuuuuuugaaauaaaauagccugucuuucagaucucaaaggcucuuuucagagccaccaaaaaaaaaaaaaaaaaaaaaaaaaaaaaaaaaaaaaaaaaaaaaaaaaaaaaaaaaaaaaaaaaaaaaaaaaaaaaaaaaaaaaaaaaaaaaaaaaaaaa

SEQ ID NO: 19649 - RNA, 6113 nt, Artificial Sequence
  SARS-CoV-2__MT831202.1__non-structural protein 3 (NSP3) mRNA gc
aggagagucccgcagucggcguccagcggcucugcuuguucgugugugugucguugcaggccuuauucaagcuuaccauggcccccaccaaggugaccuucggcgacgacacggucaucgaggugcagggguacaagagcgugaacaucaccuucgagcuggacgagcgcaucgacaagguccucaacgagaagugcuccgccuacaccguggagcugggcaccgaggugaacgaguucgcgugcgucguggccgacgccgugaucaagacgcugcagccggucagcgagcuccugaccccccuggggaucgaccucgacgagugguccauggccaccuacuaccuguucgacgagagcggcgaguucaagcuggccucccacauguacugcagcuucuacccccccgacgaggacgaggaggagggggacugcgaggaggaggaguucgagccguccacccaguacgaguacggcacggaggacgacuaccagggcaagccccucgaguucggggcgaccagcgccgcccugcagcccgaggaggagcaggaggaggacuggcuggacgacgacucccagcagaccgugggccagcaggacgggagcgaggacaaccagaccacgaccauccagaccaucguggagguccagccccagcucgagauggagcugaccccgguggugcagacgaucgaggucaacuccuucagcggcuaccugaagcucaccgacaacguguacaucaagaacgccgacaucguggaggaggcgaagaaggucaagcccaccgugguggucaacgccgccaacguguaccugaagcacgggggcggcguggccggggcccugaacaaggcgaccaacaacgccaugcaggucgaguccgacgacuacaucgccacgaacggcccccucaagguggggggcagcugcguccuguccggccacaaccuggccaagcacugccuccacgugguggggcccaacgucaacaagggcgaggacauccagcugcugaagagcgccuacgagaacuucaaccagcacgaggugcuccuggcgccgcugcucuccgccgggaucuucggcgccgaccccauccacagccugcgggugugcgucgacaccgugcgcaccaacguguaccuggccgucuucgacaagaaccucuacgacaagcugguguccagcuuccuggagaugaagagcgagaagcagguggagcagaagaucgccgagauccccaaggaggaggucaagcccuucaucaccgaguccaagccgagcguggagcagcggaagcaggacgacaagaagaucaaggcgugcguggaggaggucacgaccacccucgaggagaccaaguuccugacggagaaccugcuccuguacaucgacaucaacgggaaccugcaccccgacuccgccacccucgugagcgacaucgacaucaccuuccugaagaaggacgcccccuacaucgugggcgacgucgugcaggagggcgugcugaccgccgucgugauccccacgaagaaggccgggggcaccaccgagaugcucgcgaaggcccugcgcaaggugccgaccgacaacuacaucacgaccuaccccgggcagggccugaacggguacaccgucgaggaggccaagaccgugcucaagaagugcaaguccgccuucuacauccugcccagcaucaucuccaacgagaagcaggagauccugggcaccgugagcuggaaccuccgggagaugcuggcgcacgccgaggagacgcgcaagcugaugcccgucugcguggagaccaaggccaucguguccaccauccagcggaaguacaagggcaucaagauccaggagggggucguggacuacggcgcccgcuucuacuucuacaccagcaagacgaccguggccucccugaucaacacccucaacgaccugaacgagacccuggucacgaugccgcucggguacgugacccacggccugaaccuggaggaggcggcccgguacaugcgcagccucaaggugcccgccaccgucuccgugagcucccccgacgccgugaccgccuacaacggguaccugacgagcuccagcaagacccccgaggagcacuucaucgagaccaucucccuggcgggcagcuacaaggacuggagcuacuccggccagagcacccagcucgggaucgaguuccugaagcggggcgacaaguccgucuacuacacgagcaacccgaccaccuuccaccuggacggggaggugaucaccuucgacaaccucaagacgcugcugucccuccgcgaggugcggaccaucaaggucuucaccaccguggacaacaucaaccugcacacgcagguggucgacaugagcaugaccuacggccagcaguucggccccaccuaccuggacggggccgacgugaccaagaucaagccccacaacucccacgagggcaagacguucuacgugcucccgaacgacgacacccugcgcgucgaggccuucgaguacuaccacaccaccgaccccagcuuccuggggcgguacauguccgcccucaaccacacgaagaaguggaaguacccccaggugaacggccugaccagcaucaagugggccgacaacaacugcuaccuggcgaccgcccuccugacccugcagcagaucgagcucaaguucaaccccccggcccugcaggacgccuacuaccgcgcgcgggccggggaggccgccaacuucugcgcccugauccucgcguacugcaacaagacggugggcgagcugggcgacguccgcgagaccauguccuaccuguuccagcacgccaaccucgacagcugcaagcgggugcugaacgucgugugcaagaccugcgggcagcagcagaccacccugaagggcguggaggccgucauguacauggggacgcucuccuacgagcaguucaagaagggcgugcagauccccugcaccugcgggaagcaggccaccaaguaccuggugcagcaggagagccccuucgucaugauguccgcccccccggcgcaguacgagcugaagcacggcaccuucacgugcgccagcgaguacaccggcaacuaccagugcgggcacuacaagcacaucaccuccaaggagacccucuacugcaucgacggcgcccugcugacgaagagcagcgaguacaaggggcccaucaccgacguguucuacaaggagaacuccuacaccaccacgaucaagcccgugaccuacaagcucgacggcgucgugugcaccgagaucgaccccaagcuggacaacuacuacaagaaggacaacagcuacuucaccgagcagccgaucgaccuggugcccaaccagcccuaccccaacgccuccuucgacaacuucaaguucgucugcgacaacaucaaguucgccgacgaccucaaccagcugacgggguacaagaagccggcgagccgcgagcugaaggugaccuucuuccccgaccucaacggcgacguggucgccaucgacuacaagcacuacacccccuccuucaagaagggcgccaagcugcugcacaagcccaucguguggcacgugaacaacgccaccaacaaggcgacguacaagccgaacaccuggugcauccggugccucuggagcaccaagcccgucgagaccuccaacagcuucgacgugcugaaguccgaggacgcccaggggauggacaaccuggccugcgaggaccucaagcccgugagcgaggaggucguggagaaccccacgauccagaaggacgugcuggagugcaacgucaagaccaccgagguggugggcgacaucauccugaagccggccaacaacucccucaagaucaccgaggaggucgggcacacggaccugauggccgcguacguggacaacuucagccugaccaucaagaagcccaacgagcucucccgcgugcugggccugaagacccucgccacccacgggcuggccgccgucaacagcgugcccugggacacgaucgccaacuacgcgaagccguuccugaacaagguggucuccaccaccaccaacaucgugacgcgcugccucaaccgggugugcaccaacuacaugcccuacuucuucacccugcugcuccagcugugcaccuucacccgcagcacgaacucccggaucaaggccagcaugcccaccaccaucgccaagaacaccgucaaguccgugggcaaguucugccuggaggccagcuucaacuaccucaagagccccaacuucuccaagcugaucaacaucaucaucugguuccugcuccugagcgugugccugggcucccucaucuacagcacggccgcgcuggggguccugauguccaaccucggcaugccgagcuacugcaccggguaccgcgagggcuaccugaacuccaccaacgugaccaucgccacguacugcaccggcagcauccccugcuccgugugccugagcgggcucgacucccuggacaccuaccccagccuggagaccauccagaucacgaucuccagcuucaagugggaccucaccgccuucggccuggucgccgagugguuccuggccuacauccucuucacccgguucuucuacgugcuggggcuggcggccaucaugcagcucuucuucuccuacuucgccgugcacuucaucagcaacuccuggcugauguggcugaucaucaaccugguccagauggcccccaucagcgcgauggugcgcauguacaucuucuucgccuccuucuacuacguguggaagagcuacguccacgugguggacggcugcaacagcuccaccugcaugaugugcuacaagcggaaccgcgccacgcgggucgagugcaccaccaucgugaacgggguccgccggagcuucuacguguacgccaacggcggcaagggguucugcaagcuccacaacuggaacugcgugaacugcgacaccuucugcgccggcuccacguucaucagcgacgaggucgcgcgcgaccugucccugcaguucaagcggccgaucaaccccaccgaccagagcuccuacaucguggacagcgugaccgucaagaacggguccauccaccucuacuucgacaaggccggccagaagaccuacgagcgccacagccugucccacuucgugaaccuggacaaccuccgggccaacaacacgaaggggagccugcccaucaacgugaucgucuucgacggcaaguccaagugcgaggagagcuccgccaagagcgccuccguguacuacagccagcugaugugccagcccauccuccugcuggaccaggcgcucguguccgacgucggcgacagcgccgagguggccgugaagauguucgacgccuacgucaacaccuucagcuccaccuucaacgugccgauggagaagcugaagacccugguggccacggcggaggccgagcucgccaagaacgucagccuggacaacgugcuguccaccuucaucagcgccgcgcgccagggguucguggacuccgacgucgagaccaaggacgugguggagugccucaagcugagccaccaguccgacaucgaggucaccggcgacagcugcaacaacuacaugcugacguacaacaagguggagaacaugaccccccgggaccucggggccugcaucgacugcuccgcccgccacaucaacgcccagguggccaagagccacaacaucgcgcugaucuggaacgucaaggacuucaugucccugagcgagcagcuccggaagcagauccgcuccgccgccaagaagaacaaccugcccuucaagcugaccugcgccaccacgcgccagguggugaacgucgugaccaccaagaucgcccucaagggcgggugaggacuagucccuguucccagagcccacuuuuuuuucuuuuuuugaaauaaaauagccugucuuucagaucucaaaggcucuuuucagagccaccaaaaaaaaaaaaaaaaaaaaaaaaaaaaaaaaaaaaaaaaaaaaaaaaaaaaaaaaaaaaaaaaaaaaaaaaaaaaaaaaaaaaaaaaaaaaaaaaaaaaa

SEQ ID NO: 19650 - RNA, 6113 nt, Artificial Sequence
  SARS-CoV-2__MT831205.1__non-structural protein 3 (NSP3) mRNA gc
aggagagucccgcagucggcguccagcggcucugcuuguucgugugugugucguugcaggccuuauucaagcuuaccauggcccccaccaaggugaccuucggcgacgacacggucaucgaggugcagggguacaagagcgugaacaucaccuucgagcuggacgagcgcaucgacaagguccucaacgagaagugcuccgccuacaccguggagcugggcaccgaggugaacgaguucgcgugcgucguggccgacgccgugaucaagacgcugcagccggucagcgagcuccugaccccccuggggaucgaccucgacgagugguccauggccaccuacuaccuguucgacgagagcggcgaguucaagcuggccucccacauguacugcagcuucuacccccccgacgaggacgaggaggagggggacugcgaggaggaggaguucgagccguccacccaguacgaguacggcacggaggacgacuaccagggcaagccccucgaguucggggcgaccagcgccgcccugcagcccgaggaggagcaggaggaggacuggcuggacgacgacucccagcagaccgugggccagcaggacgggagcgaggacaaccagaccacgaccauccagaccaucguggagguccagccccagcucgagauggagcugaccccgguggugcagacgaucgaggucaacuccuucagcggcuaccugaagcucaccgacaacguguacaucaagaacgccgacaucguggaggaggcgaagaaggucaagcccaccgugguggucaacgccgccaacguguaccugaagcacgggggcggcguggccggggcccugaacaaggcgaccaacaacgccaugcaggucgaguccgacgacuacaucgccacgaacggcccccucaagguggggggcagcugcguccuguccggccacaaccuggccaagcacugccuccacgugguggggcccaacgucaacaagggcgaggacauccagcugcugaagagcgccuacgagaacuucaaccagcacgaggugcuccuggcgccgcugcucuccgccgggaucuucggcgccgaccccauccacagccugcgggugugcgucgacaccgugcgcaccaacguguaccuggccgucuucgacaagaaccucuacgacaagcugguguccagcuuccuggagaugaagagcgagaagcagguggagcagaagaucgccgagauccccaaggaggaggucaagcccuucaucaccgaguccaagccgagcguggagcagcggaagcaggacgacaagaagaucaaggcgugcguggaggaggucacgaccacccucgaggagaccaaguuccugacggagaaccugcuccuguacaucgacaucaacgggaaccugcaccccgacuccgccacccucgugagcgacaucgacaucaccuuccugaagaaggacgcccccuacaucgugggcgacgucgugcaggagggcgugcugaccgccgucgugauccccacgaagaaggccgggggcaccaccgagaugcucgcgaaggcccugcgcaaggugccgaccgacaacuacaucacgaccuaccccgggcagggccugaacggguacaccgucgaggaggccaagaccgugcucaagaagugcaaguccgccuucuacauccugcccagcaucaucuccaacgagaagcaggagauccugggcaccgugagcuggaaccuccgggagaugcuggcgcacgccgaggagacgcgcaagcugaugcccgucugcguggagaccaaggccaucguguccaccauccagcggaaguacaagggcaucaagauccaggagggggucguggacuacggcgcccgcuucuacuucuacaccagcaagacgaccguggccucccugaucaacacccucaacgaccugaacgagacccuggucacgaugccgcucggguacgugacccacggccugaaccuggaggaggcggcccgguacaugcgcagccucaaggugcccgccaccgucuccgugagcucccccgacgccgugaccgccuacaacggguaccugacgagcuccagcaagacccccgaggagcacuucaucgagaccaucucccuggcgggcagcuacaaggacuggagcuacuccggccagagcacccagcucgggaucgaguuccugaagcggggcgacaaguccgucuacuacacgagcaacccgaccaccuuccaccuggacggggaggugaucaccuucgacaaccucaagacgcugcugucccuccgcgaggugcggaccaucaaggucuucaccaccguggacaacaucaaccugcacacgcagguggucgacaugagcaugaccuacggccagcaguucggccccaccuaccuggacggggccgacgugaccaagaucaagccccacaacucccacgagggcaagacguucuacgugcucccgaacgacgacacccugcgcgucgaggccuucgaguacuaccacaccaccaaccccagcuuccuggggcgguacauguccgcccucaaccacacgaagaaguggaaguacccccaggugaacggccugaccagcaucaagugggccgacaacaacugcuaccuggcgaccgcccuccugacccugcagcagaucgagcucaaguucaaccccccggcccugcaggacgccuacuaccgcgcgcgggccggggaggccgccaacuucugcgcccugauccucgcguacugcaacaagacggugggcgagcugggcgacguccgcgagaccauguccuaccuguuccagcacgccaaccucgacagcugcaagcgggugcugaacgucgugugcaagaccugcgggcagcagcagaccacccugaagggcguggaggccgucauguacauggggacgcucuccuacgagcaguucaagaagggcgugcagauccccugcaccugcgggaagcaggccaccaaguaccuggugcagcaggagagccccuucgucaugauguccgcccccccggcgcaguacgagcugaagcacggcaccuucacgugcgccagcgaguacaccggcaacuaccagugcgggcacuacaagcacaucaccuccaaggagacccucuacugcaucgacggcgcccugcugacgaagagcagcgaguacaaggggcccaucaccgacguguucuacaaggagaacuccuacaccaccacgaucaagcccgugaccuacaagcucgacggcgucgugugcaccgagaucgaccccaagcuggacaacuacuacaagaaggacaacagcuacuucaccgagcagccgaucgaccuggugcccaaccagcccuaccccaacgccuccuucgacaacuucaaguucgucugcgacaacaucaaguucgccgacgaccucaaccagcugacgggguacaagaagccggcgagccgcgagcugaaggugaccuucuuccccgaccucaacggcgacguggucgccaucgacuacaagcacuacacccccuccuucaagaagggcgccaagcugcugcacaagcccaucguguggcacgugaacaacgccaccaacaaggcgacguacaagccgaacaccuggugcauccggugccucuggagcaccaagcccgucgagaccuccaacagcuucgacgugcugaaguccgaggacgcccaggggauggacaaccuggccugcgaggaccucaagcccgugagcgaggaggucguggagaaccccacgauccagaaggacgugcuggagugcaacgucaagaccaccgagguggugggcgacaucauccugaagccggccaacaacucccucaagaucaccgaggaggucgggcacacggaccugauggccgcguacguggacaacagcucccugaccaucaagaagcccaacgagcucagccgcgugcugggccugaagacccucgccacccacgggcuggccgccgucaacuccgugcccugggacacgaucgccaacuacgcgaagccguuccugaacaagguggucagcaccaccaccaacaucgugacgcgcugccucaaccgggugugcaccaacuacaugcccuacuucuucacccugcugcuccagcugugcaccuucacccgcuccacgaacagccggaucaaggccuccaugcccaccaccaucgccaagaacaccgucaagagcgugggcaaguucugccuggaggccagcuucaacuaccucaagucccccaacuucagcaagcugaucaacaucaucaucugguuccugcuccuguccgugugccugggcagccucaucuacuccacggccgcgcuggggguccugaugagcaaccucggcaugccguccuacugcaccggguaccgcgagggcuaccugaacagcaccaacgugaccaucgccacguacugcaccggcuccauccccugcagcgugugccuguccgggcucgacagccuggacaccuaccccucccuggagaccauccagaucacgaucagcuccuucaagugggaccucaccgccuucggccuggucgccgagugguuccuggccuacauccucuucacccgguucuucuacgugcuggggcuggcggccaucaugcagcucuucuucagcuacuucgccgugcacuucaucuccaacagcuggcugauguggcugaucaucaaccugguccagauggcccccaucuccgcgauggugcgcauguacaucuucuucgccagcuucuacuacguguggaagagcuacguccacgugguggacggcugcaacuccagcaccugcaugaugugcuacaagcggaaccgcgccacgcgggucgagugcaccaccaucgugaacgggguccgccgguccuucuacguguacgccaacggcggcaagggguucugcaagcuccacaacuggaacugcgugaacugcgacaccuucugcgccggcagcacguucaucuccgacgaggucgcgcgcgaccugagccugcaguucaagcggccgaucaaccccaccgaccaguccagcuacaucguggacuccgugaccgucaagaacgggagcauccaccucuacuucgacaaggccggccagaagaccuacgagcgccacucccugagccacuucgugaaccuggacaaccuccgggccaacaacacgaaggggucccugcccaucaacgugaucgucuucgacggcaagagcaagugcgaggaguccagcgccaaguccgccagcguguacuacucccagcugaugugccagcccauccuccugcuggaccaggcgcucgugagcgacgucggcgacagcgccgagguggccgugaagauguucgacgccuacgucaacaccuucuccagcaccuucaacgugccgauggagaagcugaagacccugguggccacggcggaggccgagcucgccaagaacgucucccuggacaacgugcugagcaccuucaucuccgccgcgcgccagggguucguggacagcgacgucgagaccaaggacgugguggagugccucaagcugucccaccagagcgacaucgaggucaccggcgacuccugcaacaacuacaugcugacguacaacaagguggagaacaugaccccccgggaccucggggccugcaucgacugcagcgcccgccacaucaacgcccagguggccaagucccacaacaucgcgcugaucuggaacgucaaggacuucaugagccuguccgagcagcuccggaagcagauccgcagcgccgccaagaagaacaaccugcccuucaagcugaccugcgccaccacgcgccagguggugaacgucgugaccaccaagaucgcccucaagggcgggugaggacuagucccuguucccagagcccacuuuuuuuucuuuuuuugaaauaaaauagccugucuuucagaucucaaaggcucuuuucagagccaccaaaaaaaaaaaaaaaaaaaaaaaaaaaaaaaaaaaaaaaaaaaaaaaaaaaaaaaaaaaaaaaaaaaaaaaaaaaaaaaaaaaaaaaaaaaaaaaaaaaaa

SEQ ID NO: 19651 - RNA, 6113 nt, Artificial Sequence
  SARS-CoV-2__MT831223.1__non-structural protein 3 (NSP3) mRNA gc
aggagagucccgcagucggcguccagcggcucugcuuguucgugugugugucguugcaggccuuauucaagcuuaccauggcccccaccaaggugaccuucggcgacgacacggucaucgaggugcagggguacaagagcgugaacaucaccuucgagcuggacgagcgcaucgacaagguccucaacgagaagugcuccgccuacaccguggagcugggcaccgaggugaacgaguucgcgugcgucguggccgacgccgugaucaagacgcugcagccggucagcgagcuccugaccccccuggggaucgaccucgacgagugguccauggccaccuacuaccuguucgacgagagcggcgaguucaagcuggccucccacauguacugcagcuucuacccccccgacgaggacgaggaggagggggacugcgaggaggaggaguucgagccguccacccaguacgaguacggcacggaggacgacuaccagggcaagccccucgaguucggggcgaccagcgccgcccugcagcccgaggaggagcaggaggaggacuggcuggacgacgacucccagcagaccgugggccagcaggacgggagcgaggacaaccagaccacgaccauccagaccaucguggagguccagccccagcucgagauggagcugaccccgguggugcagacgaucgaggucaacuccuucagcggcuaccugaagcucaccgacaacguguacaucaagaacgccgacaucguggaggaggcgaagaaggucaagcccaccgugguggucaacgccgccaacguguaccugaagcacgggggcggcguggccggggcccugaacaaggcgaccaacaacgccaugcaggucgaguccgacgacuacaucgccacgaacggcccccucaagguggggggcagcugcguccuguccggccacaaccuggccaagcacugccuccacgugguggggcccaacgucaacaagggcgaggacauccagcugcugaagagcgccuacgagaacuucaaccagcacgaggugcuccuggcgccgcugcucuccgccgggaucuucggcgccgaccccauccacagccugcgggugugcgucgacaccgugcgcaccaacguguaccuggccgucuucgacaagaaccucuacgacaagcugguguccagcuuccuggagaugaagagcgagaagcagguggagcagaagaucgccgagauccccaaggaggaggucaagcccuucaucaccgaguccaagccgagcguggagcagcggaagcaggacgacaagaagaucaaggcgugcguggaggaggucacgaccacccucgaggagaccaaguuccugacggagaaccugcuccuguacaucgacaucaacgggaaccugcaccccgacuccgccacccucgugagcgacaucgacaucaccuuccugaagaaggacgcccccuacaucgugggcgacgucgugcaggagggcgugcugaccgccgucgugauccccacgaagaaggccgggggcaccaccgagaugcucgcgaaggcccugcgcaaggugccgaccgacaacuacaucacgaccuaccccgggcagggccugaacggguacaccgucgaggaggccaagaccgugcucaagaagugcaaguccgccuucuacauccugcccagcaucaucuccaacgagaagcaggagauccugggcaccgugagcuggaaccuccgggagaugcuggcgcacgccgaggagacgcgcaagcugaugcccgucugcguggagaccaaggccaucguguccaccauccagcggaaguacaagggcaucaagauccaggagggggucguggacuacggcgcccgcuucuacuucuacaccagcaagacgaccguggccucccugaucaacacccucaacgaccugaacgagacccuggucacgaugccgcucggguacgugacccacggccugaaccuggaggaggcggcccgguacaugcgcagccucaaggugcccgccaccgucuccgugagcucccccgacgccgugaccgccuacaacggguaccugacgagcuccagcaagacccccgaggagcacuucaucgagaccaucucccuggcgggcagcuacaaggacuggagcuacuccggccagagcacccagcucgggaucgaguuccugaagcggggcgacaaguccgucuacuacacgagcaacccgaccaccuuccaccuggacggggaggugaucaccuucgacaaccucaagacgcugcugucccuccgcgaggugcggaccaucaaggucuucaccaccguggacaacaucaaccugcacacgcagguggucgacaugagcaugaccuacggccagcaguucggccccaccuaccuggacggggccgacgugaccaagaucaagccccacaacucccacgagggcaagacguucuacgugcucccgaacgacgacacccugcgcgucgaggccuucgaguacuaccacaccaccgaccccagcuuccuggggcgguacauguccgcccucaaccacacgaagaaguggaaguacccccaggugaacggccugaccagcaucaagugggccgacaacaacugcuaccuggcgaccgcccuccugacccugcagcagaucgagcucaaguucaaccccccggcccugcaggacgccuacuaccgcgcgcgggccggggaggccgccaacuucugcgcccugauccucgcguacugcaacaagacggugggcgagcugggcgacguccgcgagaccauguccuaccuguuccagcacgccaaccucgacagcugcaagcgggugcugaacgucgugugcaagaccugcgggcagcagcagaccacccugaagggcguggaggccgucauguacauggggacgcucuccuacgagcaguucaagaagggcgugcagauccccugcaccugcgggaagcaggccaccaaguaccuggugcagcaggagagccccuucgucaugauguccgcccccccggcgcaguacgagcugaagcacggcaccuucacgugcgccagcgaguacaccggcaacuaccagugcgggcacuacaagcacaucaccuccaaggagacccucuacugcaucgacggcgcccugcugacgaagagcagcgaguacaaggggcccaucaccgacguguucuacaaggagaacuccuacaccaccacgaucaagcccgugaccuacaagcucgacggcgucgugugcaccgagaucgaccccaagcuggacaacuacuacaagaaggacaacagcuacuucaccgagcagccgaucgaccuggugcccaaccagcccuaccccaacgccuccuucgacaacuucaaguucgucugcgacaacaucaaguucgccgacgaccucaaccagcugacgggguacaagaagccggcgagccgcgagcugaaggugaccuucuuccccgaccucaacggcgacguggucgccaucgacuacaagcacuacacccccuccuucaagaagggcgccaagcugcugcacaagcccaucguguggcacgugaacaacgccaccaacaaggcgacguacaagccgaacaccuggugcauccggugccucuggagcaccaagcccgucgagaccuccaacagcuucgacgugcugaaguccgaggacgcccaggggauggacaaccuggccugcgaggaccucaagcccuucagcgaggagguggucgagaaccccacgauccagaaggacgugcuggagugcaacgugaagaccaccgaggucgugggcgacaucauccugaagccggccaacaacucccucaagaucaccgaggagguggggcacacggaccugauggccgcguacgucgacaacagcucccugaccaucaagaagcccaacgagcucagccgcgugcugggccugaagacccucgccacccacgggcuggccgccgugaacuccguccccugggacacgaucgccaacuacgcgaagccguuccugaacaagguggugagcaccaccaccaacaucgucacgcgcugccucaaccgggugugcaccaacuacaugcccuacuucuucacccugcugcuccagcugugcaccuucacccgcuccacgaacagccggaucaaggccuccaugcccaccaccaucgccaagaacaccgugaagagcgucggcaaguucugccuggaggccagcuucaacuaccucaagucccccaacuucagcaagcugaucaacaucaucaucugguuccugcuccuguccgugugccugggcagccucaucuacuccacggccgcgcugggggugcugaugagcaaccucggcaugccguccuacugcaccggguaccgcgagggcuaccugaacagcaccaacgucaccaucgccacguacugcaccggcuccauccccugcagcgugugccuguccgggcucgacagccuggacaccuaccccucccuggagaccauccagaucacgaucagcuccuucaagugggaccucaccgccuucggccugguggccgagugguuccuggccuacauccucuucacccgguucuucuacguccuggggcuggcggccaucaugcagcucuucuucagcuacuucgccgugcacuucaucuccaacagcuggcugauguggcugaucaucaaccuggugcagauggcccccaucuccgcgaugguccgcauguacaucuucuucgccagcuucuacuacguguggaagagcuacgugcacgucguggacggcugcaacuccagcaccugcaugaugugcuacaagcggaaccgcgccacgcggguggagugcaccaccaucgucaacggggugcgccgguccuucuacgucuacgccaacggcggcaagggguucugcaagcuccacaacuggaacugcgugaacugcgacaccuucugcgccggcagcacguucaucuccgacgagguggcgcgcgaccugagccugcaguucaagcggccgaucaaccccaccgaccaguccagcuacaucgucgacuccgugaccgugaagaacgggagcauccaccucuacuucgacaaggccggccagaagaccuacgagcgccacucccugagccacuucgucaaccuggacaaccuccgggccaacaacacgaaggggucccugcccaucaacgugaucguguucgacggcaagagcaagugcgaggaguccagcgccaaguccgccagcgucuacuacucccagcugaugugccagcccauccuccugcuggaccaggcgcucgugagcgacgugggcgacagcgccgaggucgccgugaagauguucgacgccuacgugaacaccuucuccagcaccuucaacgucccgauggagaagcugaagacccugguggccacggcggaggccgagcucgccaagaacgugucccuggacaacguccugagcaccuucaucuccgccgcgcgccagggguucguggacagcgacguggagaccaaggacgucguggagugccucaagcugucccaccagagcgacaucgaggugaccggcgacuccugcaacaacuacaugcugacguacaacaaggucgagaacaugaccccccgggaccucggggccugcaucgacugcagcgcccgccacaucaacgcccagguggccaagucccacaacaucgcgcugaucuggaacgugaaggacuucaugagccuguccgagcagcuccggaagcagauccgcagcgccgccaagaagaacaaccugcccuucaagcugaccugcgccaccacgcgccaggucgugaacguggucaccaccaagaucgcccucaagggcgggugaggacuagucccuguucccagagcccacuuuuuuuucuuuuuuugaaauaaaauagccugucuuucagaucucaaaggcucuuuucagagccaccaaaaaaaaaaaaaaaaaaaaaaaaaaaaaaaaaaaaaaaaaaaaaaaaaaaaaaaaaaaaaaaaaaaaaaaaaaaaaaaaaaaaaaaaaaaaaaaaaaaaa

SEQ ID NO: 19652 - RNA, 6113 nt, Artificial Sequence
  SARS-CoV-2__MT831261.1__non-structural protein 3 (NSP3) mRNA gc
aggagagucccgcagucggcguccagcggcucugcuuguucgugugugugucguugcaggccuuauucaagcuuaccauggcccccaccaaggugaccuucggcgacgacacggucaucgaggugcagggguacaagagcgugaacaucaccuucgagcuggacgagcgcaucgacaagguccucaacgagaagugcuccgccuacaccguggagcugggcaccgaggugaacgaguucgcgugcgucguggccgacgccgugaucaagacgcugcagccggucagcgagcuccugaccccccuggggaucgaccucgacgagugguccauggccaccuacuaccuguucgacgagagcggcgaguucaagcuggccucccacauguacugcagcuucuacccccccgacgaggacgaggaggagggggacugcgaggaggaggaguucgagccguccacccaguacgaguacggcacggaggacgacuaccagggcaagccccucgaguucggggcgaccagcgccgcccugcagcccgaggaggagcaggaggaggacuggcuggacgacgacucccagcagaccgugggccagcaggacgggagcgaggacaaccagaccacgaccauccagaccaucguggagguccagccccagcucgagauggagcugaccccgguggugcagacgaucgaggucaacuccuucagcggcuaccugaagcucaccgacaacguguacaucaagaacgccgacaucguggaggaggcgaagaaggucaagcccaccgugguggucaacgccgccaacguguaccugaagcacgggggcggcguggccggggcccugaacaaggcgaccaacaacgccaugcaggucgaguccgacgacuacaucgccacgaacggcccccucaagguggggggcagcugcguccuguccggccacaaccuggccaagcacugccuccacgugguggggcccaacgucaacaagggcgaggacauccagcugcugaagagcgccuacgagaacuucaaccagcacgaggugcuccuggcgccgcugcucuccgccgggaucuucggcgccgaccccauccacagccugcgggugugcgucgacaccgugcgcaccaacguguaccuggccgucuucgacaagaaccucuacgacaagcugguguccagcuuccuggagaugaagagcgagaagcagguggagcagaagaucgccgagauccccaaggaggaggucaagcccuucaucaccgaguccaagccgagcguggagcagcggaagcaggacgacaagaagaucaaggcgugcguggaggaggucacgaccacccucgaggagaccaaguuccugacggagaaccugcuccuguacaucgacaucaacgggaaccugcaccccgacuccgccacccucgugagcgacaucgacaucaccuuccugaagaaggacgcccccuacaucgugggcgacgucgugcaggagggcgugcugaccgccgucgugauccccacgaagaaggccgggggcaccaccgagaugcucgcgaaggcccugcgcaaggugccgaccgacaacuacaucacgaccuaccccgggcagggccugaacggguacaccgucgaggaggccaagaccgugcucaagaagugcaaguccgccuucuacauccugcccagcaucaucuccaacgagaagcaggagauccugggcaccgugagcuggaaccuccgggagaugcuggcgcacgccgaggagacgcgcaagcugaugcccgucugcguggagaccaaggccaucguguccaccauccagcggaaguacaagggcaucaagauccaggagggggucguggacuacggcgcccgcuucuacuucuacaccagcaagacgaccguggccucccugaucaacacccucaacgaccugaacgagacccuggucacgaugccgcucggguacgugacccacggccugaaccuggaggaggcggcccgguacaugcgcagccucaaggugcccgccaccgucuccgugagcucccccgacgccgugaccgccuacaacggguaccugacgagcuccagcaagacccccgaggagcacuucaucgagaccaucucccuggcgggcagcuacaaggacuggagcuacuccggccagagcacccagcucgggaucgaguuccugaagcggggcgacaaguccgucuacuacacgagcaacccgaccaccuuccaccuggacggggaggugaucaccuucgacaaccucaagacgcugcugucccuccgcgaggugcggaccaucaaggucuucaccaccguggacaacaucaaccugcacacgcagguggucgacaugagcaugaccuacggccagcaguucggccccaccuaccuggacggggccgacgugaccaagaucaagccccacaacucccacgagggcaagacguucuacgugcucccgaacgacgacacccugcgcgucgaggccuucgaguacuaccacaccaccgaccccagcuuccuggggcgguacauguccgcccucaaccacacgaagaaguggaaguacccccaggugaacggccugaccagcaucaagugggccgacaacaacugcuaccuggcgaccgcccuccugacccugcagcagaucgagcucaaguucaaccccccggcccugcaggacgccuacuaccgcgcgcgggccggggaggccgccaacuucugcgcccugauccucgcguacugcaacaagacggugggcgagcugggcgacguccgcgagaccauguccuaccuguuccagcacgccaaccucgacagcugcaagcgggugcugaacgucgugugcaagaccugcgggcagcagcagaccacccugaagggcguggaggccgucauguacauggggacgcucuccuacgagcaguucaagaagggcgugcagauccccugcaccugcgggaagcaggccaccaaguaccuggugcagcaggagagccccuucgucaugauguccgcccccccggcgcaguacgagcugaagcacggcaccuucacgugcgccagcgaguacaccggcaacuaccagugcgggcacuacaagcacaucaccuccaaggagacccucuacugcaucgacggcgcccugcugacgaagagcagcgaguacaaggggcccaucaccgacguguucuacaaggagaacuccuacaccaccacgaucaagcccgugaccuacaagcucgacggcgucgugugcaccgagaucgaccccaagcuggacaacuacuacaagaaggacaacagcuacuucaccgagcagccgaucgaccuggugcccaaccagcccuaccccaacgucuccuucgacaacuucaaguucgugugcgacaacaucaaguucgccgacgaccucaaccagcugacgggguacaagaagccggccagccgcgagcugaaggugaccuucuuccccgaccucaacggcgacgucguggcgaucgacuacaagcacuacacccccuccuucaagaagggcgccaagcugcugcacaagcccaucguguggcacgucaacaacgccaccaacaaggccacguacaagccgaacaccuggugcauccggugccucuggagcaccaagcccguggagaccuccaacagcuucgacgugcugaaguccgaggacgcgcaggggauggacaaccuggccugcgaggaccucaagcccgucagcgaggaggugguggagaaccccacgauccagaaggacguccuggagugcaacgugaagaccaccgagguggucggcgacaucauccugaagccggccaacaacucccucaagaucaccgaggagguggggcacacggaccugauggccgccuacguggacaacagcucccugaccaucaagaagcccaacgagcucagccgcguccugggccugaagacccucgcgacccacgggcuggccgccgugaacuccgugcccugggacacgaucgccaacuacgccaagccguuccugaacaaggucgugagcaccaccaccaacaucgugacgcgcugccucaaccgggucugcaccaacuacaugcccuacuucuucacccugcugcuccagcugugcaccuucacccgcuccacgaacagccggaucaaggcguccaugcccaccaccaucgccaagaacaccgugaagagcgugggcaaguucugccuggaggccagcuucaacuaccucaagucccccaacuucagcaagcugaucaacaucaucaucugguuccugcuccuguccgucugccugggcagccucaucuacuccacggccgcccugggggugcugaugagcaaccucggcaugccguccuacugcaccggguaccgcgagggcuaccugaacagcaccaacgugaccaucgcgacguacugcaccggcuccauccccugcagcgucugccuguccgggcucgacagccuggacaccuaccccucccuggagaccauccagaucacgaucagcuccuucaagugggaccucaccgccuucggccugguggccgagugguuccuggccuacauccucuucacccgguucuucuacgugcuggggcuggccgcgaucaugcagcucuucuucagcuacuucgccguccacuucaucuccaacagcuggcugauguggcugaucaucaaccuggugcagauggcccccaucuccgccauggugcgcauguacaucuucuucgcgagcuucuacuacgucuggaagagcuacgugcacguggucgacggcugcaacuccagcaccugcaugaugugcuacaagcggaaccgcgccacgcggguggagugcaccaccaucgucaacggggugcgccgguccuucuacguguacgccaacggcggcaagggguucugcaagcuccacaacuggaacugcgucaacugcgacaccuucugcgccggcagcacguucaucuccgacgagguggcccgcgaccugagccugcaguucaagcggccgaucaaccccaccgaccaguccagcuacaucguggacuccgucaccgugaagaacgggagcauccaccucuacuucgacaaggcgggccagaagaccuacgagcgccacucccugagccacuucgugaaccuggacaaccuccgggccaacaacacgaaggggucccugcccaucaacgucaucguguucgacggcaagagcaagugcgaggaguccagcgccaaguccgccagcguguacuacucccagcugaugugccagcccauccuccugcuggaccaggcccucgucagcgacgugggcgacagcgcggagguggccgucaagauguucgacgccuacgugaacaccuucuccagcaccuucaacgugccgauggagaagcugaagacccuggucgccacggccgaggcggagcucgccaagaacgugucccuggacaacgugcugagcaccuucaucuccgccgcccgccagggguucgucgacagcgacguggagaccaaggacguggucgagugccucaagcugucccaccagagcgacaucgaggugaccggcgacuccugcaacaacuacaugcugacguacaacaagguggagaacaugaccccccgggaccucggggcgugcaucgacugcagcgcccgccacaucaacgcccaggucgccaagucccacaacaucgcccugaucuggaacgugaaggacuucaugagccuguccgagcagcuccggaagcagauccgcagcgcggccaagaagaacaaccugcccuucaagcugaccugcgccaccacgcgccagguggucaacguggugaccaccaagaucgcccucaagggcgggugaggacuagucccuguucccagagcccacuuuuuuuucuuuuuuugaaauaaaauagccugucuuucagaucucaaaggcucuuuucagagccaccaaaaaaaaaaaaaaaaaaaaaaaaaaaaaaaaaaaaaaaaaaaaaaaaaaaaaaaaaaaaaaaaaaaaaaaaaaaaaaaaaaaaaaaaaaaaaaaaaaaaa

SEQ ID NO: 19653 - RNA, 6113 nt, Artificial Sequence
  SARS-CoV-2__MT831296.1__non-structural protein 3 (NSP3) mRNA gc
aggagagucccgcagucggcguccagcggcucugcuuguucgugugugugucguugcaggccuuauucaagcuuaccauggcccccaccaaggugaccuucggcgacgacacggucaucgaggugcagggguacaagagcgugaacaucaccuucgagcuggacgagcgcaucgacaagguccucaacgagaagugcuccgccuacaccguggagcugggcaccgaggugaacgaguucgcgugcgucguggccgacgccgugaucaagacgcugcagccggucagcgagcuccugaccccccuggggaucgaccucgacgagugguccauggccaccuacuaccuguucgacgagagcggcgaguucaagcuggccucccacauguacugcagcuucuacccccccgacgaggacgaggaggagggggacugcgaggaggaggaguucgagccguccacccaguacgaguacggcacggaggacgacuaccagggcaagccccucgaguucggggcgaccagcgccgcccugcagcccgaggaggagcaggaggaggacuggcuggacgacgacucccagcagaccgugggccagcaggacgggagcgaggacaaccagaccacgaccauccagaccaucguggagguccagccccagcucgagauggagcugaccccgguggugcagacgaucgaggucaacuccuucagcggcuaccugaagcucaccgacaacguguacaucaagaacgccgacaucguggaggaggcgaagaaggucaagcccaccgugguggucaacgccgccaacguguaccugaagcacgggggcggcguggccggggcccugaacaaggcgaccaacaacgccaugcaggucgaguccgacgacuacaucgccacgaacggcccccucaagguggggggcagcugcguccuguccggccacaaccuggccaagcacugccuccacgugguggggcccaacgucaacaagggcgaggacauccagcugcugaagagcgccuacgagaacuucaaccagcacgaggugcuccuggcgccgcugcucuccgccgggaucuucggcgccgaccccauccacagccugcgggugugcgucgacaccgugcgcaccaacguguaccuggccgucuucgacaagaaccucuacgacaagcugguguccagcuuccuggagaugaagagcgagaagcagguggagcagaagaucgccgagauccccaaggaggaggucaagcccuucaucaccgaguccaagccgagcguggagcagcggaagcaggacgacaagaagaucaaggcgugcguggaggaggucacgaccacccucgaggagaccaaguuccugacggagaaccugcuccuguacaucgacaucaacgggaaccugcaccccgacuccgccacccucgugagcgacaucgacaucaccuuccugaagaaggacgcccccuacaucgugggcgacgucgugcaggagggcgugcugaccgccgucgugauccccacgaagaaggccgggggcaccaccgagaugcucgcgaaggcccugcgcaaggugccgaccgacaacuacaucacgaccuaccccgggcagggccugaacggguacaccgucgaggaggccaagaccgugcucaagaagugcaaguccgccuucuacauccugcccagcaucaucuccaacgagaagcaggagauccugggcaccgugagcuggaaccuccgggagaugcuggcgcacgccgaggagacgcgcaagcugaugcccgucugcguggagaccaaggccaucguguccaccauccagcggaaguacaagggcaucaagauccaggagggggucguggacuacggcgcccgcuucuacuucuacaccagcaagacgaccguggccucccugaucaacacccucaacgaccugaacgagacccuggucacgaugccgcucggguacgugacccacggccugaaccuggaggaggcggcccgguacaugcgcagccucaaggugcccgccaccgucuccgugagcucccccgacgccgugaccgccuacaacggguaccugacgagcuccagcaagacccccgaggagcacuucaucgagaccaucucccuggcgggcagcuacaaggacuggagcuacuccggccagagcacccagcucgggaucgaguuccugaagcggggcgacaaguccgucuacuacacgagcaacccgaccaccuuccaccuggacggggaggugaucaccuucgacaaccucaagacgcugcugucccuccgcgaggugcggaccaucaaggucuucaccaccguggacaacaucaaccugcacacgcagguggucgacaugagcaugaccuacggccagcaguucggccccaccuaccuggacggggccgacgugaccaagaucaagccccacaacucccacgagggcaagacguucuacgugcucccgaacgacgacacccugcgcgucgaggccuucgaguacuaccacaccaccgaccccagcuuccuggggcgguacauguccgcccucaaccacacgaagaaguggaaguacccccaggugaacggccugaccagcaucaagugggccgacaacaacugcuaccuggcgaccgcccuccugacccugcagcagaucgagcucaaguucaaccccccggcccugcaggacgccuacuaccgcgcgcgggccggggaggccgccaacuucugcgcccugauccucgcguacugcaacaagacggugggcgagcugggcgacguccgcgagaccauguccuaccuguuccagcacgccaaccucgacagcugcaagcgggugcugaacgucgugugcaagaccugcgggcagcagcagaccacccugaagggcguggaggccgucauguacauggggacgcucuccuacgagcaguucaagaagggcgugcagauccccugcaccugcgggaagcaggugaccaaguaccugguccagcaggagagccccuucgugaugauguccgcccccccggcccaguacgagcugaagcacggcaccuucacgugcgcgagcgaguacaccggcaacuaccagugcgggcacuacaagcacaucaccuccaaggagacccucuacugcaucgacggcgcccugcugacgaagagcagcgaguacaaggggcccaucaccgacguguucuacaaggagaacuccuacaccaccacgaucaagcccgucaccuacaagcucgacggcguggugugcaccgagaucgaccccaagcuggacaacuacuacaagaaggacaacagcuacuucaccgagcagccgaucgaccugguccccaaccagcccuaccccaacgccuccuucgacaacuucaaguucgugugcgacaacaucaaguucgccgacgaccucaaccagcugacgggguacaagaagccggccagccgcgagcugaaggugaccuucuuccccgaccucaacggcgacgucguggcgaucgacuacaagcacuacacccccuccuucaagaagggcgccaagcugcugcacaagcccaucguguggcacgucaacaacgccaccaacaaggccacguacaagccgaacaccuggugcauccggugccucuggagcaccaagcccguggagaccuccaacagcuucgacgugcugaaguccgaggacgcgcaggggauggacaaccuggccugcgaggaccucaagcccgucagcgaggaggugguggagaaccccacgauccagaaggacguccuggagugcaacgugaagaccaccgagguggucggcgacaucauccugaagccggccaacaacucccucaagaucaccgaggagguggggcacacggaccugauggccgccuacguggacaacagcucccugaccaucaagaagcccaacgagcucagccgcguccugggccugaagacccucgcgacccacgggcuggccgccgugaacuccgugcccugggacacgaucgccaacuacgccaagccguuccugaacaaggucgugagcaccaccaccaacaucgugacgcgcugccucaaccgggucugcaccaacuacaugcccuacuucuucacccugcugcuccagcugugcaccuucacccgcuccacgaacagccggaucaaggcguccaugcccaccaccaucgccaagaacaccgugaagagcgugggcaaguucugccuggaggccagcuucaacuaccucaagucccccaacuucagcaagcugaucaacaucaucaucugguuccugcuccuguccgucugccugggcagccucaucuacuccacggccgcccugggggugcugaugagcaaccucggcaugccguccuacugcaccggguaccgcgagggcuaccugaacagcaccaacgugaccaucgcgacguacugcaccggcuccauccccugcagcgucugccuguccgggcucgacagccuggacaccuaccccucccuggagaccauccagaucacgaucagcuccuucaagugggaccucaccgccuucggccugguggccgagugguuccuggccuacauccucuucacccgguucuucuacgugcuggggcuggccgcgaucaugcagcucuucuucagcuacuucgccguccacuucaucuccaacagcuggcugauguggcugaucaucaaccuggugcagauggcccccaucuccgccauggugcgcauguacaucuucuucgcgagcuucuacuacgucuggaagagcuacgugcacguggucgacggcugcaacuccagcaccugcaugaugugcuacaagcggaaccgcgccacgcggguggagugcaccaccaucgucaacggggugcgccgguccuucuacguguacgccaacggcggcaagggguucugcaagcuccacaacuggaacugcgucaacugcgacaccuucugcgccggcagcacguucaucuccgacgagguggcccgcgaccugagccugcaguucaagcggccgaucaaccccaccgaccaguccagcuacaucguggacuccgucaccgugaagaacgggagcauccaccucuacuucgacaaggcgggccagaagaccuacgagcgccacucccugagccacuucgugaaccuggacaaccuccgggccaacaacacgaaggggucccugcccaucaacgucaucguguucgacggcaagagcaagugcgaggaguccagcgccaaguccgccagcguguacuacucccagcugaugugccagcccauccuccugcuggaccaggcccucgucagcgacgugggcgacagcgcggagguggccgucaagauguucgacgccuacgugaacaccuucuccagcaccuucaacgugccgauggagaagcugaagacccuggucgccacggccgaggcggagcucgccaagaacgugucccuggacaacgugcugagcaccuucaucuccgccgcccgccagggguucgucgacagcgacguggagaccaaggacguggucgagugccucaagcugucccaccagagcgacaucgaggugaccggcgacuccugcaacaacuacaugcugacguacaacaagguggagaacaugaccccccgggaccucggggcgugcaucgacugcagcgcccgccacaucaacgcccaggucgccaagucccacaacaucgcccugaucuggaacgugaaggacuucaugagccuguccgagcagcuccggaagcagauccgcagcgcggccaagaagaacaaccugcccuucaagcugaccugcgccaccacgcgccagguggucaacguggugaccaccaagaucgcccucaagggcgggugaggacuagucccuguucccagagcccacuuuuuuuucuuuuuuugaaauaaaauagccugucuuucagaucucaaaggcucuuuucagagccaccaaaaaaaaaaaaaaaaaaaaaaaaaaaaaaaaaaaaaaaaaaaaaaaaaaaaaaaaaaaaaaaaaaaaaaaaaaaaaaaaaaaaaaaaaaaaaaaaaaaaa

SEQ ID NO: 19654 - RNA, 6113 nt, Artificial Sequence
  SARS-CoV-2__MT831301.1__non-structural protein 3 (NSP3) mRNA gc
aggagagucccgcagucggcguccagcggcucugcuuguucgugugugugucguugcaggccuuauucaagcuuaccauggcccccaccaaggugaccuucggcgacgacacggucaucgaggugcagggguacaagagcgugaacaucaccuucgagcuggacgagcgcaucgacaagguccucaacgagaagugcuccgccuacaccguggagcugggcaccgaggugaacgaguucgcgugcgucguggccgacgccgugaucaagacgcugcagccggucagcgagcuccugaccccccuggggaucgaccucgacgagugguccauggccaccuacuaccuguucgacgagagcggcgaguucaagcuggccucccacauguacugcagcuucuacccccccgacgaggacgaggaggagggggacugcgaggaggaggaguucgagccguccacccaguacgaguacggcacggaggacgacuaccagggcaagccccucgaguucggggcgaccagcgccgcccugcagcccgaggaggagcaggaggaggacuggcuggacgacgacucccagcagaccgugggccagcaggacgggagcgaggacaaccagaccacgaccauccagaccaucguggagguccagccccagcucgagauggagcugaccccgguggugcagacgaucgaggucaacuccuucagcggcuaccugaagcucaccgacaacguguacaucaagaacgccgacaucguggaggaggcgaagaaggucaagcccaccgugguggucaacgccgccaacguguaccugaagcacgggggcggcguggccggggcccugaacaaggcgaccaacaacgccaugcaggucgaguccgacgacuacaucgccacgaacggcccccucaagguggggggcagcugcguccuguccggccacaaccuggccaagcacugccuccacgugguggggcccaacgucaacaagggcgaggacauccagcugcugaagagcgccuacgagaacuucaaccagcacgaggugcuccuggcgccgcugcucuccgccgggaucuucggcgccgaccccauccacagccugcgggugugcgucgacaccgugcgcaccaacguguaccuggccgucuucgacaagaaccucuacgacaagcugguguccagcuuccuggagaugaagagcgagaagcagguggagcagaagaucgccgagauccccaaggaggaggucaagcccuucaucaccgaguccaagccgagcguggagcagcggaagcaggacgacaagaagaucaaggcgugcguggaggaggucacgaccacccucgaggagaccaaguuccugacggagaaccugcuccuguacaucgacaucaacgggaaccugcaccccgacuccgccacccucgugagcgacaucgacaucaccuuccugaagaaggacgcccccuacaucgugggcgacgucgugcaggagggcgugcugaccgccgucgugauccccacgaagaaggccgggggcaccaccgagaugcucgcgaaggcccugcgcaaggugccgaccgacaacuacaucacgaccuaccccgggcagggccugaacggguacaccgucgaggaggccaagaccgugcucaagaagugcaaguccgccuucuacauccugcccagcaucaucuccaacgagaagcaggagauccugggcaccgugagcuggaaccuccgggagaugcuggcgcacgccgaggagacgcgcaagcugaugcccgucugcguggagaccaaggccaucguguccaccauccagcggaaguacaagggcaucaagauccaggagggggucguggacuacggcgcccgcuucuacuucuacaccagcaagacgaccguggccucccugaucaacacccucaacgaccugaacgagacccuggucacgaugccgcucggguacgugacccacggccugaaccuggaggaggcggcccgguacaugcgcagccucaaggugcccgccaccgucuccgugagcucccccgacgccgugaccgccuacaacggguaccugacgagcuccagcaagacccccgaggagcacuucaucgagaccaucucccuggcgggcagcuacaaggacuggagcuacuccggccagagcacccagcucgggaucgaguuccugaagcggggcgacaaguccgucuacuacacgagcaacccgaccaccuuccaccuggacggggaggugaucaccuucgacaaccucaagacgcugcugucccuccgcgaggugcggaccaucaaggucuucaccaccguggacaacaucaaccugcacacgcagguggucgacaugagcaugaccuacggccagcaguucggccccaccuaccuggacggggccgacgugaccaagaucaagccccacaacucccacgagggcaagacguucuacgugcucccgaacgacgacacccugcgcgucgaggccuucgaguacuaccacaccaccgaccccagcuuccuggggcgguacauguccgcccucaaccacacgaagaaguggaaguacccccaggugaacggccugaccagcaucaagugggccgacaacaacugcuaccuggcgaccgcccuccugacccugcagcagaucgagcucaaguucaaccccccggcccugcaggacgccuacuaccgcgcgcgggccggggaggccgccaacuucugcgcccugauccucgcguacugcaacaagacggugggcgagcugggcgacguccgcgagaccauguccuaccuguuccagcacgccaaccucgacagcugcaagcgggugcugaacgucgugugcaagaccugcgggcagcagcagaccacccugaagggcguggaggccgucauguacauggggacgcucuccuacgagcaguucaagaagggcgugcagauccccugcaccugcgggaagcaggccaccaaguaccuggugcagcaggagagccccuucgucaugauguccgcccccccggcgcaguacgagcugaagcacggcaccuucacgugcgccagcgaguacaccggcaacuaccagugcgggcacuacaagcacaucaccuccaaggagacccucuacugcaucgacggcgcccugcugacgaagagcagcgaguacaaggggcccaucaccgacguguucuacaaggagaacuccuacaccaccacgaucaagcccgugaccuacaagcucgacggcgucgugugcaccgagaucgaccccaagcuggacaacuacuacaagaaggacaacagcuacuucaccgagcagccgaucgaccuggugcccaaccagcccuaccccaacgccuccuucgacaacuucaaguucgucugcgacaacaucaaguucgccgacgaccucaaccagcugacgggguacaagaagccggcgagccgcgagcugaaggugaccuucuuccccgaccucaacggcgacguggucgccaucgacuacaagcacuacacccccuccuucaagaagggcgccaagcugcugcacaagcccaucguguggcacgugaacaacgccaccaacaaggcgacguacaagccgaacaccuggugcauccggugccucuggagcaccaagcccgucgagaccuccaacagcuucgacgugcugaaguccgaggacgcccaggggauggacaaccuggccugcgaggaccucaagcccgugagcgaggaggucguggagaaccccacgauccagaaggacgugcuggagugcaacgucaagaccaccgagguggugggcgacaucauccugaagccggccaacaacucccucaagaucaccgaggaggucgggcacacggaccugauggccgcguacguggacaacagcucccugaccaucaagaagcccaacgagcucagccgcgugcugggccugaagacccucgccacccacgggcuggccgccgucaacuccgugcccugggacacgaucgccaacuacgcgaagccguuccugaacaagguggucagcaccaccaccaacaucgugacgcgcugccucaaccgggugugcaccaacuacaugcccuacuucuucacccugcugcuccagcugugcaccuucacccgcuccacgaacagccggaucaaggccuccaugcccaccaccaucgccaagaacaccgucaagagcgugggcaaguucugccuggaggccagcuucaacuaccucaagucccccaacuucagcaagcugaucaacaucaucaucugguuccugcuccuguccgugugccugggcagccucaucuacuccacggccgcgcuggggguccugaugagcaaccucggcaugccguccuacugcaccggguaccgcgagggcuaccugaacagcaccaacgugaccaucgccacguacugcaccggcuccauccccugcagcgugugccuguccgggcucgacagccuggacaccuaccccucccuggagaccauccagaucacgaucagcuccuucaagugggaccucaccgccuucggccuggucgccgagugguuccuggccuacauccucuucacccgguucuucuacgugcuggggcuggcggccaucaugcagcucuucuucagcuacuucgccgugcacuucaucuccaacagcuggcugauguggcugaucaucaaccugguccagauggcccccaucuccgcgauggugcgcauguacaucuucuucgccagcuucuacuacguguggaagagcuacguccacgugguggacggcugcaacuccagcaccugcaugaugugcuacaagcggaaccgcgccacgcgggucgagugcaccaccaucgugaacgggguccgccgguccuucuacguguacgccaacggcggcaagggguucugcaagcuccacaacuggaacugcgugaacugcgacaccuucugcgccggcagcacguucaucuccgacgaggucgcgcgcgaccugagccugcaguucaagcggccgaucaaccccaccgaccaguccagcuacaucguggacuccgugaccgucaagaacgggagcauccaccucuacuucgacaaggccggccagaagaccuacgagcgccacucccugagccacuucgugaaccuggacaaccuccgggccaacaacacgaaggggucccugcccaucaacgugaucgucuucgacggcaagagcaagugcgaggaguccagcgccaaguccgccagcguguacuacucccagcugaugugccagcccauccuccugcuggaccaggcgcucgugagcgacgucggcgacagcgccgagguggccgugaagauguucgacgccuacgucaacaccuucuccagcaccuucaacgugccgauggagaagcugaagacccugguggccacggcggaggccgagcucgccaagaacgucucccuggacaacgugcugagcaacuucaucuccgccgcgcgccagggguucguggacagcgacgucgagaccaaggacgugguggagugccucaagcugucccaccagagcgacaucgaggucaccggcgacuccugcaacaacuacaugcugaccuacaacaagguggagaacaugacgccccgggaccucggggccugcaucgacugcagcgcccgccacaucaacgcccagguggccaagucccacaacaucgcgcugaucuggaacgucaaggacuucaugagccuguccgagcagcuccggaagcagauccgcagcgccgccaagaagaacaaccugcccuucaagcugaccugcgccaccacccgccagguggugaacgucgugacgaccaagaucgcccucaagggcgggugaggacuagucccuguucccagagcccacuuuuuuuucuuuuuuugaaauaaaauagccugucuuucagaucucaaaggcucuuuucagagccaccaaaaaaaaaaaaaaaaaaaaaaaaaaaaaaaaaaaaaaaaaaaaaaaaaaaaaaaaaaaaaaaaaaaaaaaaaaaaaaaaaaaaaaaaaaaaaaaaaaaaa

SEQ ID NO: 19655 - RNA, 6113 nt, Artificial Sequence
  SARS-CoV-2__MT831340.1__non-structural protein 3 (NSP3) mRNA gc
aggagagucccgcagucggcguccagcggcucugcuuguucgugugugugucguugcaggccuuauucaagcuuaccauggcccccaccaaggugaccuucggcgacgacacggucaucgaggugcagggguacaagagcgugaacaucaccuucgagcuggacgagcgcaucgacaagguccucaacgagaagugcuccgccuacaccguggagcugggcaccgaggugaacgaguucgcgugcgucguggccgacgccgugaucaagacgcugcagccggucagcgagcuccugaccccccuggggaucgaccucgacgagugguccauggccaccuacuaccuguucgacgagagcggcgaguucaagcuggccucccacauguacugcagcuucuacccccccgacgaggacgaggaggagggggacugcgaggaggaggaguucgagccguccacccaguacgaguacggcacggaggacgacuaccagggcaagccccucgaguucggggcgaccagcgccgcccugcagcccgaggaggagcaggaggaggacuggcuggacgacgacucccagcagaccgugggccagcaggacgggagcgaggacaaccagaccacgaccauccagaccaucguggagguccagccccagcucgagauggagcugaccccgguggugcagacgaucgaggucaacaucuucuccggcuaccugaagcucaccgacaacguguacaucaagaacgccgacaucguggaggaggcgaagaaggucaagcccaccgugguggucaacgccgccaacguguaccugaagcacgggggcggcguggccggggcccugaacaaggcgaccaacaacgccaugcaggucgagagcgacgacuacaucgccacgaacggcccccucaagguggggggcuccugcguccugagcggccacaaccuggccaagcacugccuccacgugguggggcccaacgucaacaagggcgaggacauccagcugcugaaguccgccuacgagaacuucaaccagcacgaggugcuccuggcgccgcugcucagcgccgggaucuucggcgccgaccccauccacucccugcgggugugcgucgacaccgugcgcaccaacguguaccuggccgucuucgacaagaaccucuacgacaagcuggugagcuccuuccuggagaugaagagcgagaagcagguggagcagaagaucgccgagauccccaaggaggaggucaagcccuucaucaccgagagcaagccguccguggagcagcggaagcaggacgacaagaagaucaaggcgugcguggaggaggucacgaccacccucgaggagaccaaguuccugacggagaaccugcuccuguacaucgacaucaacgggaaccugcaccccgacagcgccacccucguguccgacaucgacaucaccuuccugaagaaggacgcccccuacaucgugggcgacgucgugcaggagggcgugcugaccgccgucgugauccccacgaagaaggccgggggcaccaccgagaugcucgcgaaggcccugcgcaaggugccgaccgacaacuacaucacgaccuaccccgggcagggccugaacggguacaccgucgaggaggccaagaccgugcucaagaagugcaagagcgccuucuacauccugcccuccaucaucagcaacgagaagcaggagauccugggcaccguguccuggaaccuccgggagaugcuggcgcacgccgaggagacgcgcaagcugaugcccgucugcguggagaccaaggccaucgugagcaccauccagcggaaguacaagggcaucaagauccaggagggggucguggacuacggcgcccgcuucuacuucuacaccuccaagacgaccguggccagccugaucaacacccucaacgaccugaacgagacccuggucacgaugccgcucggguacgugacccacggccugaaccuggaggaggcggcccgguacaugcgcucccucaaggugcccgccaccgucagcguguccagccccgacgccgugaccgccuacaacggguaccugacguccagcuccaagacccccgaggagcacuucaucgagaccaucagccuggcgggcuccuacaaggacuggagcuacagcggccaguccacccagcucgggaucgaguuccugaagcggggcgacaagagcgucuacuacacguccaacccgaccaccuuccaccuggacggggaggugaucaccuucgacaaccucaagacgcugcugagccuccgcgaggugcggaccaucaaggucuucaccaccguggacaacaucaaccugcacacgcagguggucgacauguccaugaccuacggccagcaguucggccccaccuaccuggacggggccgacgugaccaagaucaagccccacaacagccacgagggcaagacguucuacgugcucccgaacgacgacacccugcgcgucgaggccuucgaguacuaccacaccaccgaccccuccuuccuggggcgguacaugagcgcccucaaccacacgaagaaguggaaguacccccaggugaacggccugaccuccaucaagugggccgacaacaacugcuaccuggcgaccgcccuccugacccugcagcagaucgagcucaaguucaaccccccggcccugcaggacgccuacuaccgcgcgcgggccggggaggccgccaacuucugcgcccugauccucgcguacugcaacaagacggugggcgagcugggcgacguccgcgagaccaugagcuaccuguuccagcacgccaaccucgacuccugcaagcgggugcugaacgucgugugcaagaccugcgggcagcagcagaccacccugaagggcguggaggccgucauguacauggggacgcucagcuacgagcaguucaagaagggcgugcagauccccugcaccugcgggaagcaggccaccaaguaccuggugcagcaggagucccccuucgucaugaugagcgcccccccggcgcaguacgagcugaagcacggcaccuucacgugcgccuccgaguacaccggcaacuaccagugcgggcacuacaagcacaucaccagcaaggagacccucuacugcaucgacggcgcccugcugacgaaguccagcgaguacaaggggcccaucaccgacguguucuacaaggagaacagcuacaccaccacgaucaagcccgugaccuacaagcucgacggcgucgugugcaccgagaucgaccccaagcuggacaacuacuacaagaaggacaacuccuacuucaccgagcagccgaucgaccuggugcccaaccagcccuaccccaacgccagcuucgacaacuucaaguucgucugcgacaacaucaaguucgccgacgaccucaaccagcugacgggguacaagaagccggcgucccgcgagcugaaggugaccuucuuccccgaccucaacggcgacguggucgccaucgacuacaagcacuacacccccagcuucaagaagggcgccaagcugcugcacaagcccaucguguggcacgugaacaacgccaccaacaaggcgacguacaagccgaacaccuggugcauccggugccucugguccaccaagcccgucgagaccagcaacuccuucgacgugcugaagagcgaggacgcccaggggauggacaaccuggccugcgaggaccucaagcccguguccgaggaggucguggagaaccccacgauccagaaggacgugcuggagugcaacgucaagaccaccgagguggugggcgacaucauccugaagccggccaacaacagccucaagaucaccgaggaggucgggcacacggaccugauggccgcguacguggacaacuccagccugaccaucaagaagcccaacgagcucucccgcgugcugggccugaagacccucgccacccacgggcuggccgccgucaacagcgugcccugggacacgaucgccaacuacgcgaagccguuccugaacaagguggucuccaccaccaccaacaucgugacgcgcugccucaaccgggugugcaccaacuacaugcccuacuucuucacccugcugcuccagcugugcaccuucacccgcagcacgaacucccggaucaaggccagcaugcccaccaccaucgccaagaacaccgucaaguccgugggcaaguucugccuggaggccagcuucaacuaccucaagagccccaacuucuccaagcugaucaacaucaucaucugguuccugcuccugagcgugugccugggcucccucaucuacagcacggccgcgcuggggguccugauguccaaccucggcaugccgagcuacugcaccggguaccgcgagggcuaccugaacuccaccaacgugaccaucgccacguacugcaccggcagcauccccugcuccgugugccugagcgggcucgacucccuggacaccuaccccagccuggagaccauccagaucacgaucuccagcuucaagugggaccucaccgccuucggccuggucgccgagugguuccuggccuacauccucuucacccgguucuucuacgugcuggggcuggcggccaucaugcagcucuucuucuccuacuucgccgugcacuucaucagcaacuccuggcugauguggcugaucaucaaccugguccagauggcccccaucagcgcgauggugcgcauguacaucuucuucgccuccuucuacuacguguggaagagcuacguccacgugguggacggcugcaacagcuccaccugcaugaugugcuacaagcggaaccgcgccacgcgggucgagugcaccaccaucgugaacgggguccgccggagcuucuacguguacgccaacggcggcaagggguucugcaagcuccacaacuggaacugcgugaacugcgacaccuucugcgccggcuccacguucaucagcgacgaggucgcgcgcgaccugucccugcaguucaagcggccgaucaaccccaccgaccagagcuccuacaucguggacagcgugaccgucaagaacggguccauccaccucuacuucgacaaggccggccagaagaccuacgagcgccacagccugucccacuucgugaaccuggacaaccuccgggccaacaacacgaaggggagccugcccaucaacgugaucgucuucgacggcaaguccaagugcgaggagagcuccgccaagagcgccuccguguacuacagccagcugaugugccagcccauccuccugcuggaccaggcgcucguguccgacgucggcgacagcgccgagguggccgugaagauguucgacgccuacgucaacaccuucagcuccaccuucaacgugccgauggagaagcugaagacccugguggccacggcggaggccgagcucgccaagaacgucagccuggacaacgugcuguccaccuucaucagcgccgcgcgccagggguucguggacuccgacgucgagaccaaggacgugguggagugccucaagcugagccaccaguccgacaucgaggucaccggcgacagcugcaacaacuacaugcugacguacaacaagguggagaacaugaccccccgggaccucggggccugcaucgacugcuccgcccgccacaucaacgcccagguggccaagagccacaacaucgcgcugaucuggaacgucaaggacuucaugucccugagcgagcagcuccggaagcagauccgcuccgccgccaagaagaacaaccugcccuucaagcugaccugcgccaccacgcgccagguggugaacgucgugaccaccaagaucgcccucaagggcgggugaggacuagucccuguucccagagcccacuuuuuuuucuuuuuuugaaauaaaauagccugucuuucagaucucaaaggcucuuuucagagccaccaaaaaaaaaaaaaaaaaaaaaaaaaaaaaaaaaaaaaaaaaaaaaaaaaaaaaaaaaaaaaaaaaaaaaaaaaaaaaaaaaaaaaaaaaaaaaaaaaaaaa

SEQ ID NO: 19656 - RNA, 6113 nt, Artificial Sequence
  SARS-CoV-2__MT831347.1__non-structural protein 3 (NSP3) mRNA gc
aggagagucccgcagucggcguccagcggcucugcuuguucgugugugugucguugcaggccuuauucaagcuuaccauggcccccaccaaggugaccuucggcgacgacacggucaucgaggugcagggguacaagagcgugaacaucaccuucgagcuggacgagcgcaucgacaagguccucaacgagaagugcuccgccuacaccguggagcugggcaccgaggugaacgaguucgcgugcgucguggccgacgccgugaucaagacgcugcagccggucagcgagcuccugaccccccuggggaucgaccucgacgagugguccauggccaccuacuaccuguucgacgagagcggcgaguucaagcuggccucccacauguacugcagcuucuacccccccgacgaggacgaggaggagggggacugcgaggaggaggaguucgagccguccacccaguacgaguacggcacggaggacgacuaccagggcaagccccucgaguucggggcgaccagcgccgcccugcagcccgaggaggagcaggaggaggacuggcuggacgacgacucccagcagaccgugggccagcaggacgggagcgaggacaaccagaccacgaccauccagaccaucguggagguccagccccagcucgagauggagcugaccccgguggugcagacgaucgaggucaacuccuucagcggcuaccugaagcucaccgacaacguguacaucaagaacgccgacaucguggaggaggcgaagaaggucaagcccaccgugguggucaacgccgccaacguguaccugaagcacgggggcggcguggccggggcccugaacaaggcgaccaacaacgccaugcaggucgaguccgacgacuacaucgccacgaacggcccccucaagguggggggcagcugcguccuguccggccacaaccuggccaagcacugccuccacgugguggggcccaacgucaacaagggcgaggacauccagcugcugaagagcgccuacgagaacuucaaccagcacgaggugcuccuggcgccgcugcucuccgccgggaucuucggcgccgaccccauccacagccugcgggugugcgucgacaccgugcgcaccaacguguaccuggccgucuucgacaagaaccucuacgacaagcugguguccagcuuccuggagaugaagagcgagaagcagguggagcagaagaucgccgagauccccaaggaggaggucaagcccuucaucaccgaguccaagccgagcguggagcagcggaagcaggacgacaagaagaucaaggcgugcguggaggaggucacgaccacccucgaggagaccaaguuccugacggagaaccugcuccuguacaucgacaucaacgggaaccugcaccccgacuccgccacccucgugagcgacaucgacaucaccuuccugaagaaggacgcccccuacaucgugggcgacgucgugcaggagggcgugcugaccgccgucgugauccccacgaagaaggccgggggcaccaccgagaugcucgcgaaggcccugcgcaaggugccgaccgacaacuacaucacgaccuaccccgggcagggccugaacggguacaccgucgaggaggccaagaccgugcucaagaagugcaaguccgccuucuacauccugcccagcaucaucuccaacgagaagcaggagauccugggcaccgugagcuggaaccuccgggagaugcuggcgcacgccgaggagacgcgcaagcugaugcccgucugcguggagaccaaggccaucguguccaccauccagcggaaguacaagggcaucaagauccaggagggggucguggacuacggcgcccgcuucuacuucuacaccagcaagacgaccguggccucccugaucaacacccucaacgaccugaacgagacccuggucacgaugccgcucggguacgugacccacggccugaaccuggaggaggcggcccgguacaugcgcagccucaaggugcccgccaccgucuccgugagcucccccgacgccgugaccgccuacaacggguaccugacgagcuccagcaagacccccgaggagcacuucaucgagaccaucucccuggcgggcagcuacaaggacuggagcuacuccggccagagcacccagcucgggaucgaguuccugaagcggggcgacaaguccgucuacuacacgagcaacccgaccaccuuccaccuggacggggaggugaucaccuucgacaaccucaagacgcugcugucccuccgcgaggugcggaccaucaaggucuucaccaccguggacaacaucaaccugcacacgcagguggucgacaugagcaugaccuacggccagcaguucggccccaccuaccuggacggggccgacgugaccaagaucaagccccacaacucccacgagggcaagacguucuacgugcucccgaacgacgacacccugcgcgucgaggccuucgaguacuaccacaccaccgaccccagcuuccuggggcgguacauguccgcccucaaccacacgaagaaguggaaguacccccaggugaacggccugaccagcaucaagugggccgacaacaacugcuaccuggcgaccgcccuccugacccugcagcagaucgagcucaaguucaaccccccggcccugcaggacgccuacuaccgcgcgcgggccggggaggccgccaacuucugcgcccugauccucgcguacugcaacaagacggugggcgagcugggcgacguccgcgagaccauguccuaccuguuccagcacgccaaccucgacagcugcaagcgggugcugaacgucgugugcaagaccugcgggcagcagcagaccacccugaagggcguggaggccgucauguacauggggacgcucuccuacgagcaguucaagaagggcgugcagauccccugcaccugcgggaagcaggccaccaaguaccuggugcagcaggagagccccuucgucaugauguccgcccccccggcgcaguacgagcugaagcacggcaccuucacgugcgccagcgaguacaccggcaacuaccagugcgggcacuacaagcacaucaccuccaaggagacccucuacugcaucgacggcgcccugcugacgaagagcagcgaguacaaggggcccaucaccgacguguucuacaaggagaacuccuacaccaccacgaucaagcccgugaccuacaagcucgacggcgucgugugcaccgagaucgaccccaagcuggacaacuacuacaagaaggacaacagcuacuucaccgagcagccgaucgaccuggugcccaaccagcccuaccccaacgccuccuucgacaacuucaaguucgucugcgacaacaucaaguucgccgacgaccucaaccagcugacgggguacaagaagccggcgagccgcgagcugaaggugaccuucuuccccgaccucaacggcgacguggucgccaucgacuacaagcacuacacccccuccuucaagaagggcgccaagcugcugcacaagcccaucguguggcacgugaacaacgccaccaacaaggcgacguacaagccgaacaccuggugcauccggugccucuggagcaccaagcccgucgagaccuccaacagcuucgacgugcugaaguccgaggacgcccaggggauggacaaccuggccugcgaggaccucaagcccgugagcgaggaggucguggagaaccccacgauccagaaggacgugcuggagugcaacgucaagaccaccgagguggugggcgacaucauccugaagccggccaacaacucccucaagaucaccgaggaggucgggcacacggaccugauggccgcguacguggacaacagcucccugaccaucaagaagcccaacgagcucagccgcgugcugggccugaagacccucgccacccacgggcuggccgccgucaacuccgugcccugggacacgaucgccaacuacgcgaagccguuccugaacaagguggucagcaccaccaccaacaucgugacgcgcugccucaaccgggugugcaccaacuacaugcccuacuucuucacccugcugcuccagcugugcaccuucacccgcuccacgaacagccggaucaaggccuccaugcccaccaccaucgccaagaacaccgucaagagcgugggcaaguucugccuggaggccagcuucaacuaccucaagucccccaacuucagcaagcugaucaacaucaucaucugguuccugcuccuguccgugugccugggcagccucaucuacuccacggccgcgcuggggguccugaugagcaaccucggcaugccguccuacugcaccggguaccgcgagggcuaccugaacagcaccaacgugaccaucgccacguacugcaccggcuccauccccugcagcgugugccuguccgggcucgacagccuggacaccuaccccucccuggagaccauccagaucacgaucagcuccuucaagugggaccucaccgccuucggccuggucgccgagugguuccuggccuacauccucuucacccgguucuucuacgugcuggggcuggcggccaucaugcagcucuucuucagcuacuucgccgugcacuucaucuccaacagcuggcugauguggcugaucaucaaccugguccagauggcccccaucuccgcgauggugcgcauguacaucuucuucgugagcuucuacuacgucuggaagagcuacgugcacguggucgacggcugcaacuccagcaccugcaugaugugcuacaagcggaaccgcgccacgcggguggagugcaccaccaucgucaacggggugcgccgguccuucuacguguacgccaacggcggcaagggguucugcaagcuccacaacuggaacugcgucaacugcgacaccuucugcgccggcagcacguucaucuccgacgagguggcccgcgaccugagccugcaguucaagcggccgaucaaccccaccgaccaguccagcuacaucguggacuccgucaccgugaagaacgggagcauccaccucuacuucgacaaggcgggccagaagaccuacgagcgccacucccugagccacuucgugaaccuggacaaccuccgggccaacaacacgaaggggucccugcccaucaacgucaucguguucgacggcaagagcaagugcgaggaguccagcgccaaguccgccagcguguacuacucccagcugaugugccagcccauccuccugcuggaccaggcccucgucagcgacgugggcgacagcgcggagguggccgucaagauguucgacgccuacgugaacaccuucuccagcaccuucaacgugccgauggagaagcugaagacccuggucgccacggccgaggcggagcucgccaagaacgugucccuggacaacgugcugagcaccuucaucuccgccgcccgccagggguucgucgacagcgacguggagaccaaggacguggucgagugccucaagcugucccaccagagcgacaucgaggugaccggcgacuccugcaacaacuacaugcugacguacaacaagguggagaacaugaccccccgggaccucggggcgugcaucgacugcagcgcccgccacaucaacgcccaggucgccaagucccacaacaucgcccugaucuggaacgugaaggacuucaugagccuguccgagcagcuccggaagcagauccgcagcgcggccaagaagaacaaccugcccuucaagcugaccugcgccaccacgcgccagguggucaacguggugaccaccaagaucgcccucaagggcgggugaggacuagucccuguucccagagcccacuuuuuuuucuuuuuuugaaauaaaauagccugucuuucagaucucaaaggcucuuuucagagccaccaaaaaaaaaaaaaaaaaaaaaaaaaaaaaaaaaaaaaaaaaaaaaaaaaaaaaaaaaaaaaaaaaaaaaaaaaaaaaaaaaaaaaaaaaaaaaaaaaaaaa

SEQ ID NO: 19657 - RNA, 6113 nt, Artificial Sequence
  SARS-CoV-2__MT831353.1__non-structural protein 3 (NSP3) mRNA gc
aggagagucccgcagucggcguccagcggcucugcuuguucgugugugugucguugcaggccuuauucaagcuuaccauggcccccaccaaggugaccuucggcgacgacacggucaucgaggugcagggguacaagagcgugaacaucaccuucgagcuggacgagcgcaucgacaagguccucaacgagaagugcuccgccuacaccguggagcugggcaccgaggugaacgaguucgcgugcgucguggccgacgccgugaucaagacgcugcagccggucagcgagcuccugaccccccuggggaucgaccucgacgagugguccauggccaccuacuaccuguucgacgagagcggcgaguucaagcuggccucccacauguacugcagcuucuacccccccgacgaggacgaggaggagggggacugcgaggaggaggaguucgagccguccacccaguacgaguacggcacggaggacgacuaccagggcaagccccucgaguucggggcgaccagcgccgcccugcagcccgaggaggagcaggaggaggacuggcuggacgacgacucccagcagaccgugggccagcaggacgggagcgaggacaaccagaccacgaccauccagaccaucguggagguccagccccagcucgagauggagcugaccccgguggugcagacgaucgaggucaacuccuucagcggcuaccugaagcucaccgacaacguguacaucaagaacgccgacaucguggaggaggcgaagaaggucaagcccaccgugguggucaacgccgccaacguguaccugaagcacgggggcggcguggccggggcccugaacaaggcgaccaacaacgccaugcaggucgaguccgacgacuacaucgccacgaacggcccccucaagguggggggcagcugcguccuguccggccacaaccuggccaagcacugccuccacgugguggggcccaacgucaacaagggcgaggacauccagcugcugaagagcgccuacgagaacuucaaccagcacgaggugcuccuggcgccgcugcucuccgccgggaucuucggcgccgaccccauccacagccugcgggugugcgucgacaccgugcgcaccaacguguaccuggccgucuucgacaagaaccucuacgacaagcugguguccagcuuccuggagaugaagagcgagaagcagguggagcagaagaucgccgagauccccaaggaggaggucaagcccuucaucaccgaguccaagccgagcguggagcagcggaagcaggacgacaagaagaucaaggcgugcguggaggaggucacgaccacccucgaggagaccaaguuccugacggagaaccugcuccuguacaucgacaucaacgggaaccugcaccccgacuccgccacccucgugagcgacaucgacaucaccuuccugaagaaggacgcccccuacaucgugggcgacgucgugcaggagggcgugcugaccgccgucgugauccccacgaagaaggccgggggcaccaccgagaugcucgcgaaggcccugcgcaaggugccgaccgacaacuacaucacgaccuaccccgggcagggccugaacggguacaccgucgaggaggccaagaccgugcucaagaagugcaaguccgccuucuacauccugcccagcaucaucuccaacgagaagcaggagauccugggcaccgugagcuggaaccuccgggagaugcuggcgcacgccgaggagacgcgcaagcugaugcccgucugcguggagaccaaggccaucguguccaccauccagcggaaguacaagggcaucaagauccaggagggggucguggacuacggcgcccgcuucuacuucuacaccagcaagacgaccguggccucccugaucaacacccucaacgaccugaacgagacccuggucacgaugccgcucggguacgugacccacggccugaaccuggaggaggcggcccgguacaugcgcagccucaaggugcccgccaccgucuccgugagcucccccgacgccgugaccgccuacaacggguaccugacgagcuccagcaagacccccgaggagcacuucaucgagaccaucucccuggcgggcagcuacaaggacuggagcuacuccggccagagcacccagcucgggaucgaguuccugaagcggggcgacaaguccgucuacuacacgagcaacccgaccaccuuccaccuggacggggaggugaucaccuucgacaaccucaagacgcugcugucccuccgcgaggugcggaccaucaaggucuucaccaccguggacaacaucaaccugcacacgcagguggucgacaugagcaugaccuacggccagcaguucggccccaccuaccuggacggggccgacgugaccaagaucaagccccacaacucccacgagggcaagacguucuacgugcucccgaacgacgacacccugcgcgucgaggccuucgaguacuaccacaccaccgaccccagcuuccuggggcgguacauguccgcccucaaccacacgaagaaguggaaguacccccaggugaacggccugaccagcaucaagugggccgacaacaacugcuaccuggcgaccgcccuccugacccugcagcagaucgagcucaaguucaaccccccggcccugcaggacgccuacuaccgcgcgcgggccggggaggccgccaacuucugcgcccugauccucgcguacugcaacaagacggugggcgagcugggcgacguccgcgagaccauguccuaccuguuccagcacgccaaccucgacagcugcaagcgggugcugaacgucgugugcaagaccugcgggcagcagcagaccacccugaagggcguggaggccgucauguacauggggacgcucuccuacgagcaguucaagaagggcgugcagauccccugcaccugcgggaagcaggccaccaaguaccuggugcagcaggagagccccuucgucaugauguccgcccccccggcgcaguacgagcugaagcacggcaccuucacgugcgccagcgaguacaccggcaacuaccagugcgggcacuacaagcacaucaccuccaaggagacccucuacugcaucgacggcgcccugcugacgaagagcagcgaguacaaggggcccaucaccgacguguucuacaaggagaacuccuacaccaccacgaucaagcccgugaccuacaagcucgacggcgucgugugcaccgagaucgaccccaagcuggacaacuacuacaagaaggacaacagcuacuucaccgagcagccgaucgaccuggugcccaaccagcccuaccccaacgccuccuucgacaacuucaaguucgucugcgacaacaucaaguucgccgacgaccucaaccagcugacgggguacaagaagccggcgagccgcgagcugaaggugaccuucuuccccgaccucaacggcgacguggucgccaucgacuacaagcacuacacccccuccuucaagaagggcgccaagcugcugcacaagcccaucguguggcacgugaacaacgccaccaacaaggcgacguacaagccgaacaccuggugcauccggugccucuggagcaccaagcccgucgagaccuccaacagcuucgacgugcugaaguccgaggacgcccaggggauggacaaccuggccugcgaggaccucaagcccgugagcgaggaggucguggagaaccccacgauccagaaggacgugcuggagugcaacgucaagaccaccgagguggugggcgacaucauccugaagccggccaacaacucccucaagaucaccgaggaggucgggcacacggaccugauggccgcguacguggacaacagcucccugaccaucaagaagcccaacgagcucagccgcgugcugggccugaagacccucgccacccacgggcuggccgccgucaacuccgugcccugggacacgaucgccaacuacgcgaagccguuccugaacaagguggucagcaccaccaccaacaucgugacgcgcugccucaaccgggugugcaccaacuacaugcccuacuucuucacccugcugcuccagcugugcaccuucacccgcuccacgaacagccggaucaaggccuccaugcccaccaccaucgccaagaacaccgucaagagcgugggcaaguucugccuggaggccagcuucaacuaccucaagucccccaacuucagcaagcugaucaacaucaucaucugguuccugcuccuguccgugugccugggcagccucaucuacuccacggccgcgcuggggguccugaugagcaaccucggcaugccguccuacugcaccggguaccgcgagggcuaccugaacagcaccaacgugaccaucgccacguacugcaccggcuccauccccugcagcgugugccuguccgggcucgacagccuggacaccuaccccucccuggagaccauccagaucacgaucagcuccuucaagugggaccucaccgccuucggccuggucgccgagugguuccuggccuacauccucuucacccgguucuucuacgugcuggggcuggcggccaucaugcagcucuucuucagcuacuucgccgugcacuucaucuccaacagcuggcugauguggcugaucaucaaccugguccagauggcccccaucuccgcgauggugcgcauguacaucuucuucgccagcuucuacuacguguggaagagcuacguccacgugguggacggcugcaacuccagcaccugcaugaugugcuacaagcggaaccgcgccacgcgggucgagugcaccaccaucgugaacgggguccgccgguccuucuacguguacgccaacggcggcaagggguucugcaagcuccacaacuggaacugcgugaacugcgacaccuucugcgccggcagcacguucaucuccgacgaggucgcgcgcgaccugagccugcaguucaagcggccgaucaaccccaccgaccaguccagcuacaucguggacuccgugaccgucaagaacgggagcauccaccucuacuucgacaaggccggccagaagaccuacgagcgccacucccugagccacuucgugaaccuggacaaccuccgggccaacaacacgaaggggucccugcccaucaacgugaucgucuucgacggcaagagcaagugcgaggaguccagcgccaaguccgccagcguguacuacucccagcugaugugccagcccauccuccugcuggaccaggcgcucgugagcgacgucggcgacagcgccgagguggccgugaagauguucgacgccuacgucaacaccuucuccagcaccuucaacgugccgauggagaagcugaagacccugguggccacggcggaggccgagcucgccaagaacgucucccuggacaacgugcugagcaccuucaucuccgccgugcgccagggguucgucgacagcgacguggagaccaaggacguggucgagugccucaagcugucccaccagagcgacaucgaggugaccggcgacuccugcaacaacuacaugcugacguacaacaagguggagaacaugaccccccgggaccucggggcgugcaucgacugcagcgcccgccacaucaacgcccaggucgccaagucccacaacaucgcccugaucuggaacgugaaggacuucaugagccuguccgagcagcuccggaagcagauccgcagcgcggccaagaagaacaaccugcccuucaagcugaccugcgccaccacgcgccagguggucaacguggugaccaccaagaucgcccucaagggcgggugaggacuagucccuguucccagagcccacuuuuuuuucuuuuuuugaaauaaaauagccugucuuucagaucucaaaggcucuuuucagagccaccaaaaaaaaaaaaaaaaaaaaaaaaaaaaaaaaaaaaaaaaaaaaaaaaaaaaaaaaaaaaaaaaaaaaaaaaaaaaaaaaaaaaaaaaaaaaaaaaaaaaa

SEQ ID NO: 19658 - RNA, 6113 nt, Artificial Sequence
  SARS-CoV-2__MT831405.1__non-structural protein 3 (NSP3) mRNA gc
aggagagucccgcagucggcguccagcggcucugcuuguucgugugugugucguugcaggccuuauucaagcuuaccauggcccccaccaaggugaccuucggcgacgacacggucaucgaggugcagggguacaagagcgugaacaucaccuucgagcuggacgagcgcaucgacaagguccucaacgagaagugcuccgccuacaccguggagcugggcaccgaggugaacgaguucgcgugcgucguggccgacgccgugaucaagacgcugcagccggucagcgagcuccugaccccccuggggaucgaccucgacgagugguccauggccaccuacuaccuguucgacgagagcggcgaguucaagcuggccucccacauguacugcagcuucuacccccccgacgaggacgaggaggagggggacugcgaggaggaggaguucgagccguccacccaguacgaguacggcacggaggacgacuaccagggcaagccccucgaguucggggcgaccagcgccgcccugcagcccgaggaggagcaggaggaggacuggcuggacgacgacucccagcagaccgugggccagcaggacgggagcgaggacaaccagaccacgaccauccagaccaucguggagguccagccccagcucgagauggagcugaccccgguggugcagacgaucgaggucaacuccuucagcggcuaccugaagcucaccgacaacguguacaucaagaacgccgacaucguggaggaggcgaagaaggucaagcccaccgugguggucaacgccgccaacguguaccugaagcacgggggcggcguggccggggcccugaacaaggcgaccaacaacgccaugcaggucgaguccgacgacuacaucgccacgaacggcccccucaagguggggggcagcugcguccuguccggccacaaccuggccaagcacugccuccacgugguggggcccaacgucaacaagggcgaggacauccagcugcugaagagcgccuacgagaacuucaaccagcacgaggugcuccuggcgccgcugcucuccgccgggaucuucggcgccgaccccauccacagccugcgggugugcgucgacaccgugcgcaccaacguguaccuggccgucuucgacaagaaccucuacgacaagcugguguccagcuuccuggagaugaagagcgagaagcagguggagcagaagaucgccgagauccccaaggaggaggucaagcccuucaucaccgaguccaagccgagcguggagcagcggaagcaggacgacaagaagaucaaggcgugcguggaggaggucacgaccacccucgaggagaccaaguuccugacggagaaccugcuccuguacaucgacaucaacgggaaccugcaccccgacuccgccacccucgugagcgacaucgacaucaccuuccugaagaaggacgcccccuacaucgugggcgacgucgugcaggagggcgugcugaccgccgucgugauccccacgaagaaggccgggggcaccaccgagaugcucgcgaaggcccugcgcaaggugccgaccgacaacuacaucacgaccuaccccgggcagggccugaacggguacaccgucgaggaggccaagaccgugcucaagaagugcaaguccgccuucuacauccugcccagcaucaucuccaacgagaagcaggagauccugggcaccgugagcuggaaccuccgggagaugcuggcgcacgccgaggagacgcgcaagcugaugcccgucugcguggagaccaaggccaucguguccaccauccagcggaaguacaagggcaucaagauccaggagggggucguggacuacggcgcccgcuucuacuucuacaccagcaagacgaccguggccucccugaucaacacccucaacgaccugaacgagacccuggucacgaugccgcucggguacgugacccacggccugaaccuggaggaggcggcccgguacaugcgcagccucaaggugcccgccaccgucuccgugagcucccccgacgccgugaccgccuacaacggguaccugacgagcuccagcaagacccccgaggagcacuucaucgagaccaucucccuggcgggcagcuacaaggacuggagcuacuccggccagagcacccagcucgggaucgaguuccugaagcggggcgacaaguccgucuacuacacgagcaacccgaccaccuuccaccuggacggggaggugaucaccuucgacaaccucaagacgcugcugucccuccgcgaggugcggaccaucaaggucuucaccaccguggacaacaucaaccugcacacgcagguggucgacaugagcaugaccuacggccagcaguucggccccaccuaccuggacggggccgacgugaccaagaucaagccccacaacucccacgagggcaagacguucuacgugcucccgaacgacgacacccugcgcgucgaggccuucgaguacuaccacaccaccgaccccagcuuccuggggcgguacauguccgcccucaaccacacgaagaaguggaaguacccccaggugaacggccugaccagcaucaagugggccgacaacaacugcuaccuggcgaccgcccuccugacccugcagcagaucgagcucaaguucaaccccccggcccugcaggacgccuacuaccgcgcgcgggccggggaggccgccaacuucugcgcccugauccucgcguacugcaacaagacggugggcgagcugggcgacguccgcgagaccauguccuaccuguuccagcacgccaaccucgacagcugcaagcgggugcugaacgucgugugcaagaccugcgggcagcagcagaccacccugaagggcguggaggccgucauguacauggggacgcucuccuacgagcaguucaagaagggcgugcagauccccugcaccugcgggaagcaggccaccaaguaccuggugcagcaggagagccccuucgucaugauguccgcccccccggcgcaguacgagcugaagcacggcaccuucacgugcgccagcgaguacaccggcaacuaccagugcgggcacuacaagcacaucaccuccaaggagacccucuacugcaucgacggcgcccugcugacgaagagcagcgaguacaaggggcccaucaccgacguguucuacaaggagaacuccuacaccaccacgaucaagcccgugaccuacaagcucgacggcgucgugugcaccgagaucgaccccaagcuggacaacuacuacaagaaggacaacagcuacuucaccgagcagccgaucgaccuggugcccaaccagcccuaccccaacgccuccuucgacaacuucaaguucgucugcgacaacaucaaguucgccgacgaccucaaccagcugacgggguacaagaagccggcgagccgcgagcugaaggugaccuucuuccccgaccucaacggcgacguggucgccaucgacuacaagcacuacacccccuccuucaagaagggcgccaagcugcugcacaagcccaucguguggcacgugaacaacgccaccaacaaggcgacguacaagccgaacaccuggugcauccggugccucuggagcaccaagcccgucgagaccuccaacagcuucgacgugcugaaguccgaggacgcccaggggauggacaaccuggccugcgaggaccucaagcccgugagcgaggaggucguggagaaccccacgauccagaaggacgugcuggagugcaacgucaagaccaccgagguggugggcgacaucauccugaagccggccaacaacucccucaagaucaccgaggaggucgggcacacggaccugauggccgcguacguggacaacagcucccugaccaucaagaagcccaacgagcucagccgcgugcugggccugaagacccucgccacccacgggcuggccgccgucaacuccgugcccugggacacgaucgccaacuacgcgaagccguuccugaacaagguggucagcaccaccaccaacaucgugacgcgcugccucaaccgggugugcaccaacuacaugcccuacuucuucacccugcugcuccagcugugcaccuucacccgcuccacgaacagccggaucaaggccuccaugcccaccaccaucgccaagaacaccgucaagagcgugggcaaguucugccuggaggccagcuucaacuaccucaagucccccaacuucagcaagcugaucaacaucaucaucugguuccugcuccuguccgugugccugggcagccucaucuacuccacggccgcgcuggggguccugaugagcaaccucggcaugccguccuacugcaccggguaccgcgagggcuaccugaacagcaccaacgugaccaucgccacguacugcaccggcuccauccccugcagcgugugccuguccgggcucgacagccuggacaccuaccccucccuggagaccauccagaucacgaucagcuccuucaagugggaccucaccgccuucggccuggucgccgagugguuccuggccuacauccucuucacccgguucuucuacgugcuggggcuggcggccaucaugcagcucuucuucagcuacuucgccgugcacuucaucuccaacagcuggcugauguggcugaucaucaaccugguccagauggcccccaucuccgcgauggugcgcauguacaucuucuucgccagcuucuacuacguguggaagagcuacguccacgugguggacggcugcaacuccagcaccugcaugaugugcuacaagcggaaccgcgccacgcgggucgagugcaccaccaucgugaacgggguccgccgguccuucuacguguacgccaacggcggcaagggguucugcaagcuccacaacuggaacugcgugaacugcgacaccuucugcgccggcagcacguucaucuccgacgaggucgcgcgcgaccugagccugcaguucaagcggccgaucaaccccaccgaccaguccagcuacaucguggacuccgugaccgucaagaacgggagcauccaccucuacuucgacaaggccggccagaacaccuacgagcgccacucccugagccacuucgugaaccuggacaaccuccgggccaacaacacgaaggggucccugcccaucaacgugaucgucuucgacggcaagagcaagugcgaggaguccagcgccaaguccgccagcguguacuacucccagcugaugugccagcccauccuccugcuggaccaggcgcucgugagcgacgucggcgacagcgccgagguggccgugaagauguucgacgccuacgucaacaccuucuccagcaccuucaacgugccgauggagaagcugaagacccugguggccacggcggaggccgagcucgccaagaacgucucccuggacaacgugcugagcaccuucaucuccgccgcgcgccagggguucguggacagcgacgucgagaccaaggacgugguggagugccucaagcugucccaccagagcgacaucgaggucaccggcgacuccugcaacaacuacaugcugacguacaacaagguggagaacaugaccccccgggaccucggggccugcaucgacugcagcgcccgccacaucaacgcccagguggccaagucccacaacaucgcgcugaucuggaacgucaaggacuucaugagccuguccgagcagcuccggaagcagauccgcagcgccgccaagaagaacaaccugcccuucaagcugaccugcgccaccacgcgccagguggugaacgucgugaccaccaagaucgcccucaagggcgggugaggacuagucccuguucccagagcccacuuuuuuuucuuuuuuugaaauaaaauagccugucuuucagaucucaaaggcucuuuucagagccaccaaaaaaaaaaaaaaaaaaaaaaaaaaaaaaaaaaaaaaaaaaaaaaaaaaaaaaaaaaaaaaaaaaaaaaaaaaaaaaaaaaaaaaaaaaaaaaaaaaaaa

SEQ ID NO: 19659 - RNA, 6113 nt, Artificial Sequence
  SARS-CoV-2__MT831416.1__non-structural protein 3 (NSP3) mRNA gc
aggagagucccgcagucggcguccagcggcucugcuuguucgugugugugucguugcaggccuuauucaagcuuaccauggcccccaccaaggugaccuucggcgacgacacggucaucgaggugcagggguacaagagcgugaacaucaccuucgagcuggacgagcgcaucgacaagguccucaacgagaagugcuccgccuacaccguggagcugggcaccgaggugaacgaguucgcgugcgucguggccgacgccgugaucaagacgcugcagccggucagcgagcuccugaccccccuggggaucgaccucgacgagugguccauggccaccuacuaccuguucgacgagagcggcgaguucaagcuggccucccacauguacugcagcuucuacccccccgacgaggacgaggaggagggggacugcgaggaggaggaguucgagccguccacccaguacgaguacggcacggaggacgacuaccagggcaagccccucgaguucggggcgaccagcgccgcccugcagcccgaggaggagcaggaggaggacuggcuggacgacgacucccagcagaccgugggccagcaggacgggagcgaggacaaccagaccacgaccauccagaccaucguggagguccagccccagcucgagauggagcugaccccgguggugcagacgaucgaggucaacuccuucagcggcuaccugaagcucaccgacaacguguacaucaagaacgccgacaucguggaggaggcgaagaaggucaagcccaccgugguggucaacgccgccaacguguaccugaagcacgggggcggcguggccggggcccugaacaaggcgaccaacaacgccaugcaggucgaguccgacgacuacaucgccacgaacggcccccucaagguggggggcagcugcguccuguccggccacaaccuggccaagcacugccuccacgugguggggcccaacgucaacaagggcgaggacauccagcugcugaagagcgccuacgagaacuucaaccagcacgaggugcuccuggcgccgcugcucuccgccgggaucuucggcgccgaccccauccacagccugcgggugugcgucgacaccgugcgcaccaacguguaccuggccgucuucgacaagaaccucuacgacaagcugguguccagcuuccuggagaugaagagcgagaagcagguggagcagaagaucgccgagauccccaaggaggaggucaagcccuucaucaccgaguccaagccgagcguggagcagcggaagcaggacgacaagaagaucaaggcgugcguggaggaggucacgaccacccucgaggagaccaaguuccugacggagaaccugcuccuguacaucgacaucaacgggaaccugcaccccgacuccgccacccucgugagcgacaucgacaucaccuuccugaagaaggacgcccccuacaucgugggcgacgucgugcaggagggcgugcugaccgccgucgugauccccacgaagaaggccgggggcaccaccgagaugcucgcgaaggcccugcgcaaggugccgaccgacaacuacaucacgaccuaccccgggcagggccugaacggguacaccgucgaggaggccaagaccgugcucaagaagugcaaguccgccuucuacauccugcccagcaucaucuccaacgagaagcaggagauccugggcaccgugagcuggaaccuccgggagaugcuggcgcacgccgaggagacgcgcaagcugaugcccgucugcguggagaccaaggccaucguguccaccauccagcggaaguacaagggcaucaagauccaggagggggucguggacuacggcgcccgcuucuacuucuacaccagcaagacgaccguggccucccugaucaacacccucaacgaccugaacgagacccuggucacgaugccgcucggguacgugacccacggccugaaccuggaggaggcggcccgguacaugcgcagccucaaggugcccgccaccgucuccgugagcucccccgacgccgugaccgccuacaacggguaccugacgagcuccagcaagacccccgaggagcacuucaucgagaccaucucccuggcgggcagcuacaaggacuggagcuacuccggccagagcacccagcucgggaucgaguuccugaagcggggcgacaaguccgucuacuacacgagcaacccgaccaccuuccaccuggacggggaggugaucaccuucgacaaccucaagacgcugcugucccuccgcgaggugcggaccaucaaggucuucaccaccguggacaacaucaaccugcacacgcagguggucgacaugagcaugaccuacggccagcaguucggccccaccuaccuggacggggccgacgugaccaagaucaagccccacaacucccacgagggcaagacguucuacgugcucccgaacgacgacacccugcgcgucgaggccuucgaguacuaccacaccaccgaccccagcuuccuggggcgguacauguccgcccucaaccacacgaagaaguggaaguacccccaggugaacggccugaccagcaucaagugggccgacaacaacugcuaccuggcgaccgcccuccugacccugcagcagaucgagcucaaguucaaccccccggcccugcaggacgccuacuaccgcgcgcgggccggggaggccgccaacuucugcgcccugauccucgcguacugcaacaagacggugggcgagcugggcgacguccgcgagaccauguccuaccuguuccagcacgccaaccucgacagcugcaagcgggugcugaacgucgugugcaagaccugcgggcagcagcagaccacccugaagggcguggaggccgucauguacauggggacgcucuccuacgagcaguucaagaagggcgugcagauccccugcaccugcgggaagcaggccaccaaguaccuggugcagcaggagagccccuucgucaugauguccgcccccccggcgcaguacgagcugaagcacggcaccuucacgugcgccagcgaguacaccggcaacuaccagugcgggcacuacaagcacaucaccuccaaggagacccucuacugcaucgacggcgcccugcugacgaagagcagcgaguacaaggggcccaucaccgacguguucuacaaggagaacuccuacaccaccacgaucaagcccgugaccuacaagcucgacggcgucgugugcaccgagaucgaccccaagcuggacaacuacuacaagaaggacaacagcuacuucaccgagcagccgaucgaccuggugcccaaccagcccuaccccaacgccuccuucgacaacuucaaguucgucugcgacaacaucaaguucgccgacgaccucaaccagcugacgggguacaagaagccggcgagccgcgagcugaaggugaccuucuuccccgaccucaacggcgacguggucgccaucgacuacaagcacuacacccccuccuucaagaagggcgccaagcugcugcacaagcccaucguguggcacgugaacaacgccaccaacaaggcgacguacaagccgaacaccuggugcauccggugccucuggagcaccaagcccgucgagaccuccaacagcuucgacgugcugaaguccgaggacgcccaggggauggacaaccuggccugcgaggaccucaagcccgugagcgaggaggucguggagaaccccacgauccagaaggacgugcuggagugcaacgucaagaccaccgagguggugggcgacaucauccugaagccggccaacaacucccucaagaucaccgaggaggucgggcacacggaccugauggccgcguacguggacaacagcucccugaccaucaagaagcccaacgagcucagccgcgugcugggccugaagacccucgccacccacgggcuggccgccgucaacuccgugcccugggacacgaucgccaacuacgcgaagccguuccugaacaagguggucagcaccaccaccaacaucgugacgcgcugccucaaccgggugugcaccaacuacaugcccuacuucuucacccugcugcuccagcugugcaccuucacccgcuccacgaacagccggaucaaggccuccaugcccaccaccaucgccaagaacaccgucaagagcgugggcaaguucugccuggaggccagcuucaacuaccucaagucccccaacuucagcaagcugaucaacaucaucaucugguuccugcuccuguccgugugccugggcagccucaucuacuccacggccgcgcuggggguccugaugagcaaccucggcaugccguccuacugcaccggguaccgcgagggcuaccugaacagcaccaacgugaccaucgccacguacugcaccggcuccauccccugcagcgugugccuguccgggcucgacagccuggacaccuaccccucccuggagaccauccagaucacgaucagcuccuucaagugggaccucaccgccuucggccuggucgccgagugguuccuggccuacauccucuucacccgguucuucuacgugcuggggcuggcggccaucaugcagcucuucuucagcuacuucgccgugcacuucaucuccaacagcuggcugauguggcugaucaucaaccugguccagauggcccccaucuccgcgauggugcgcauguacaucuucuucgccagcuucuacuacguguggaagagcuacguccacgugguggacggcugcaacuccagcaccugcaugaugugcuacaagcggaaccgcgccacgcgggucgagugcaccaccaucgugaacgggguccgccgguccuucuacguguacgccaacggcggcaagggguucugcaagcuccacaacuggaacugcgugaacugcgacaccuucugcgccggcagcacguucaucuccgacgaggucgcgcgcgaccugagccugcaguucaagcggccgaucaaccccaccgaccaguccagcuacaucguggacuccgugaccgucaagaacgggagcauccaccucuacuucgacaaggccggccagaagaccuacgagcgccacucccugagccacuucgugaaccuggacaaccuccgggccaacaacacgaaggggucccugcccaucagcgugaucgucuucgacggcaaguccaagugcgaggagagcuccgccaagagcgccuccguguacuacagccagcugaugugccagcccauccuccugcuggaccaggcgcucgugagcgacgucggcgacuccgccgagguggccgugaagauguucgacgccuacgucaacaccuucagcuccaccuucaacgugccgauggagaagcugaagacccugguggccacggcggaggccgagcucgccaagaacgucagccuggacaacgugcuguccaccuucaucagcgccgcgcgccagggguucguggacuccgacgucgagaccaaggacgugguggagugccucaagcugagccaccaguccgacaucgaggucaccggcgacagcugcaacaacuacaugcugacguacaacaagguggagaacaugaccccccgggaccucggggccugcaucgacugcuccgcccgccacaucaacgcccagguggccaagagccacaacaucgcgcugaucuggaacgucaaggacuucaugucccugagcgagcagcuccggaagcagauccgcuccgccgccaagaagaacaaccugcccuucaagcugaccugcgccaccacgcgccagguggugaacgucgugaccaccaagaucgcccucaagggcgggugaggacuagucccuguucccagagcccacuuuuuuuucuuuuuuugaaauaaaauagccugucuuucagaucucaaaggcucuuuucagagccaccaaaaaaaaaaaaaaaaaaaaaaaaaaaaaaaaaaaaaaaaaaaaaaaaaaaaaaaaaaaaaaaaaaaaaaaaaaaaaaaaaaaaaaaaaaaaaaaaaaaaa

SEQ ID NO: 19660 - RNA, 6113 nt, Artificial Sequence
  SARS-CoV-2__MT831444.1__non-structural protein 3 (NSP3) mRNA gc
aggagagucccgcagucggcguccagcggcucugcuuguucgugugugugucguugcaggccuuauucaagcuuaccauggcccccaccaaggugaccuucggcgacgacacggucaucgaggugcagggguacaagagcgugaacaucaccuucgagcuggacgagcgcaucgacaagguccucaacgagaagugcuccgccuacaccguggagcugggcaccgaggugaacgaguucgcgugcgucguggccgacgccgugaucaagacgcugcagccggucagcgagcuccugaccccccuggggaucgaccucgacgagugguccauggccaccuacuaccuguucgacgagagcggcgaguucaagcuggccucccacauguacugcagcuucuacccccccgacgaggacgaggaggagggggacugcgaggaggaggaguucgagccguccacccaguacgaguacggcacggaggacgacuaccagggcaagccccucgaguucggggcgaccagcgccgcccugcagcccgaggaggagcaggaggaggacuggcuggacgacgacucccagcagaccgugggccagcaggacgggagcgaggacaaccagaccacgaccauccagaccaucguggagguccagccccagcucgagauggagcugaccccgguggugcagacgaucgaggucaacuccuucagcggcuaccugaagcucaccaacaacguguacaucaagaacgccgacaucguggaggaggcgaagaaggucaagcccaccgugguggucaacgccgccaacguguaccugaagcacgggggcggcguggccggggcccugaacaaggcgaccaacaacgccaugcaggucgaguccgacgacuacaucgccacgaacggcccccucaagguggggggcagcugcguccuguccggccacaaccuggccaagcacugccuccacgugguggggcccaacgucaacaagggcgaggacauccagcugcugaagagcgccuacgagaacuucaaccagcacgaggugcuccuggcgccgcugcucuccgccgggaucuucggcgccgaccccauccacagccugcgggugugcgucgacaccgugcgcaccaacguguaccuggccgucuucgacaagaaccucuacgacaagcugguguccagcuuccuggagaugaagagcgagaagcagguggagcagaagaucgccgagauccccaaggaggaggucaagcccuucaucaccgaguccaagccgagcguggagcagcggaagcaggacgacaagaagaucaaggcgugcguggaggaggucacgaccacccucgaggagaccaaguuccugacggagaaccugcuccuguacaucgacaucaacgggaaccugcaccccgacuccgccacccucgugagcgacaucgacaucaccuuccugaagaaggacgcccccuacaucgugggcgacgucgugcaggagggcgugcugaccgccgucgugauccccacgaagaaggccgggggcaccaccgagaugcucgcgaaggcccugcgcaaggugccgaccgacaacuacaucacgaccuaccccgggcagggccugaacggguacaccgucgaggaggccaagaccgugcucaagaagugcaaguccgccuucuacauccugcccagcaucaucuccaacgagaagcaggagauccugggcaccgugagcuggaaccuccgggagaugcuggcgcacgccgaggagacgcgcaagcugaugcccgucugcguggagaccaaggccaucguguccaccauccagcggaaguacaagggcaucaagauccaggagggggucguggacuacggcgcccgcuucuacuucuacaccagcaagacgaccguggccucccugaucaacacccucaacgaccugaacgagacccuggucacgaugccgcucggguacgugacccacggccugaaccuggaggaggcggcccgguacaugcgcagccucaaggugcccgccaccgucuccgugagcucccccgacgccgugaccgccuacaacggguaccugacgagcuccagcaagacccccgaggagcacuucaucgagaccaucucccuggcgggcagcuacaaggacuggagcuacuccggccagagcacccagcucgggaucgaguuccugaagcggggcgacaaguccgucuacuacacgagcaacccgaccaccuuccaccuggacggggaggugaucaccuucgacaaccucaagacgcugcugucccuccgcgaggugcggaccaucaaggucuucaccaccguggacaacaucaaccugcacacgcagguggucgacaugagcaugaccuacggccagcaguucggccccaccuaccuggacggggccgacgugaccaagaucaagccccacaacucccacgagggcaagacguucuacgugcucccgaacgacgacacccugcgcgucgaggccuucgaguacuaccacaccaccgaccccagcuuccuggggcgguacauguccgcccucaaccacacgaagaaguggaaguacccccaggugaacggccugaccagcaucaagugggccgacaacaacugcuaccuggcgaccgcccuccugacccugcagcagaucgagcucaaguucaaccccccggcccugcaggacgccuacuaccgcgcgcgggccggggaggccgccaacuucugcgcccugauccucgcguacugcaacaagacggugggcgagcugggcgacguccgcgagaccauguccuaccuguuccagcacgccaaccucgacagcugcaagcgggugcugaacgucgugugcaagaccugcgggcagcagcagaccacccugaagggcguggaggccgucauguacauggggacgcucuccuacgagcaguucaagaagggcgugcagauccccugcaccugcgggaagcaggccaccaaguaccuggugcagcaggagagccccuucgucaugauguccgcccccccggcgcaguacgagcugaagcacggcaccuucacgugcgccagcgaguacaccggcaacuaccagugcgggcacuacaagcacaucaccuccaaggagacccucuacugcaucgacggcgcccugcugacgaagagcagcgaguacaaggggcccaucaccgacguguucuacaaggagaacuccuacaccaccacgaucaagcccgugaccuacaagcucgacggcgucgugugcaccgagaucgaccccaagcuggacaacuacuacaagaaggacaacagcuacuucaccgagcagccgaucgaccuggugcccaaccagcccuaccccaacgccuccuucgacaacuucaaguucgucugcgacaacaucaaguucgccgacgaccucaaccagcugacgggguacaagaagccggcgagccgcgagcugaaggugaccuucuuccccgaccucaacggcgacguggucgccaucgacuacaagcacuacacccccuccuucaagaagggcgccaagcugcugcacaagcccaucguguggcacgugaacaacgccaccaacaaggcgacguacaagccgaacaccuggugcauccggugccucuggagcaccaagcccgucgagaccuccaacagcuucgacgugcugaaguccgaggacgcccaggggauggacaaccuggccugcgaggaccucaagcccgugagcgaggaggucguggagaaccccacgauccagaaggacgugcuggagugcaacgucaagaccaccgagguggugggcgacaucauccugaagccggccaacaacucccucaagaucaccgaggaggucgggcacacggaccugauggccgcguacguggacaacagcucccugaccaucaagaagcccaacgagcucagccgcgugcugggccugaagacccucgccacccacgggcuggccgccgucaacuccgugcccugggacacgaucgccaacuacgcgaagccguuccugaacaagguggucagcaccaccaccaacaucgugacgcgcugccucaaccgggugugcaccaacuacaugcccuacuucuucacccugcugcuccagcugugcaccuucacccgcuccacgaacagccggaucaaggccuccaugcccaccaccaucgccaagaacaccgucaagagcgugggcaaguucugccuggaggccagcuucaacuaccucaagucccccaacuucagcaagcugaucaacaucaucaucugguuccugcuccuguccgugugccugggcagccucaucuacuccacggccgcgcuggggguccugaugagcaaccucggcaugccguccuacugcaccggguaccgcgagggcuaccugaacagcaccaacgugaccaucgccacguacugcaccggcuccauccccugcagcgugugccuguccgggcucgacagccuggacaccuaccccucccuggagaccauccagaucacgaucagcuccuucaagugggaccucaccgccuucggccuggucgccgagugguuccuggccuacauccucuucacccgguucuucuacgugcuggggcuggcggccaucaugcagcucuucuucagcuacuucgccgugcacuucaucuccaacagcuggcugauguggcugaucaucaaccugguccagauggcccccaucuccgcgauggugcgcauguacaucuucuucgccagcuucuacuacguguggaagagcuacguccacgugguggacggcugcaacuccagcaccugcaugaugugcuacaagcggaaccgcgccacgcgggucgagugcaccaccaucgugaacgggguccgccgguccuucuacguguacgccaacggcggcaagggguucugcaagcuccacaacuggaacugcgugaacugcgacaccuucugcgccggcagcacguucaucuccgacgaggucgcgcgcgaccugagccugcaguucaagcggccgaucaaccccaccgaccaguccagcuacaucguggacuccgugaccgucaagaacgggagcauccaccucuacuucgacaaggccggccagaagaccuacgagcgccacucccugagccacuucgugaaccuggacaaccuccgggccaacaacacgaaggggucccugcccaucaacgugaucgucuucgacggcaagagcaagugcgaggaguccagcgccaaguccgccagcguguacuacucccagcugaugugccagcccauccuccugcuggaccaggcgcucgugagcgacgucggcgacagcgccgagguggccgugaagauguucgacgccuacgucaacaccuucuccagcaccuucaacgugccgauggagaagcugaagacccugguggccacggcggaggccgagcucgccaagaacgucucccuggacaacgugcugagcaccuucaucuccgccgcgcgccagggguucguggacagcgacgucgagaccaaggacgugguggagugccucaagcugucccaccagagcgacaucgaggucaccggcgacuccugcaacaacuacaugcugacguacaacaagguggagaacaugaccccccgggaccucggggccugcaucgacugcagcgcccgccacaucaacgcccagguggccaagucccacaacaucgcgcugaucuggaacgucaaggacuucaugagccuguccgagcagcuccggaagcagauccgcagcgccgccaagaagaacaaccugcccuucaagcugaccugcgccaccacgcgccagguggugaacgucgugaccaccaagaucgcccucaagggcgggugaggacuagucccuguucccagagcccacuuuuuuuucuuuuuuugaaauaaaauagccugucuuucagaucucaaaggcucuuuucagagccaccaaaaaaaaaaaaaaaaaaaaaaaaaaaaaaaaaaaaaaaaaaaaaaaaaaaaaaaaaaaaaaaaaaaaaaaaaaaaaaaaaaaaaaaaaaaaaaaaaaaaa

SEQ ID NO: 19661 - RNA, 6113 nt, Artificial Sequence
  SARS-CoV-2__MT831463.1__non-structural protein 3 (NSP3) mRNA gc
aggagagucccgcagucggcguccagcggcucugcuuguucgugugugugucguugcaggccuuauucaagcuuaccauggcccccaccaaggugaccuucggcgacgacacggucaucgaggugcagggguacaagagcgugaacaucaccuucgagcuggacgagcgcaucgacaagguccucaacgagaagugcuccgccuacaccguggagcugggcaccgaggugaacgaguucgcgugcgucguggccgacgccgugaucaagacgcugcagccggucagcgagcuccugaccccccuggggaucgaccucgacgagugguccauggccaccuacuaccuguucgacgagagcggcgaguucaagcuggccucccacauguacugcagcuucuacccccccgacgaggacgaggaggagggggacugcgaggaggaggaguucgagccguccacccaguacgaguacggcacggaggacgacuaccagggcaagccccucgaguucggggcgaccagcgccgcccugcagcccgaggaggagcaggaggaggacuggcuggacgacgacucccagcagaccgugggccagcaggacgggagcgaggacaaccagaccacgaccauccagaccaucguggagguccagccccagcucgagauggagcugaccccgguggugcagacgaucgaggucaacuccuucagcggcuaccugaagcucaccgacaacguguacaucaagaacgccgacaucguggaggaggcgaagaaggucaagcccaccgugguggucaacgccgccaacguguaccugaagcacgggggcggcguggccggggcccugaacaaggcgaccaacaacgccaugcaggucgaguccgacgacuacaucgccacgaacggcccccucaagguggggggcagcugcguccuguccggccacaaccuggccaagcacugccuccacgugguggggcccaacgucaacaagggcgaggacauccagcugcugaagagcgccuacgagaacuucaaccagcacgaggugcuccuggcgccgcugcucuccgccgggaucuucggcgccgaccccauccacagccugcgggugugcgucgacaccgugcgcaccaacguguaccuggccgucuucgacaagaaccucuacgacaagcugguguccagcuuccuggagaugaagagcgagaagcagguggagcagaagaucgccgagauccccaaggaggaggucaagcccuucaucaccgaguccaagccgagcguggagcagcggaagcaggacgacaagaagaucaaggcgugcguggaggaggucacgaccacccucgaggagaccaaguuccugacggagaaccugcuccuguacaucgacaucaacgggaaccugcaccccgacuccgccacccucgugagcgacaucgacaucaccuuccugaagaaggacgcccccuacaucgugggcgacgucgugcaggagggcgugcugaccgccgucgugauccccacgaagaaggccgggggcaccaccgagaugcucgcgaaggcccugcgcaaggugccgaccgacaacuacaucacgaccuaccccgggcagggccugaacggguacaccgucgaggaggccaagaccgugcucaagaagugcaaguccgccuucuacauccugcccagcaucaucuccaacgagaagcaggagauccugggcaccgugagcuggaaccuccgggagaugcuggcgcacgccgaggagacgcgcaagcugaugcccgucugcguggagaccaaggccaucguguccaccauccagcggaaguacaagggcaucaagauccaggagggggucguggacuacggcgcccgcuucuacuucuacaccagcaagacgaccguggccucccugaucaacacccucaacgaccugaacgagacccuggucacgaugccgcucggguacgugacccacggccugaaccuggaggaggcggcccgguacaugcgcagccucaaggugcccgccaccgucuccgugagcucccccgacgccgugaccgccuacaacggguaccugacgagcuccagcaagacccccgaggagcacuucaucgagaccaucucccuggcgggcagcuacaaggacuggagcuacuccggccagagcacccagcucgggaucgaguuccugaagcggggcgacaaguccgucuacuacacgagcaacccgaccaccuuccaccuggacggggaggugaucaccuucgacaaccucaagacgcugcugucccuccgcgaggugcggaccaucaaggucuucaccaccguggacaacaucaaccugcacacgcagguggucgacaugagcaugaccuacggccagcaguucggccccaccuaccuggacggggccgacgugaccaagaucaagccccacaacucccacgagggcaagacguucuacgugcucccgaacgacgacacccugcgcgucgaggccuucgaguacuaccacaccaccgaccccagcuuccuggggcgguacauguccgcccucaaccacacgaagaaguggaaguacccccaggugaacggccugaccagcaucaagugggccgacaacaacugcuaccuggcgaccgcccuccugacccugcagcagaucgagcucaaguucaaccccccggcccugcaggacgccuacuaccgcgcgcgggccggggaggccgccaacuucugcgcccugauccucgcguacugcaacaagacggugggcgagcugggcgacguccgcgagaccauguccuaccuguuccagcacgccaaccucgacagcugcaagcgggugcugaacgucgugugcaagaccugcgggcagcagcagaccacccugaagggcguggaggccgucauguacauggggacgcucuccuacgagcaguucaagaagggcgugcagauccccugcaccugcgggaagcaggccaccaaguaccuggugcagcaggagagccccuucgucaugauguccgcccccccggcgcaguacgagcugaagcacggcaccuucacgugcgccagcgaguacaccggcaacuaccagugcgggcacuacaagcacaucaccuccaaggagacccucuacugcaucgacggcgcccugcugacgaagagcagcgaguacaaggggcccaucaccgacguguucuacaaggagaacuccuacaccaccacgaucaagcccgugaccuacaagcucgacggcgucgugugcaccgagaucgaccccaagcuggacaacuacuacaagaaggacaacagcuacuucaccgagcagccgaucgaccuggugcccaaccagcccuaccccaacgccuccuucgacaacuucaaguucgucugcgacaacaucaaguucgccgacgaccucaaccagcugacgggguacaagaagccggcgagccgcgagcugaaggugaccuucuuccccgaccucaacggcgacguggucgccaucgacuacaagcacuacacccccuccuucaagaagggcgccaagcugcugcacaagcccaucguguggcacgugaacaacgccaccaacaaggcgacguacaagccgaacaucuggugcauccggugccucuggagcaccaagcccgucgagaccuccaacagcuucgacgugcugaaguccgaggacgcccaggggauggacaaccuggccugcgaggaccucaagcccgugagcgaggaggucguggagaaccccaccauccagaaggacgugcuggagugcaacgucaagacgaccgagguggugggcgacaucauccugaagccggccaacaacucccucaagaucaccgaggaggucgggcacaccgaccugauggccgcguacguggacaacagcucccugacgaucaagaagcccaacgagcucagccgcgugcugggccugaagacccucgccacccacgggcuggccgccgucaacuccgugcccugggacaccaucgccaacuacgcgaagccguuccugaacaagguggucagcacgaccaccaacaucgugacccgcugccucaaccgggugugcacgaacuacaugcccuacuucuucacccugcugcuccagcugugcaccuucacccgcuccaccaacagccggaucaaggccuccaugcccacgaccaucgccaagaacaccgucaagagcgugggcaaguucugccuggaggccagcuucaacuaccucaagucccccaacuucagcaagcugaucaacaucaucaucugguuccugcuccuguccgugugccugggcagccucaucuacuccaccgccgcgcuggggguccugaugagcaaccucggcaugccguccuacugcacgggguaccgcgagggcuaccugaacagcaccaacgugaccaucgccaccuacugcacgggcuccauccccugcagcgugugccuguccgggcucgacagccuggacaccuaccccucccuggagaccauccagaucaccaucagcuccuucaagugggaccucacggccuucggccuggucgccgagugguuccuggccuacauccucuucacccgguucuucuacgugcuggggcuggcggccaucaugcagcucuucuucagcuacuucgccgugcacuucaucuccaacagcuggcugauguggcugaucaucaaccugguccagauggcccccaucuccgcgauggugcgcauguacaucuucuucgccagcuucuacuacguguggaagagcuacguccacgugguggacggcugcaacuccagcaccugcaugaugugcuacaagcggaaccgcgccacccgggucgagugcacgaccaucgugaacgggguccgccgguccuucuacguguacgccaacggcggcaagggguucugcaagcuccacaacuggaacugcgugaacugcgacaccuucugcgccggcagcaccuucaucuccgacgaggucgcgcgcgaccugagccugcaguucaagcggccgaucaaccccacggaccaguccagcuacaucguggacuccgugaccgucaagaacgggagcauccaccucuacuucgacaaggccggccagaagaccuacgagcgccacucccugagccacuucgugaaccuggacaaccuccgggccaacaacaccaaggggucccugcccaucaacgugaucgucuucgacggcaagagcaagugcgaggaguccagcgccaaguccgccagcguguacuacucccagcugaugugccagcccauccuccugcuggaccaggcgcucgugagcgacgucggcgacagcgccgagguggccgugaagauguucgacgccuacgucaacacguucuccagcaccuucaacgugccgauggagaagcugaagacccugguggccaccgcggaggccgagcucgccaagaacgucucccuggacaacgugcugagcacguucaucuccgccgcgcgccagggguucguggacagcgacgucgagaccaaggacgugguggagugccucaagcugucccaccagagcgacaucgaggucaccggcgacuccugcaacaacuacaugcugaccuacaacaagguggagaacaugacgccccgggaccucggggccugcaucgacugcagcgcccgccacaucaacgcccagguggccaagucccacaacaucgcgcugaucuggaacgucaaggacuucaugagccuguccgagcagcuccggaagcagauccgcagcgccgccaagaagaacaaccugcccuucaagcugaccugcgccaccacccgccagguggugaacgucgugacgaccaagaucgcccucaagggcgggugaggacuagucccuguucccagagcccacuuuuuuuucuuuuuuugaaauaaaauagccugucuuucagaucucaaaggcucuuuucagagccaccaaaaaaaaaaaaaaaaaaaaaaaaaaaaaaaaaaaaaaaaaaaaaaaaaaaaaaaaaaaaaaaaaaaaaaaaaaaaaaaaaaaaaaaaaaaaaaaaaaaaa

SEQ ID NO: 19662 - RNA, 6113 nt, Artificial Sequence
  SARS-CoV-2__MT831464.1__non-structural protein 3 (NSP3) mRNA gc
aggagagucccgcagucggcguccagcggcucugcuuguucgugugugugucguugcaggccuuauucaagcuuaccauggcccccaccaaggugaccuucggcgacgacacggucaucgaggugcagggguacaagagcgugaacaucaccuucgagcuggacgagcgcaucgacaagguccucaacgagaagugcuccgccuacaccguggagcugggcaccgaggugaacgaguucgcgugcgucguggccgacgccgugaucaagacgcugcagccggucagcgagcuccugaccccccuggggaucgaccucgacgagugguccauggccaccuacuaccuguucgacgagagcggcgaguucaagcuggccucccacauguacugcagcuucuacccccccgacgaggacgaggaggagggggacugcgaggaggaggaguucgagccguccacccaguacgaguacggcacggaggacgacuaccagggcaagccccucgaguucggggcgaccagcgccgcccugcagcccgaggaggagcaggaggaggacuggcuggacgacgacucccagcagaccgugggccagcaggacgggagcgaggacaaccagaccacgaccauccagaccaucguggagguccagccccagcucgagauggagcugaccccgguggugcagacgaucgaggucaacuccuucagcggcuaccugaagcucaccgacaacguguacaucaagaacgccgacaucguggaggaggcgaagaaggucaagcccaccgugguggucaacgccgccaacguguaccugaagcacgggggcggcguggccggggcccugaacaaggcgaccaacaacgccaugcaggucgaguccgacgacuacaucgccacgaacggcccccucaagguggggggcagcugcguccuguccggccacaaccuggccaagcacugccuccacgugguggggcccaacgucaacaagggcgaggacauccagcugcugaagagcgccuacgagaacuucaaccagcacgaggugcuccuggcgccgcugcucuccgccgggaucuucggcgccgaccccauccacagccugcgggugugcgucgacaccgugcgcaccaacguguaccuggccgucuucgacaagaaccucuacgacaagcugguguccagcuuccuggagaugaagagcgagaagcagguggagcagaagaucgccgagauccccaaggaggaggucaagcccuucaucaccgaguccaagccgagcguggagcagcggaagcaggacgacaagaagaucaaggcgugcguggaggaggucacgaccacccucgaggagaccaaguuccugacggagaaccugcuccuguacaucgacaucaacgggaaccugcaccccgacuccgccacccucgugagcgacaucgacaucaccuuccugaagaaggacgcccccuacaucgugggcgacgucgugcaggagggcgugcugaccgccgucgugauccccacgaagaaggccgggggcaccaccgagaugcucgcgaaggcccugcgcaaggugccgaccgacaacuacaucacgaccuaccccgggcagggccugaacggguacaccgucgaggaggccaagaccgugcucaagaagugcaaguccgccuucuacauccugcccagcaucaucuccaacgagaagcaggagauccugggcaccgugagcuggaaccuccgggagaugcuggcgcacgccgaggagacgcgcaagcugaugcccgucugcguggagaccaaggccaucguguccaccauccagcggaaguacaagggcaucaagauccaggagggggucguggacuacggcgcccgcuucuacuucuacaccagcaagacgaccguggccucccugaucaacacccucaacgaccugaacgagacccuggucacgaugccgcucggguacgugacccacggccugaaccuggaggaggcggcccgguacaugcgcagccucaaggugcccgccaccgucuccgugagcucccccgacgccgugaccgccuacaacggguaccugacgagcuccagcaagacccccgaggagcacuucaucgagaccaucucccuggcgggcagcuacaaggacuggagcuacuccggccagagcacccagcucgggaucgaguuccugaagcggggcgacaaguccgucuacuacacgagcaacccgaccaccuuccaccuggacggggaggugaucaccuucgacaaccucaagacgcugcugucccuccgcgaggugcggaccaucaaggucuucaccaccguggacaacaucaaccugcacacgcagguggucgacaugagcaugaccuacggccagcaguucggccccaccuaccuggacggggccgacgugaccaagaucaagccccacaacucccacgagggcaagacguucuacgugcucccgaacgacgacacccugcgcgucgaggccuucgaguacuaccacaccaccgaccccagcuuccuggggcgguacauguccgcccucaaccacacgaagaaguggaaguacccccaggugaacggccugaccagcaucaagugggccgacaacaacugcuaccuggcgaccgcccuccugacccugcagcagaucgagcucaaguucaaccccccggcccugcaggacgccuacuaccgcgcgcgggccggggaggccgccaacuucugcgcccugauccucgcguacugcaacaagacggugggcgagcugggcgacguccgcgagaccauguccuaccuguuccagcacgccaaccucgacagcugcaagcgggugcugaacgucgugugcaagaccugcgggcagcagcagaccacccugaagggcguggaggccgucauguacauggggacgcucuccuacgagcaguucaagaagggcgugcagauccccugcaccugcgggaagcaggccaccaaguaccuggugcagcaggagagccccuucgucaugauguccgcccccccggcgcaguacgagcugaagcacggcaccuucacgugcgccagcgaguacaccggcaacuaccagugcgggcacuacaagcacaucaccuccaaggagacccucuacugcaucgacggcgcccugcugacgaagagcagcgaguacaaggggcccaucaccgacguguucuacaaggagaacuccuacaccaccacgaucaagcccgugaccuacaagcucgacggcgucgugugcaccgagaucgaccccaagcuggacaacuacuacaagaaggacaacagcuacuucaccgagcagccgaucgaccuggugcccaaccagcccuaccccaacgccuccuucgacaacuucaaguucgucugcgacaacaucaaguucgccgacgaccucaaccagcugacgggguacaagaagccggcgagccgcgagcugaaggugaccuucuuccccgaccucaacggcgacguggucgccaucgacuacaagcacuacacccccuccuucaagaagggcgccaagcugcugcacaagcccaucguguggcacgugaacaacgccaccaacaaggcgacguacaagccgaacaccuggugcauccggugccucuggagcaccaagcccgucgagaccuccaacagcuucgacgugcugaaguccgaggacgcccaggggauggacaaccuggccugcgaggaccucaagcccgugagcgaggaggucguggagaaccccacgauccagaaggacgugcuggagugcaacgucaagaccaccgagguggugggcgacaucauccugaagccggccaacaacucccucaagaucaccgaggaggucgggcacacggaccugauggccgcguacguggacaacagcucccugaccaucaagaagcccaacgagcucagccgcgugcugggccugaagacccucgccacccacgggcuggccgccgucaacuccgugcccugggacacgaucgccaacuacgcgaagccguuccugaacaagguggucagcaccaccaccaacaucgugacgcgcugccucaaccgggugugcaccaacuacaugcccuacuucuucacccugcugcuccagcugugcaccuucacccgcuccacgaacagccggaucaaggccuccaugcccaccaccaucgccaagaacaccgucaagagcgugggcaaguucugccuggaggccagcuucaacuaccucaagucccccaacuucagcaagcugaucaacaucaucaucugguuccugcuccuguccgugugccugggcagccucaucuacuccacggccgcgcuggggguccugaugagcaaccucggcaugccguccuacugcaccggguaccgcgagggcuaccugaacagcaccaacgugaccaucgccacguacugcaccggcuccauccccugcagcgugugccuguccgggcucgacagccuggacaccuaccccucccuggagaccauccagaucacgaucagcuccuucaagcgggaccucaccgccuucggccuggucgccgagugguuccuggccuacauccucuucacccgcuucuucuacgugcuggggcuggcggccaucaugcagcucuucuucagcuacuucgccgugcacuucaucuccaacagcuggcugauguggcugaucaucaaccugguccagauggcccccaucuccgcgauggugcggauguacaucuucuucgccagcuucuacuacguguggaagagcuacguccacgugguggacggcugcaacuccagcaccugcaugaugugcuacaagcgcaaccgggccacgcgcgucgagugcaccaccaucgugaacgggguccggcgcuccuucuacguguacgccaacggcggcaagggguucugcaagcuccacaacuggaacugcgugaacugcgacaccuucugcgccggcagcacguucaucuccgacgaggucgcgcgggaccugagccugcaguucaagcgcccgaucaaccccaccgaccaguccagcuacaucguggacuccgugaccgucaagaacgggagcauccaccucuacuucgacaaggccggccagaagaccuacgagcggcacucccugagccacuucgugaaccuggacaaccuccgcgccaacaacacgaaggggucccugcccaucaacgugaucgucuucgacggcaagagcaagugcgaggaguccagcgccaaguccgccagcguguacuacucccagcugaugugccagcccauccuccugcuggaccaggcgcucgugagcgacgucggcgacagcgccgagguggccgugaagauguucgacgccuacgucaacaccuucuccagcaccuucaacgugccgauggagaagcugaagacccugguggccacggcggaggccgagcucgccaagaacgucucccuggacaacgugcugagcaccuucaucuccgccgcgcggcagggguucguggacagcgacgucgagaccaaggacgugguggagugccucaagcugucccaccagagcgacaucgaggucaccggcgacuccugcaacaacuacaugcugacguacaacaagguggagaacaugaccccccgcgaccucggggccugcaucgacugcagcgcccggcacaucaacgcccagguggccaagucccacaacaucgcgcugaucuggaacgucaaggacuucaugagccuguccgagcagcuccgcaagcagauccgcagcgccgccaagaagaacaaccugcccuucaagcugaccugcgccaccacgcggcagguggugaacgucgugaccaccaagaucgcccucaagggcgggugaggacuagucccuguucccagagcccacuuuuuuuucuuuuuuugaaauaaaauagccugucuuucagaucucaaaggcucuuuucagagccaccaaaaaaaaaaaaaaaaaaaaaaaaaaaaaaaaaaaaaaaaaaaaaaaaaaaaaaaaaaaaaaaaaaaaaaaaaaaaaaaaaaaaaaaaaaaaaaaaaaaaa

SEQ ID NO: 19663 - RNA, 6113 nt, Artificial Sequence
  SARS-CoV-2__MT831471.1__non-structural protein 3 (NSP3) mRNA gc
aggagagucccgcagucggcguccagcggcucugcuuguucgugugugugucguugcaggccuuauucaagcuuaccauggcccccaccaaggugaccuucggcgacgacacggucaucgaggugcagggguacaagagcgugaacaucaccuucgagcuggacgagcgcaucgacaagguccucaacgagaagugcuccgccuacaccguggagcugggcaccgaggugaacgaguucgcgugcgucguggccgacgccgugaucaagacgcugcagccggucagcgagcuccugaccccccuggggaucgaccucgacgagugguccauggccaccuacuaccuguucgacgagagcggcgaguucaagcuggccucccacauguacugcagcuucuacccccccgacgaggacgaggaggagggggacugcgaggaggaggaguucgagccguccacccaguacgaguacggcacggaggacgacuaccagggcaagccccucgaguucggggcgaccagcgccgcccugcagcccgaggaggagcaggaggaggacuggcuggacgacgacucccagcagaccgugggccagcaggacgggagcgaggacaaccagaccacgaccauccagaccaucguggagguccagccccagcucgagauggagaucaccccgguggugcagacgaucgaggucaacuccuucagcggcuaccugaagcugaccgacaacguguacaucaagaacgccgacaucguggaggaggcgaagaaggucaagcccaccgugguggucaacgccgccaacguguaccucaagcacgggggcggcguggccggggcccugaacaaggcgaccaacaacgccaugcaggucgaguccgacgacuacaucgccacgaacggcccccugaagguggggggcagcugcguccucuccggccacaaccuggccaagcacugccugcacgugguggggcccaacgucaacaagggcgaggacauccagcuccugaagagcgccuacgagaacuucaaccagcacgaggugcugcucgcgccgcugcuguccgccgggaucuucggcgccgaccccauccacagccuccgggugugcgucgacaccgugcgcaccaacguguaccuggccgucuucgacaagaaccuguacgacaagcucguguccagcuuccuggagaugaagagcgagaagcagguggagcagaagaucgccgagauccccaaggaggaggucaagcccuucaucaccgaguccaagccgagcguggagcagcggaagcaggacgacaagaagaucaaggcgugcguggaggaggucacgaccacccuggaggagaccaaguuccucacggagaaccugcugcucuacaucgacaucaacgggaaccugcaccccgacuccgccacccuggugagcgacaucgacaucaccuuccucaagaaggacgcccccuacaucgugggcgacgucgugcaggagggcgugcugaccgccgucgugauccccacgaagaaggccgggggcaccaccgagaugcuggcgaaggcccuccgcaaggugccgaccgacaacuacaucacgaccuaccccgggcagggccugaacggguacaccgucgaggaggccaagaccgugcugaagaagugcaaguccgccuucuacauccuccccagcaucaucuccaacgagaagcaggagauccugggcaccgugagcuggaaccugcgggagaugcucgcgcacgccgaggagacgcgcaagcugaugcccgucugcguggagaccaaggccaucguguccaccauccagcggaaguacaagggcaucaagauccaggagggggucguggacuacggcgcccgcuucuacuucuacaccagcaagacgaccguggccucccugaucaacacccugaacgaccucaacgagacccuggucacgaugccgcugggguacgugacccacggccucaaccuggaggaggcggcccgguacaugcgcagccugaaggugcccgccaccgucuccgugagcucccccgacgccgugaccgccuacaacggguaccucacgagcuccagcaagacccccgaggagcacuucaucgagaccaucucccuggcgggcagcuacaaggacuggagcuacuccggccagagcacccagcuggggaucgaguuccucaagcggggcgacaaguccgucuacuacacgagcaacccgaccaccuuccaccuggacggggaggugaucaccuucgacaaccugaagacgcuccugucccugcgcgaggugcggaccaucaaggucuucaccaccguggacaacaucaaccuccacacgcagguggucgacaugagcaugaccuacggccagcaguucggccccaccuaccuggacggggccgacgugaccaagaucaagccccacaacucccacgagggcaagacguucuacgugcugccgaacgacgacacccuccgcgucgaggccuucgaguacuaccacaccaccgaccccagcuuccuggggcgguacauguccgcccugaaccacacgaagaaguggaaguacccccaggugaacggccucaccagcaucaagugggccgacaacaacugcuaccuggcgaccgcccugcucacccugcagcagaucgagcugaaguucaaccccccggcccuccaggacgccuacuaccgcgcgcgggccggggaggccgccaacuucugcgcccugauccuggcguacugcaacaagacggugggcgagcucggcgacguccgcgagaccauguccuaccuguuccagcacgccaaccuggacagcugcaagcgggugcucaacgucgugugcaagaccugcgggcagcagcagaccacccugaagggcguggaggccgucauguacauggggacgcuguccuacgagcaguucaagaagggcgugcagauccccugcaccugcgggaagcaggccaccaaguaccucgugcagcaggagagccccuucgucaugauguccgcccccccggcgcaguacgagcugaagcacggcaccuucacgugcgccagcgaguacaccggcaacuaccagugcgggcacuacaagcacaucaccuccaaggagacccuguacugcaucgacggcgcccuccugacgaagagcagcgaguacaaggggcccaucaccgacguguucuacaaggagaacuccuacaccaccacgaucaagcccgugaccuacaagcuggacggcgucgugugcaccgagaucgaccccaagcucgacaacuacuacaagaaggacaacagcuacuucaccgagcagccgaucgaccuggugcccaaccagcccuaccccaacgccuccuucgacaacuucaaguucgucugcgacaacaucaaguucgccgacgaccugaaccagcucacgggguacaagaagccggcgagccgcgagcugaaggugaccuucuuccccgaccugaacggcgacguggucgccaucgacuacaagcacuacacccccuccuucaagaagggcgccaagcuccugcacaagcccaucguguggcacgugaacaacgccaccaacaaggcgacguacaagccgaacaccuggugcauccggugccuguggagcaccaagcccgucgagaccuccaacagcuucgacgugcucaaguccgaggacgcccaggggauggacaaccuggccugcgaggaccugaagcccgugagcgaggaggucguggagaaccccacgauccagaaggacgugcucgagugcaacgucaagaccaccgagguggugggcgacaucauccugaagccggccaacaacucccugaagaucaccgaggaggucgggcacacggaccucauggccgcguacguggacaacagcucccugaccaucaagaagcccaacgagcugagccgcgugcucggccugaagacccuggccacccacgggcucgccgccgucaacuccgugcccugggacacgaucgccaacuacgcgaagccguuccugaacaagguggucagcaccaccaccaacaucgugacgcgcugccugaaccgggugugcaccaacuacaugcccuacuucuucacccuccugcugcagcucugcaccuucacccgcuccacgaacagccggaucaaggccuccaugcccaccaccaucgccaagaacaccgucaagagcgugggcaaguucugccuggaggccagcuucaacuaccugaagucccccaacuucagcaagcucaucaacaucaucaucugguuccugcugcucuccgugugccugggcagccugaucuacuccacggccgcgcucgggguccugaugagcaaccugggcaugccguccuacugcaccggguaccgcgagggcuaccucaacagcaccaacgugaccaucgccacguacugcaccggcuccauccccugcagcgugugccuguccgggcuggacagccucgacaccuaccccucccuggagaccauccagaucacgaucagcuccuucaagugggaccugaccgccuucggccucgucgccgagugguuccuggccuacauccuguucacccgguucuucuacgugcucgggcuggcggccaucaugcagcuguucuucagcuacuucgccgugcacuucaucuccaacagcuggcucauguggcugaucaucaaccugguccagauggcccccaucuccgcgauggugcgcauguacaucuucuucgccagcuucuacuacguguggaagagcuacguccacgugguggacggcugcaacuccagcaccugcaugaugugcuacaagcggaaccgcgccacgcgggucgagugcaccaccaucgugaacgggguccgccgguccuucuacguguacgccaacggcggcaagggguucugcaagcugcacaacuggaacugcgugaacugcgacaccuucugcgccggcagcacguucaucuccgacgaggucgcgcgcgaccucagccugcaguucaagcggccgaucaaccccaccgaccaguccagcuacaucguggacuccgugaccgucaagaacgggagcauccaccuguacuucgacaaggccggccagaagaccuacgagcgccacucccucagccacuucgugaaccuggacaaccugcgggccaacaacacgaaggggucccuccccaucaacgugaucgucuucgacggcaagagcaagugcgaggaguccagcgccaaguccgccagcguguacuacucccagcugaugugccagcccauccugcuccuggaccaggcgcuggugagcgacgucggcgacagcgccgagguggccgugaagauguucgacgccuacgucaacaccuucuccagcaccuucaacgugccgauggagaagcucaagacccugguggccacggcggaggccgagcuggccaagaacgucucccucgacaacgugcugagcaccuucaucuccgccgcgcgccagggguucguggacagcgacgucgagaccaaggacgugguggagugccugaagcucucccaccagagcgacaucgaggucaccggcgacuccugcaacaacuacaugcugacguacaacaagguggagaacaugaccccccgggaccugggggccugcaucgacugcagcgcccgccacaucaacgcccagguggccaagucccacaacaucgcgcucaucuggaacgucaaggacuucaugagccuguccgagcagcugcggaagcagauccgcagcgccgccaagaagaacaaccuccccuucaagcugaccugcgccaccacgcgccagguggugaacgucgugaccaccaagaucgcccugaagggcgggugaggacuagucccuguucccagagcccacuuuuuuuucuuuuuuugaaauaaaauagccugucuuucagaucucaaaggcucuuuucagagccaccaaaaaaaaaaaaaaaaaaaaaaaaaaaaaaaaaaaaaaaaaaaaaaaaaaaaaaaaaaaaaaaaaaaaaaaaaaaaaaaaaaaaaaaaaaaaaaaaaaaaa

SEQ ID NO: 19664 - RNA, 6113 nt, Artificial Sequence
  SARS-CoV-2__MT831542.1__non-structural protein 3 (NSP3) mRNA gc
aggagagucccgcagucggcguccagcggcucugcuuguucgugugugugucguugcaggccuuauucaagcuuaccauggcccccaccaaggugaccuucggcgacgacacggucaucgaggugcagggguacaagagcgugaacaucaccuucgagcuggacgagcgcaucgacaagguccucaacgagaagugcuccgccuacaccguggagcugggcaccgaggugaacgaguucgcgugcgucguggccgacgccgugaucaagacgcugcagccggucagcgagcuccugaccccccuggggaucgaccucgacgagugguccauggccaccuacuaccuguucgacgagagcggcgaguucaagcuggccucccacauguacugcagcuucuacccccccgacgaggacgaggaggagggggacugcgaggaggaggaguucgagccguccacccaguacgaguacggcacggaggacgacuaccagggcaagccccucgaguucggggcgaccagcgccgcccugcagcccgaggaggagcaggaggaggacuggcuggacgacgacucccagcagaccgugggccagcaggacgggagcgaggacaaccagaccacgaccauccagaccaucguggagguccagccccagcucgagauggagcugaccccgguggugcagacgaucgaggucaacuccuucagcggcuaccugaagcucaccgacaacguguacaucaagaacgccgacaucguggaggaggcgaagaaggucaagcccaccgugguggucaacgccgccaacguguaccugaagcacgggggcggcguggccggggcccugaacaaggcgaccaacaacgccaugcaggucgaguccgacgacuacaucgccacgaacggcccccucaagguggggggcagcugcguccuguccggccacaaccuggccaagcacugccuccacgugguggggcccaacgucaacaagggcgaggacauccagcugcugaagagcgccuacgagaacuucaaccagcacgaggugcuccuggcgccgcugcucuccgccgggaucuucggcgccgaccccauccacagccugcgggugugcgucgacaccgugcgcaccaacguguaccuggccgucuucgacaagaaccucuacgacaagcugguguccagcuuccuggagaugaagagcgagaagcagguggagcagaagaucgccgagauccccaaggaggaggucaagcccuucaucaccgaguccaagccgagcguggagcagcggaagcaggacgacaagaagaucaaggcgugcguggaggaggucacgaccacccucgaggagaccaaguuccugacggagaaccugcuccuguacaucgacaucaacgggaaccugcaccccgacuccgccacccucgugagcgacaucgacaucaccuuccugaagaaggacgcccccuacaucgugggcgacgucgugcaggagggcgugcugaccgccgucgugauccccacgaagaaggccgggggcaccaccgagaugcucgcgaaggcccugcgcaaggugccgaccgacaacuacaucacgaccuaccccgggcagggccugaacggguacaccgucgaggaggccaagaccgugcucaagaagugcaaguccgccuucuacauccugcccagcaucaucuccaacgagaagcaggagauccugggcaccgugagcuggaaccuccgggagaugcuggcgcacgccgaggagacgcgcaagcugaugcccgucugcguggagaccaaggccaucguguccaccauccagcggaaguacaagggcaucaagauccaggagggggucguggacuacggcgcccgcuucuacuucuacaccagcaagacgaccguggccucccugaucaacacccucaacgaccugaacgagacccuggucacgaugccgcucggguacgugacccacggccugaaccuggaggaggcggcccgguacaugcgcagccucaaggugcccgccaccgucuccgugagcucccccgacgccgugaccgccuacaacggguaccugacgagcuccagcaagacccccgaggagcacuucaucgagaccaucucccuggcgggcagcuacaaggacuggagcuacuccggccagagcacccagcucgggaucgaguuccugaagcggggcgacaaguccgucuacuacacgagcaacccgaccaccuuccaccuggacggggaggugaucaccuucgacaaccucaagacgcugcugucccuccgcgaggugcggaccaucaaggucuucaccaccguggacaacaucaaccugcacacgcagguggucgacaugagcaugaccuacggccagcaguucggccccaccuaccuggacggggccgacgugaccaagaucaagccccacaacucccacgagggcaagacguucuacgugcucccgaacgacgacacccugcgcgucgaggccuucgaguacuaccacaccaccgaccccagcuuccuggggcgguacauguccgcccucaaccacacgaagaaguggaaguacccccaggugaacggccugaccagcaucaagugggccgacaacaacugcuaccuggcgaccgcccuccugacccugcagcagaucgagcucaaguucaaccccccggcccugcaggacgccuacuaccgcgcgcgggccggggaggccgccaacuucugcgcccugauccucgcguacugcaacaagacggugggcgagcugggcgacguccgcgagaccauguccuaccuguuccagcacgccaaccucgacagcugcaagcgggugcugaacgucgugugcaagaccugcgggcagcagcagaccacccugaagggcguggaggccgucauguacauggggacgcucuccuacgagcaguucaagaagggcgugcagauccccugcaccugcgggaagcaggccaccaaguaccuggugcagcaggagagccccuucgucaugauguccgcccccccggcgcaguacgagcugaagcacggcaccuucacgugcgccagcgaguacaccggcaacuaccagugcgggcacuacaagcacaucaccuccaaggagacccucuacugcaucgacggcgcccugcugacgaagagcagcgaguacaaggggcccaucaccgacguguucuacaaggagaacuccuacaccaccacgaucaagcccgugaccuacaagcucgacggcgucgugugcaccgagaucgaccccaagcuggacaacuacuacaagaaggacaacagcuacuucaccgagcagccgaucgaccuggugcccaaccagcccuaccccaacgccuccuucgacaacuucaaguucgucugcgacaacaucaaguucgccgacgaccucaaccagcugacgggguacaagaagccggcgagccgcgagcugaaggugaccuucuuccccgaccucaacggcgacguggucgccaucgacuacaagcacuacacccccuccuucaagaagggcgccaagcugcugcacaagcccaucguguggcacgugaacaacgccaccaacaaggcgacguacaagccgaacaccuggugcguccggugccucuggagcaccaagcccguggagaccuccaacagcuucgacgugcugaaguccgaggacgcccaggggauggacaaccuggccugcgaggaccucaagcccgucagcgaggaggugguggagaaccccacgauccagaaggacguccuggagugcaacgugaagaccaccgagguggucggcgacaucauccugaagccggccaacaacucccucaagaucaccgaggagguggggcacacggaccugauggccgcguacguggacaacagcucccugaccaucaagaagcccaacgagcucagccgcguccugggccugaagacccucgccacccacgggcuggccgccgugaacuccgugcccugggacacgaucgccaacuacgcgaagccguuccugaacaaggucgugagcaccaccaccaacaucgugacgcgcugccucaaccgggucugcaccaacuacaugcccuacuucuucacccugcugcuccagcugugcaccuucacccgcuccacgaacagccggaucaaggccuccaugcccaccaccaucgccaagaacaccgugaagagcgugggcaaguucugccuggaggccagcuucaacuaccucaagucccccaacuucagcaagcugaucaacaucaucaucugguuccugcuccuguccgucugccugggcagccucaucuacuccacggccgcgcugggggugcugaugagcaaccucggcaugccguccuacugcaccggguaccgcgagggcuaccugaacagcaccaacgugaccaucgccacguacugcaccggcuccauccccugcagcgucugccuguccgggcucgacagccuggacaccuaccccucccuggagaccauccagaucacgaucagcuccuucaagugggaccucaccgccuucggccugguggccgagugguuccuggccuacauccucuucacccgguucuucuacgugcuggggcuggcggccaucaugcagcucuucuucagcuacuucgccguccacuucaucuccaacagcuggcugauguggcugaucaucaaccuggugcagauggcccccaucuccgcgauggugcgcauguacaucuucuucgccagcuucuacuacgucuggaagagcuacgugcacguggucgacggcugcaacuccagcaccugcaugaugugcuacaagcggaaccgcgccacgcggguggagugcaccaccaucgucaacggggugcgccgguccuucuacguguacgccaacggcggcaagggguucugcaagcuccacaacuggaacugcgucaacugcgacaccuucugcgccggcagcacguucaucuccgacgagguggcgcgcgaccugagccugcaguucaagcggccgaucaaccccaccgaccaguccagcuacaucguggacuccgucaccgugaagaacgggagcauccaccucuacuucgacaaggccggccagaagaccuacgagcgccacucccugagccacuucgugaaccuggacaaccuccgggccaacaacacgaaggggucccugcccaucaacgucaucguguucgacggcaagagcaagugcgaggaguccagcgccaaguccgccagcguguacuacucccagcugaugugccagcccauccuccugcuggaccaggcgcucgucagcgacgugggcgacagcgccgagguggccgucaagauguucgacgccuacgugaacaccuucuccagcaccuucaacgugccgauggagaagcugaagacccuggucgccacggcggaggccgagcucgccaagaacgugucccuggacaacgugcugagcaccuucaucuccgccgcgcgccagggguucgucgacagcgacguggagaccaaggacguggucgagugccucaagcugucccaccagagcgacaucgaggugaccggcgacuccugcaacaacuacaugcugacguacaacaagguggagaacaugaccccccgggaccucggggccugcaucgacugcagcgcccgccacaucaacgcccaggucgccaagucccacaacaucgcgcugaucuggaacgugaaggacuucaugagccuguccgagcagcuccggaagcagauccgcagcgccgccaagaagaacaaccugcccuucaagcugaccugcgccaccacgcgccagguggucaacguggugaccaccaagaucgcccucaagggcgggugaggacuagucccuguucccagagcccacuuuuuuuucuuuuuuugaaauaaaauagccugucuuucagaucucaaaggcucuuuucagagccaccaaaaaaaaaaaaaaaaaaaaaaaaaaaaaaaaaaaaaaaaaaaaaaaaaaaaaaaaaaaaaaaaaaaaaaaaaaaaaaaaaaaaaaaaaaaaaaaaaaaaa

SEQ ID NO: 19665 - RNA, 6113 nt, Artificial Sequence
  SARS-CoV-2__MT831569.1__non-structural protein 3 (NSP3) mRNA gc
aggagagucccgcagucggcguccagcggcucugcuuguucgugugugugucguugcaggccuuauucaagcuuaccauggcccccaccaaggugaccuucggcgacgacacggucaucgaggugcagggguacaagagcgugaacaucaccuucgagcuggacgagcgcaucgacaagguccucaacgagaagugcuccgccuacaccguggagcugggcaccgaggugaacgaguucgcgugcgucguggccgacgccgugaucaagacgcugcagccggucagcgagcuccugaccccccuggggaucgaccucgacgagugguccauggccaccuacuaccuguucgacgagagcggcgaguucaagcuggccucccacauguacugcagcuucuacccccccgacgaggacgaggaggagggggacugcgaggaggaggaguucgagccguccacccaguacgaguacggcacggaggacgacuaccagggcaagccccucgaguucggggcgaccagcgccgcccugcagcccgaggaggagcaggaggaggacuggcuggacgacgacucccagcagaccgugggccagcaggacgggagcgaggacaaccagaccacgaccauccagaccaucguggagguccagccccagcucgagauggagcugaccccgguggugcagacgaucgaggucaacuccuucagcggcuaccugaagcucaccgacaacguguacaucaagaacgccgacaucguggaggaggcgaagaaggucaagcccaccgugguggucaacgccgccaacaucuaccugaagcacgggggcggcguggccggggcccugaacaaggcgaccaacaacgccaugcagguggaguccgacgacuacaucgccacgaacggcccccucaaggucgggggcagcugcgugcuguccggccacaaccuggccaagcacugccuccacgucguggggcccaacgugaacaagggcgaggacauccagcugcugaagagcgccuacgagaacuucaaccagcacgagguccuccuggcgccgcugcucuccgccgggaucuucggcgccgaccccauccacagccugcgggugugcguggacaccguccgcaccaacguguaccuggccguguucgacaagaaccucuacgacaagcuggucuccagcuuccuggagaugaagagcgagaagcagguggagcagaagaucgccgagauccccaaggaggaggugaagcccuucaucaccgaguccaagccgagcgucgagcagcggaagcaggacgacaagaagaucaaggcgugcguggaggaggugacgaccacccucgaggagaccaaguuccugacggagaaccugcuccuguacaucgacaucaacgggaaccugcaccccgacuccgccacccucgucagcgacaucgacaucaccuuccugaagaaggacgcccccuacaucgugggcgacgugguccaggagggcgugcugaccgccguggucauccccacgaagaaggccgggggcaccaccgagaugcucgcgaaggcccugcgcaaggugccgaccgacaacuacaucacgaccuaccccgggcagggccugaacggguacaccguggaggaggccaagaccguccucaagaagugcaaguccgccuucuacauccugcccagcaucaucuccaacgagaagcaggagauccugggcaccgugagcuggaaccuccgggagaugcuggcgcacgccgaggagacgcgcaagcugaugcccgugugcgucgagaccaaggccaucguguccaccauccagcggaaguacaagggcaucaagauccaggaggggguggucgacuacggcgcccgcuucuacuucuacaccagcaagacgaccguggccucccugaucaacacccucaacgaccugaacgagacccuggugacgaugccgcucggguacgucacccacggccugaaccuggaggaggcggcccgguacaugcgcagccucaaggugcccgccaccguguccgucagcucccccgacgccgugaccgccuacaacggguaccugacgagcuccagcaagacccccgaggagcacuucaucgagaccaucucccuggcgggcagcuacaaggacuggagcuacuccggccagagcacccagcucgggaucgaguuccugaagcggggcgacaaguccguguacuacacgagcaacccgaccaccuuccaccuggacggggaggucaucaccuucgacaaccucaagacgcugcugucccuccgcgaggugcggaccaucaagguguucaccaccgucgacaacaucaaccugcacacgcaggugguggacaugagcaugaccuacggccagcaguucggccccaccuaccuggacggggccgacgucaccaagaucaagccccacaacucccacgagggcaagacguucuacgugcucccgaacgacgacacccugcgcguggaggccuucgaguacuaccacaccaccgaccccagcuuccuggggcgguacauguccgcccucaaccacacgaagaaguggaaguacccccaggucaacggccugaccagcaucaagugggccgacaacaacugcuaccuggcgaccgcccuccugacccugcagcagaucgagcucaaguucaaccccccggcccugcaggacgccuacuaccgcgcgcgggccggggaggccgccaacuucugcgcccugauccucgcguacugcaacaagacggugggcgagcugggcgacgugcgcgagaccauguccuaccuguuccagcacgccaaccucgacagcugcaagcggguccugaacguggucugcaagaccugcgggcagcagcagaccacccugaagggcguggaggccgugauguacauggggacgcucuccuacgagcaguucaagaagggcguccagauccccugcaccugcgggaagcaggccaccaaguaccuggugcagcaggagagccccuucgugaugauguccgcccccccggcgcaguacgagcugaagcacggcaccuucacgugcgccagcgaguacaccggcaacuaccagugcgggcacuacaagcacaucaccuccaaggagacccucuacugcaucgacggcgcccugcugacgaagagcagcgaguacaaggggcccaucaccgacgucuucuacaaggagaacuccuacaccaccacgaucaagcccgugaccuacaagcucgacggcguggucugcaccgagaucgaccccaagcuggacaacuacuacaagaaggacaacagcuacuucaccgagcagccgaucgaccuggugcccaaccagcccuaccccaacgccuccuucgacaacuucaaguucgugugcgacaacaucaaguucgccgacgaccucaaccagcugacgggguacaagaagccggcgagccgcgagcugaaggucaccuucuuccccgaccucaacggcgacgugguggccaucgacuacaagcacuacacccccuccuucaagaagggcgccaagcugcugcacaagcccaucgucuggcacgugaacaacgccaccaacaaggcgacguacaagccgaacaccuggugcauccggugccucuggagcaccaagcccguggagaccuccaacagcuucgacguccugaaguccgaggacgcccaggggauggacaaccuggccugcgaggaccucaagcccgugagcgaggagguggucgagaaccccacgauccagaaggacgugcuggagugcaacgugaagaccaccgaggucgugggcgacaucauccugaagccggccaacaacucccucaagaucaccgaggagguggggcacacggaccugauggccgcguacgucgacaacagcucccugaccaucaagaagcccaacgagcucagccgcgugcugggccugaagacccucgccacccacgggcuggccgccgugaacuccguccccugggacacgaucgccaacuacgcgaagccguuccugaacaagguggugagcaccaccaccaacaucgucacgcgcugccucaaccgggugugcaccaacuacaugcccuacuucuucacccugcugcuccagcugugcaccuucacccgcuccacgaacagccggaucaaggccuccaugcccaccaccaucgccaagaacaccgugaagagcgucggcaaguucugccuggaggccagcuucaacuaccucaagucccccaacuucagcaagcugaucaacaucaucaucugguuccugcuccuguccgugugccugggcagccucaucuacuccacggccgcgcugggggugcugaugagcaaccucggcaugccguccuacugcaccggguaccgcgagggcuaccugaacagcaccaacgucaccaucgccacguacugcaccggcuccauccccugcagcgugugccuguccgggcucgacagccuggacaccuaccccucccuggagaccauccagaucacgaucagcuccuucaagugggaccucaccgccuucggccugguggccgagugguuccuggccuacauccucuucacccgguucuucuacguccuggggcuggcggccaucaugcagcucuucuucagcuacuucgccgugcacuucaucuccaacagcuggcugauguggcugaucaucaaccuggugcagauggcccccaucuccgcgaugguccgcauguacaucuucuucgccagcuucuacuacguguggaagagcuacgugcacgucguggacggcugcaacuccagcaccugcaugaugugcuacaagcggaaccgcgccacgcggguggagugcaccaccaucgucaacggggugcgccgguccuucuacgucuacgccaacggcggcaagggguucugcaagcuccacaacuggaacugcgugaacugcgacaccuucugcgccggcagcacguucaucuccgacgagguggcgcgcgaccugagccugcaguucaagcggccgaucaaccccaccgaccaguccagcuacaucgucgacuccgugaccgugaagaacgggagcauccaccucuacuucgacaaggccggccagaagaccuacgagcgccacucccugagccacuucgucaaccuggacaaccuccgggccaacaacacgaaggggucccugcccaucaacgugaucguguucgacggcaagagcaagugcgaggaguccagcgccaaguccgccagcgucuacuacucccagcugaugugccagcccauccuccugcuggaccaggcgcucgugagcgacgugggcgacagcgccgaggucgccgugaagauguucgacgccuacgugaacaccuucuccagcaccuucaacgucccgauggagaagcugaagacccugguggccacggcggaggccgagcucgccaagaacgugucccuggacaacguccugagcaccuucaucuccgccgcgcgccagggguucguggacagcgacguggagaccaaggacgucguggagugccucaagcugucccaccagagcgacaucgaggugaccggcgacuccugcaacaacuacaugcugacguacaacaaggucgagaacaugaccccccgggaccucggggccugcaucgacugcagcgcccgccacaucaacgcccagguggccaagucccacaacaucgcgcugaucuggaacgugaaggacuucaugagccuguccgagcagcuccggaagcagauccgcagcgccgccaagaagaacaaccugcccuucaagcugaccugcgccaccacgcgccaggucgugaacguggucaccaccaagaucgcccucaagggcgggugaggacuagucccuguucccagagcccacuuuuuuuucuuuuuuugaaauaaaauagccugucuuucagaucucaaaggcucuuuucagagccaccaaaaaaaaaaaaaaaaaaaaaaaaaaaaaaaaaaaaaaaaaaaaaaaaaaaaaaaaaaaaaaaaaaaaaaaaaaaaaaaaaaaaaaaaaaaaaaaaaaaaa

SEQ ID NO: 19666 - RNA, 6113 nt, Artificial Sequence
  SARS-CoV-2__MT831579.1__non-structural protein 3 (NSP3) mRNA gc
aggagagucccgcagucggcguccagcggcucugcuuguucgugugugugucguugcaggccuuauucaagcuuaccauggcccccaccaaggugaccuucggcgacgacacggucaucgaggugcagggguacaagagcgugaacaucaccuucgagcuggacgagcgcaucgacaagguccucaacgagaagugcuccgccuacaccguggagcugggcaccgaggugaacgaguucgcgugcgucguggccgacgccgugaucaagacgcugcagccggucagcgagcuccugaccccccuggggaucgaccucgacgagugguccauggccaccuacuaccuguucgacgagagcggcgaguucaagcuggccucccacauguacugcagcuucuacccccccgacgaggacgaggaggagggggacugcgaggaggaggaguucgagccguccacccaguacgaguacggcacggaggacgacuaccagggcaagccccucgaguucggggcgaccagcgccgcccugcagcccgaggaggagcaggaggaggacuggcuggacgacgacucccagcagaccgugggccagcaggacgggagcgaggacaaccagaccacgaccauccagaccaucguggagguccagccccagcucgagauggagcugaccccgguggugcagacgaucgaggucaacuccuucagcggcuaccugaagcucaccgacaacguguacaucaagaacgccgacaucguggaggaggcgaagaaggucaagcccaccgugguggucaacgccgccaacguguaccugaagcacgggggcggcguggccggggcccugaacaaggcgaccaacaacgccaugcaggucgaguccgacgacuacaucgccacgaacggcccccucaagguggggggcagcugcguccuguccggccacaaccuggccaagcacugccuccacgugguggggcccaacgucaacaagggcgaggacauccagcugcugaagagcgccuacgagaacuucaaccagcacgaggugcuccuggcgccgcugcucuccgccgggaucuucggcgccgaccccauccacagccugcgggugugcgucgacaccgugcgcaccaacguguaccuggccgucuucgacaagaaccucuacgacaagcugguguccagcuuccuggagaugaagagcgagaagcagguggagcagaagaucgccgagauccccaaggaggaggucaagcccuucaucaccgaguccaagccgagcguggagcagcggaagcaggacgacaagaagaucaaggcgugcguggaggaggucacgaccacccucgaggagaccaaguuccugacggagaaccugcuccuguacaucgacaucaacgggaaccugcaccccgacuccgccacccucgugagcgacaucgacaucaccuuccugaagaaggacgcccccuacaucgugggcgacgucgugcaggagggcgugcugaccgccgucgugauccccacgaagaaggccgggggcaccaccgagaugcucgcgaaggcccugcgcaaggugccgaccgacaacuacaucacgaccuaccccgggcagggccugaacggguacaccgucgaggaggccaagaccgugcucaagaagugcaaguccgccuucuacauccugcccagcaucaucuccaacgagaagcaggagauccugggcaccgugagcuggaaccuccgggagaugcuggcgcacgccgaggagacgcgcaagcugaugcccgucugcguggagaccaaggccaucguguccaccauccagcggaaguacaagggcaucaagauccaggagggggucguggacuacggcgcccgcuucuacuucuacaccagcaagacgaccguggccucccugaucaacacccucaacaaccugaacgagacccuggucacgaugccgcucggguacgugacccacggccugaaccuggaggaggcggcccgguacaugcgcagccucaaggugcccgccaccgucuccgugagcucccccgacgccgugaccgccuacaacggguaccugacgagcuccagcaagacccccgaggagcacuucaucgagaccaucucccuggcgggcagcuacaaggacuggagcuacuccggccagagcacccagcucgggaucgaguuccugaagcggggcgacaaguccgucuacuacacgagcaacccgaccaccuuccaccuggacggggaggugaucaccuucgacaaccucaagacgcugcugucccuccgcgaggugcggaccaucaaggucuucaccaccguggacaacaucaaccugcacacgcagguggucgacaugagcaugaccuacggccagcaguucggccccaccuaccuggacggggccgacgugaccaagaucaagccccacaacucccacgagggcaagacguucuacgugcucccgaacgacgacacccugcgcgucgaggccuucgaguacuaccacaccaccgaccccagcuuccuggggcgguacauguccgcccucaaccacacgaagaaguggaaguacccccaggugaacggccugaccagcaucaagugggccgacaacaacugcuaccuggcgaccgcccuccugacccugcagcagaucgagcucaaguucaaccccccggcccugcaggacgccuacuaccgcgcgcgggccggggaggccgccaacuucugcgcccugauccucgcguacugcaacaagacggugggcgagcugggcgacguccgcgagaccauguccuaccuguuccagcacgccaaccucgacagcugcaagcgggugcugaacgucgugugcaagaccugcgggcagcagcagaccacccugaagggcguggaggccgucauguacauggggacgcucuccuacgagcaguucaagaagggcgugcagauccccugcaccugcgggaagcaggccaccaaguaccuggugcagcaggagagccccuucgucaugauguccgcccccccggcgcaguacgagcugaagcacggcaccuucacgugcgccagcgaguacaccggcaacuaccagugcgggcacuacaagcacaucaccuccaaggagacccucuacugcaucgacggcgcccugcugacgaagagcagcgaguacaaggggcccaucaccgacguguucuacaaggagaacuccuacaccaccacgaucaagcccgugaccuacaagcucgacggcgucgugugcaccgagaucgaccccaagcuggacaacuacuacaagaaggacaacagcuacuucaccgagcagccgaucgaccuggugcccaaccagcccuaccccaacgccuccuucgacaacuucaaguucgucugcgacaacaucaaguucgccgacgaccucaaccagcugacgggguacaagaagccggcgagccgcgagcugaaggugaccuucuuccccgaccucaacggcgacguggucgccaucgacuacaagcacuacacccccuccuucaagaagggcgccaagcugcugcacaagcccaucguguggcacgugaacaacgccaccaacaaggcgacguacaagccgaacaccuggugcauccggugccucuggagcaccaagcccgucgagaccuccaacagcuucgacgugcugaaguccgaggacgcccaggggauggacaaccuggccugcgaggaccucaagcccgugagcgaggaggucguggagaaccccacgauccagaaggacgugcuggagugcaacgucaagaccaccgagguggugggcgacaucauccugaagccggccaacaacucccucaagaucaccgaggaggucgggcacacggaccugauggccgcguacguggacaacagcucccugaccaucaagaagcccaacgagcucagccgcgugcugggccugaagacccucgccacccacgggcuggccgccgucaacuccgugcccugggacacgaucgccaacuacgcgaagccguuccugaacaagguggucagcaccaccaccaacaucgugacgcgcugccucaaccgggugugcaccaacuacaugcccuacuucuucacccugcugcuccagcugugcaccuucacccgcuccacgaacagccggaucaaggccuccaugcccaccaccaucgccaagaacaccgucaagagcgugggcaaguucugccuggaggccagcuucaacuaccucaagucccccaacuucagcaagcugaucaacaucaucaucugguuccugcuccuguccgugugccugggcagccucaucuacuccacggccgcgcuggggguccugaugagcaaccucggcaugccguccuacugcaccggguaccgcgagggcuaccugaacagcaccaacgugaccaucgccacguacugcaccggcuccauccccugcagcgugugccuguccgggcucgacagccuggacaccuaccccucccuggagaccauccagaucacgaucagcuccuucaagugggaccucaccgccuucggccuggucgccgagugguuccuggccuacauccucuucacccgguucuucuacgugcuggggcuggcggccaucaugcagcucuucuucagcuacuucgccgugcacuucaucuccaacagcuggcugauguggcugaucaucaaccugguccagauggcccccaucuccgcgauggugcgcauguacaucuucuucgccagcuucuacuacguguggaagagcuacguccacgugguggacggcugcaacuccagcaccugcaugaugugcuacaagcggaaccgcgccacgcgggucgagugcaccaccaucgugaacgggguccgccgguccuucuacguguacgccaacggcggcaagggguucugcaagcuccacaacuggaacugcgugaacugcgacaccuucugcgccggcagcacguucaucuccgacgaggucgcgcgcgaccugagccugcaguucaagcggccgaucaaccccaccgaccaguccagcuacaucguggacuccgugaccgucaagaacgggagcauccaccucuacuucgacaaggccggccagaagaccuacgagcgccacucccugagccacuucgugaaccuggacaaccuccgggccaacaacaucaaggggucccugcccaucaacgugaucgucuucgacggcaagagcaagugcgaggaguccagcgccaaguccgccagcguguacuacucccagcugaugugccagcccauccuccugcuggaccaggcgcucgugagcgacgucggcgacagcgccgagguggccgugaagauguucgacgccuacgucaacacguucuccagcaccuucaacgugccgauggagaagcugaagacccugguggccaccgcggaggccgagcucgccaagaacgucucccuggacaacgugcugagcacguucaucuccgccgcgcgccagggguucguggacagcgacgucgagaccaaggacgugguggagugccucaagcugucccaccagagcgacaucgaggucaccggcgacuccugcaacaacuacaugcugaccuacaacaagguggagaacaugacgccccgggaccucggggccugcaucgacugcagcgcccgccacaucaacgcccagguggccaagucccacaacaucgcgcugaucuggaacgucaaggacuucaugagccuguccgagcagcuccggaagcagauccgcagcgccgccaagaagaacaaccugcccuucaagcugaccugcgccaccacccgccagguggugaacgucgugacgaccaagaucgcccucaagggcgggugaggacuagucccuguucccagagcccacuuuuuuuucuuuuuuugaaauaaaauagccugucuuucagaucucaaaggcucuuuucagagccaccaaaaaaaaaaaaaaaaaaaaaaaaaaaaaaaaaaaaaaaaaaaaaaaaaaaaaaaaaaaaaaaaaaaaaaaaaaaaaaaaaaaaaaaaaaaaaaaaaaaaa

SEQ ID NO: 19667 - RNA, 6113 nt, Artificial Sequence
  SARS-CoV-2__MT831587.1__non-structural protein 3 (NSP3) mRNA gc
aggagagucccgcagucggcguccagcggcucugcuuguucgugugugugucguugcaggccuuauucaagcuuaccauggcccccaccaaggugaccuucggcgacgacacggucaucgaggugcagggguacaagagcgugaacaucaccuucgagcuggacgagcgcaucgacaagguccucaacgagaagugcuccgccuacaccguggagcugggcaccgaggugaacgaguucgcgugcgucguggccgacgccgugaucaagacgcugcagccggucagcgagcuccugaccccccuggggaucgaccucgacgagugguccauggccaccuacuaccuguucgacgagagcggcgaguucaagcuggccucccacauguacugcagcuucuacccccccgacgaggacgaggaggagggggacugcgaggaggaggaguucgagccguccacccaguacgaguacggcacggaggacgacuaccagggcaagccccucgaguucggggcgaccagcgccgcccugcagcccgaggaggagcaggaggaggacuggcuggacgacgacucccagcagaccgugggccagcaggacgggagcgaggacaaccagaccacgaccauccagaccaucguggagguccagccccagcucgagauggagcugaccccgguggugcagacgaucgaggucaacuccuucagcggcuaccugaagcucaccgacaacguguacaucaagaacgccgacaucguggaggaggcgaagaaggucaagcccaccgugguggucaacgccgccaacguguaccugaagcacgggggcggcguggccggggcccugaacaaggcgaccaacaacgccaugcaggucgaguccgacgacuacaucgccacgaacggcccccucaagguggggggcagcugcguccuguccggccacaaccuggccaagcacugccuccacgugguggggcccaacgucaacaagggcgaggacauccagcugcugaagagcgccuacgagaacuucaaccagcacgaggugcuccuggcgccgcugcucuccgccgggaucuucggcgccgaccccauccacagccugcgggugugcgucgacaccgugcgcaccaacguguaccuggccgucuucgacaagaaccucuacgacaagcugguguccagcuuccuggagaugaagagcgagaagcagguggagcagaagaucgccgagauccccaaggaggaggucaagcccuucaucaccgaguccaagccgagcguggagcagcggaagcaggacgacaagaagaucaaggcgugcguggaggaggucacgaccacccucgaggagaccaaguuccugacggagaaccugcuccuguacaucgacaucaacgggaaccugcaccccgacuccgccacccucgugagcgacaucgacaucaccuuccugaagaaggacgcccccuacaucgugggcgacgucgugcaggagggcgugcugaccgccgucgugauccccacgaagaaggccgggggcaccaccgagaugcucgcgaaggcccugcgcaaggugccgaccgacaacuacaucacgaccuaccccgggcagggccugaacggguacaccgucgaggaggccaagaccgugcucaagaagugcaaguccgccuucuacauccugcccagcaucaucuccaacgagaagcaggagauccugggcaccgugagcuggaaccuccgggagaugcuggcgcacgccgaggagacgcgcaagcugaugcccgucugcguggagaccaaggccaucguguccaccauccagcggaaguacaagggcaucaagauccaggagggggucguggacuacggcgcccgcuucuacuucuacaccagcaagacgaccguggccucccugaucaacacccucaacgaccugaacgagacccuggucacgaugccgcucggguacgugacccacggccugaaccuggaggaggcggcccgguacaugcgcagccucaaggugcccgccaccgucuccgugagcucccccgacgccgugaccgccuacaacggguaccugacgagcuccagcaagacccccgaggagcacuucaucgagaccaucucccuggcgggcagcuacaaggacuggagcuacuccggccagagcacccagcucgggaucgaguuccugaagcggggcgacaaguccgucuacuacacgagcaacccgaccaccuuccaccuggacggggaggugaucaccuucgacaaccucaagacgcugcugucccuccgcgaggugcggaccaucaaggucuucaccaccguggacaacaucaaccugcacacgcagguggucgacaugagcaugaccuacggccagcaguucggccugaccuaccucgacggggccgacgugaccaagaucaagccccacaacucccacgagggcaagacguucuacgugcugcccaacgacgacacccugcgcgucgaggccuucgaguacuaccacaccaccgacccgagcuuccucgggcgguacauguccgcccugaaccacacgaagaaguggaaguacccccaggugaacggccugaccagcaucaagugggccgacaacaacugcuaccucgcgaccgcccugcugacccuccagcagaucgagcugaaguucaacccccccgcccugcaggacgccuacuaccgcgcgcgggccggggaggccgccaacuucugcgcccucauccuggcguacugcaacaagacggugggcgagcugggcgacguccgcgagaccauguccuaccucuuccagcacgccaaccuggacagcugcaagcgggugcugaacgucgugugcaagaccugcgggcagcagcagaccacccucaagggcguggaggccgucauguacauggggacgcuguccuacgagcaguucaagaagggcgugcagaucccgugcaccugcgggaagcaggccaccaaguaccuggugcagcaggagagccccuucgucaugauguccgccccccccgcgcaguacgagcucaagcacggcaccuucacgugcgccagcgaguacaccggcaacuaccagugcgggcacuacaagcacaucaccuccaaggagacccuguacugcaucgacggcgcccugcucacgaagagcagcgaguacaaggggccgaucaccgacguguucuacaaggagaacuccuacaccaccacgaucaagcccgugaccuacaagcuggacggcgucgugugcaccgagaucgaccccaagcuggacaacuacuacaagaaggacaacagcuacuucaccgagcagcccaucgaccucgugccgaaccagcccuaccccaacgccuccuucgacaacuucaaguucgucugcgacaacaucaaguucgccgacgaccugaaccagcugacgggguacaagaagcccgcgagccgcgagcucaaggugaccuucuucccggaccugaacggcgacguggucgccaucgacuacaagcacuacacccccuccuucaagaagggcgccaagcugcuccacaagcccaucguguggcacgugaacaacgccaccaacaaggcgacguacaagcccaacaccuggugcauccggugccuguggagcaccaagccggucgagaccuccaacagcuucgacgugcugaaguccgaggacgcccaggggauggacaaccucgccugcgaggaccugaagcccgugagcgaggaggucguggagaaccccacgauccagaaggacgugcuggagugcaacgucaagaccaccgagguggugggcgacaucauccucaagcccgccaacaacucccugaagaucaccgaggaggucgggcacacggaccugauggccgcguacguggacaacagcucccucaccaucaagaagccgaacgagcugagccgcgugcugggccucaagacccuggccacccacgggcuggccgccgucaacuccgugcccugggacacgaucgccaacuacgcgaagcccuuccucaacaagguggucagcaccaccaccaacaucgugacgcgcugccugaaccgggugugcaccaacuacaugccguacuucuucacccugcuccugcagcugugcaccuucacccgcuccacgaacagccggaucaaggccuccaugcccaccaccaucgccaagaacaccgucaagagcgugggcaaguucugccucgaggccagcuucaacuaccugaagucccccaacuucagcaagcugaucaacaucaucaucugguuccuccugcuguccgugugccucggcagccugaucuacuccacggccgcgcuggggguccucaugagcaaccugggcaugcccuccuacugcaccggguaccgcgagggcuaccugaacagcaccaacgugaccaucgccacguacugcaccggcuccaucccgugcagcgugugccucuccgggcuggacagccuggacaccuaccccucccucgagaccauccagaucacgaucagcuccuucaagugggaccugaccgccuucggccuggucgccgagugguuccucgccuacauccuguucacccgguucuucuacgugcuggggcucgcggccaucaugcagcuguucuucagcuacuucgccgugcacuucaucuccaacagcuggcugauguggcugaucaucaaccucguccagauggcccccaucuccgcgauggugcgcauguacaucuucuucgccagcuucuacuacguguggaagagcuacguccacgugguggacggcugcaacuccagcaccugcaugaugugcuacaagcggaaccgcgccacgcgggucgagugcaccaccaucgugaacgggguccgccgguccuucuacguguacgccaacggcggcaagggguucugcaagcugcacaacuggaacugcgugaacugcgacaccuucugcgccggcagcacguucaucuccgacgaggucgcgcgcgaccugagccuccaguucaagcggcccaucaacccgaccgaccaguccagcuacaucguggacuccgugaccgucaagaacgggagcauccaccuguacuucgacaaggccggccagaagaccuacgagcgccacucccugagccacuucgugaaccucgacaaccugcgggccaacaacacgaaggggucccugcccaucaacgugaucgucuucgacggcaagagcaagugcgaggaguccagcgccaaguccgccagcguguacuacucccagcucaugugccagcccauccugcugcucgaccaggcgcuggugagcgacgucggcgacagcgccgagguggccgugaagauguucgacgccuacgucaacaccuucuccagcaccuucaacgugcccauggagaagcugaagacccucguggccacggcggaggccgagcuggccaagaacgucucccuggacaacgugcucagcaccuucaucuccgccgcgcgccagggguucguggacagcgacgucgagaccaaggacgugguggagugccugaagcugucccaccagagcgacaucgaggucaccggcgacuccugcaacaacuacaugcucacguacaacaagguggagaacaugaccccgcgggaccugggggccugcaucgacugcagcgcccgccacaucaacgcccagguggccaagucccacaacaucgcgcugaucuggaacgucaaggacuucaugagccucuccgagcagcugcggaagcagauccgcagcgccgccaagaagaacaaccugcccuucaagcucaccugcgccaccacgcgccagguggugaacgucgugaccaccaagaucgcccugaagggcgggugaggacuagucccuguucccagagcccacuuuuuuuucuuuuuuugaaauaaaauagccugucuuucagaucucaaaggcucuuuucagagccaccaaaaaaaaaaaaaaaaaaaaaaaaaaaaaaaaaaaaaaaaaaaaaaaaaaaaaaaaaaaaaaaaaaaaaaaaaaaaaaaaaaaaaaaaaaaaaaaaaaaaa

SEQ ID NO: 19668 - RNA, 6113 nt, Artificial Sequence
  SARS-CoV-2__MT831625.1__non-structural protein 3 (NSP3) mRNA gc
aggagagucccgcagucggcguccagcggcucugcuuguucgugugugugucguugcaggccuuauucaagcuuaccauggcccccaccaaggugaccuucggcgacgacacggucaucgaggugcagggguacaagagcgugaacaucaccuucgagcuggacgagcgcaucgacaagguccucaacgagaagugcuccgccuacaccguggagcugggcaccgaggugaacgaguucgcgugcgucguggccgacgccgugaucaagacgcugcagccggucagcgagcuccugaccccccuggggaucgaccucgacgagugguccauggccaccuacuaccuguucgacgagagcggcgaguucaagcuggccucccacauguacugcagcuucuacccccccgacgaggacgaggaggagggggacugcgaggaggaggaguucgagccguccacccaguacgaguacggcacggaggacgacuaccagggcaagccccucgaguucggggcgaccagcgccgcccugcagcccgaggaggagcaggaggaggacuggcuggacgacgacucccagcagaccgugggccagcaggacgggagcgaggacaaccagaccacgaccauccagaccaucguggagguccagccccagcucgagauggagcugaccccgguggugcagacgaucgaggucaacuccuucagcggcuaccugaagcucaccgacaacguguacaucaagaacgccgacaucguggaggaggcgaagaaggucaagcccaccgugguggucaacgccgccaacguguaccugaagcacgggggcggcguggccggggcccugaacaaggcgaccaacaacgccaugcaggucgaguccgacgacuacaucgccacgaacggcccccucaagguggggggcagcugcguccuguccggccacaaccuggccaagcacugccuccacgugguggggcccaacgucaacaagggcgaggacauccagcugcugaagagcgccuacgagaacuucaaccagcacgaggugcuccuggcgccgcugcucuccgccgggaucuucggcgccgaccccauccacagccugcgggugugcgucgacaccgugcgcaccaacguguaccuggccgucuucgacaagaaccucuacgacaagcugguguccagcuuccuggagaugaagagcgagaagcagguggagcagaagaucgccgagauccccaaggaggaggucaagcccuucaucaccgaguccaagccgagcguggagcagcggaagcaggacgacaagaagaucaaggcgugcguggaggaggucacgaccacccucgaggagaccaaguuccugacggagaaccugcuccuguacaucgacaucaacgggaaccugcaccccgacuccgccacccucgugagcgacaucgacaucaccuuccugaagaaggacgcccccuacaucgugggcgacgucgugcaggagggcgugcugaccgccgucgugauccccacgaagaaggccgggggcaccaccgagaugcucgcgaaggcccugcgcaaggugccgaccgacaacuacaucacgaccuaccccgggcagggccugaacggguacaccgucgaggaggccaagaccgugcucaagaagugcaaguccgccuucuacauccugcccagcaucaucuccaacgagaagcaggagauccugggcaccgugagcuggaaccuccgggagaugcuggcgcacgccgaggagacgcgcaagcugaugcccgucugcguggagaccaaggccaucguguccaccauccagcggaaguacaagggcaucaagauccaggagggggucguggacuacggcgcccgcuucuacuucuacaccagcaagacgaccguggccucccugaucaacacccucaacgaccugaacgagacccuggucacgaugccgcucggguacgugacccacggccugaaccuggaggaggcggcccgguacaugcgcagccucaaggugcccgccaccgucuccgugagcucccccgacgccgugaccgccuacaacggguaccugacgagcuccagcaagacccccgaggagcacuucaucgagaccaucucccuggcgggcagcuacaaggacuggagcuacuccggccagagcacccagcucgggaucgaguuccugaagcggggcgacaaguccgucuacuacacgagcaacccgaccaccuuccaccuggacggggaggugaucaccuucgacaaccucaagacgcugcugucccuccgcgaggugcggaccaucaaggucuucaccaccguggacaacaucaaccugcacacgcagguggucgacaugagcaugaccuacggccagcaguucggccccaccuaccuggacggggccgacgugaccaagaucaagccccacaacucccacgagggcaagacguucuacgugcucccgaacgacgacacccugcgcgucgaggccuucgaguacuaccacaccaccgaccccagcuuccuggggcgguacauguccgcccucaaccacacgaagaaguggaaguacccccaggugaacggccugaccagcaucaagugggccgacaacaacugcuaccuggcgaccgcccuccugacccugcagcagaucgagcucaaguucaaccccccggcccugcaggacgccuacuaccgcgcgcgggccggggaggccgccaacuucugcgcccugauccucgcguacugcaacaagacggugggcgagcugggcgacguccgcgagaccauguccuaccuguuccagcacgccaaccucgacagcugcaagcgggugcugaacgucgugugcaagaccugcgggcagcagcagaccacccugaagggcguggaggccgucauguacauggggacgcucuccuacgagcaguucaagaagggcgugcagauccccugcaccugcgggaagcaggugaccaaguaccugguccagcaggagagccccuucgugaugauguccgcccccccggcccaguacgagcugaagcacggcaccuucaucugcgcgagcgaguacacgggcaacuaccagugcgggcacuacaagcacaucaccuccaaggagacccucuacugcaucgacggcgcccugcugaccaagagcagcgaguacaaggggcccaucacggacguguucuacaaggagaacuccuacaccaccaccaucaagcccgucacguacaagcucgacggcguggugugcaccgagaucgaccccaagcuggacaacuacuacaagaaggacaacagcuacuucaccgagcagccgaucgaccugguccccaaccagcccuaccccaacgccuccuucgacaacuucaaguucgugugcgacaacaucaaguucgccgacgaccucaaccagcugaccggguacaagaagccggccagccgcgagcugaaggugacguucuuccccgaccucaacggcgacgucguggcgaucgacuacaagcacuacacccccuccuucaagaagggcgccaagcugcugcacaagcccaucguguggcacgucaacaacgccaccaacaaggccaccuacaagccgaacacguggugcauccggugccucuggagcaccaagcccguggagaccuccaacagcuucgacgugcugaaguccgaggacgcgcaggggauggacaaccuggccugcgaggaccucaagcccgucagcgaggaggugguggagaaccccaccauccagaaggacguccuggagugcaacgugaagacgaccgagguggucggcgacaucauccugaagccggccaacaacucccucaagaucaccgaggagguggggcacaccgaccugauggccgccuacguggacaacagcucccugacgaucaagaagcccaacgagcucagccgcguccugggccugaagacccucgcgacccacgggcuggccgccgugaacuccgugcccugggacaccaucgccaacuacgccaagccguuccugaacaaggucgugagcacgaccaccaacaucgugacccgcugccucaaccgggucugcacgaacuacaugcccuacuucuucacccugcugcuccagcugugcaccuucacccgcuccaccaacagccggaucaaggcguccaugcccacgaccaucgccaagaacaccgugaagagcgugggcaaguucugccuggaggccagcuucaacuaccucaagucccccaacuucagcaagcugaucaacaucaucaucugguuccugcuccuguccgucugccugggcagccucaucuacuccaccgccgcccugggggugcugaugagcaaccucggcaugccguccuacugcacgggguaccgcgagggcuaccugaacagcaccaacgugaccaucgcgaccuacugcacgggcuccauccccugcagcgucugccuguccgggcucgacagccuggacaccuaccccucccuggagaccauccagaucaccaucagcuccuucaagugggaccucacggccuucggccugguggccgagugguuccuggccuacauccucuucacccgguucuucuacgugcuggggcuggccgcgaucaugcagcucuucuucagcuacuucgccguccacuucaucuccaacagcuggcugauguggcugaucaucaaccuggugcagauggcccccaucuccgccauggugcgcauguacaucuucuucgcgagcuucuacuacgucuggaagagcuacgugcacguggucgacggcugcaacuccagcaccugcaugaugugcuacaagcggaaccgcgccacccggguggagugcacgaccaucgucaacggggugcgccgguccuucuacguguacgccaacggcggcaagggguucugcaagcuccacaacuggaacugcgucaacugcgacaccuucugcgccggcagcaccuucaucuccgacgagguggcccgcgaccugagccugcaguucaagcggccgaucaaccccacggaccaguccagcuacaucguggacuccgucaccgugaagaacgggagcauccaccucuacuucgacaaggcgggccagaagaccuacgagcgccacucccugagccacuucgugaaccuggacaaccuccgggccaacaacaccaaggggucccugcccaucaacgucaucguguucgacggcaagagcaagugcgaggaguccagcgccaaguccgccagcguguacuacucccagcugaugugccagcccauccuccugcuggaccaggcccucgucagcgacgugggcgacagcgcggagguggccgucaagauguucgacgccuacgugaacacguucuccagcaccuucaacgugccgauggagaagcugaagacccuggucgccaccgccgaggcggagcucgccaagaacgugucccuggacaacgugcugagcacguucaucuccgccgcccgccagggguucgucgacagcgacguggagaccaaggacguggucgagugccucaagcugucccaccagagcgacaucgaggugaccggcgacuccugcaacaacuacaugcugaccuacaacaagguggagaacaugacgccccgggaccucggggcgugcaucgacugcagcgcccgccacaucaacgcccaggucgccaagucccacaacaucgcccugaucuggaacgugaaggacuucaugagccuguccgagcagcuccggaagcagauccgcagcgcggccaagaagaacaaccugcccuucaagcugaccugcgccaccacccgccagguggucaacguggugacgaccaagaucgcccucaagggcgggugaggacuagucccuguucccagagcccacuuuuuuuucuuuuuuugaaauaaaauagccugucuuucagaucucaaaggcucuuuucagagccaccaaaaaaaaaaaaaaaaaaaaaaaaaaaaaaaaaaaaaaaaaaaaaaaaaaaaaaaaaaaaaaaaaaaaaaaaaaaaaaaaaaaaaaaaaaaaaaaaaaaaa

SEQ ID NO: 19669 - RNA, 6113 nt, Artificial Sequence
  SARS-CoV-2__MT831632.1__non-structural protein 3 (NSP3) mRNA gc
aggagagucccgcagucggcguccagcggcucugcuuguucgugugugugucguugcaggccuuauucaagcuuaccauggcccccaccaaggugaccuucggcgacgacacggucaucgaggugcagggguacaagagcgugaacaucaccuucgagcuggacgagcgcaucgacaagguccucaacgagaagugcuccgccuacaccguggagcugggcaccgaggugaacgaguucgcgugcgucguggccgacgccgugaucaagacgcugcagccggucagcgagcuccugaccccccuggggaucgaccucgacgagugguccauggccaccuacuaccuguucgacgagagcggcgaguucaagcuggccucccacauguacugcagcuucuacccccccgacgaggacgaggaggagggggacugcgaggaggaggaguucgagccguccacccaguacgaguacggcacggaggacgacuaccagggcaagccccucgaguucggggcgaccagcgccgcccugcagcccgaggaggagcaggaggaggacuggcuggacgacgacucccagcagaccgugggccagcaggacgggagcgaggacaaccagaccacgaccauccagaccaucguggagguccagccccagcucgagauggagcugaccccgguggugcagacgaucgaggucaacuccuucagcggcuaccugaagcucaccgacaacguguacaucaagaacgccgacaucguggaggaggcgaagaaggucaagcccaccgugguggucaacgccgccaacguguaccugaagcacgggggcggcguggccggggcccugaacaaggcgaccaacaacgccaugcaggucgaguccgacgacuacaucgccacgaacggcccccucaagguggggggcagcugcguccuguccggccacaaccuggccaagcacugccuccacgugguggggcccaacgucaacaagggcgaggacauccagcugcugaagagcgccuacgagaacuucaaccagcacgaggugcuccuggcgccgcugcucuccgccgggaucuucggcgccgaccccauccacagccugcgggugugcgucgacaccgugcgcaccaacguguaccuggccgucuucgacaagaaccucuacgacaagcugguguccagcuuccuggagaugaagagcgagaagcagguggagcagaagaucgccgagauccccaaggaggaggucaagcccuucaucaccgaguccaagccgagcguggagcagcggaagcaggacgacaagaagaucaaggcgugcguggaggaggucacgaccacccucgaggagaccaaguuccugacggagaaccugcuccuguacaucgacaucaacgggaaccugcaccccgacuccgccacccucgugagcgacaucgacaucaccuuccugaagaaggacgcccccuacaucgugggcgacgucgugcaggagggcgugcugaccgccgucgugauccccacgaagaaggccgggggcaccaccgagaugcucgcgaaggcccugcgcaaggugccgaccgacaacuacaucacgaccuaccccgggcagggccugaacggguacaccgucgaggaggccaagaccgugcucaagaagugcaaguccgccuucuacauccugcccagcaucaucuccaacgagaagcaggagauccugggcaccgugagcuggaaccuccgggagaugcuggcgcacgccgaggagacgcgcaagcugaugcccgucugcguggagaccaaggccaucguguccaccauccagcggaaguacaagggcaucaagauccaggagggggucguggacuacggcgcccgcuucuacuucuacaccagcaagacgaccguggccucccugaucaacacccucaacgaccugaacgagacccuggucacgaugccgcucggguacgugacccacggccugaaccuggaggaggcggcccgguacaugcgcagccucaaggugcccgccaccgucuccgugagcucccccgacgccgugaccgccuacaacggguaccugacgagcuccagcaagacccccgaggagcacuucaucgagaccaucucccuggcgggcagcuacaaggacuggagcuacuccggccagagcacccagcucgggaucgaguuccugaagcggggcgacaaguccgucuacuacacgagcaacccgaccaccuuccaccuggacggggaggugaucaccuucgacaaccucaagacgcugcugucccuccgcgaggugcggaccaucaaggucuucaccaccguggacaacaucaaccugcacacgcagguggucgacaugagcaugaccuacggccagcaguucggccccaccuaccuggacggggccgacgugaccaagaucaagccccacaacucccacgagggcaagacguucuacgugcucccgaacgacgacacccugcgcgucgaggccuucgaguacuaccacaccaccgaccccagcuuccuggggcgguacauguccgcccucaaccacacgaagaaguggaaguacccccaggugaacggccugaccagcaucaagugggccgacaacaacugcuaccuggcgaccgcccuccugacccugcagcagaucgagcucaaguucaaccccccggcccugcaggacgccuacuaccgcgcgcgggccggggaggccgccaacuucugcgcccugauccucgcguacugcaacaagacggugggcgagcugggcgacguccgcgagaccauguccuaccuguuccagcacgccaaccucgacagcugcaagcgggugcugaacgucgugugcaagaccugcgggcagcagcagaccacccugaagggcguggaggccgucauguacauggggacgcucuccuacgagcaguucaagaagggcgugcagauccccugcaccugcgggaagcaggccaccaaguaccuggugcagcaggagagccccuucgucaugauguccgcccccccggcgcaguacgagcugaagcacggcaccuucacgugcgccagcgaguacaccggcaacuaccagugcgggcacuacaagcacaucaccuccaaggagacccucuacugcaucgacggcgcccugcugacgaagagcagcgaguacaaggggcccaucaccgacguguucuacaaggagaacuccuacaccaccacgaucaagcccgugaccuacaagcucgacggcgucgugugcaccgagaucgaccccaagcuggacaacuacuacaagaaggacaacagcuacuucaccgagcagccgaucgaccuggugcccaaccagcccuaccccaacgccuccuucgacaacuucaaguucgucugcgacaacaucaaguucgccgacgaccucaaccagcugacgggguacaagaagccggcgagccgcgagcugaaggugaccuucuuccccgaccucaacggcgacguggucgccaucgacuacaagcacuacacccccuccuucaagaagggcgccaagcugcugcacaagcccaucguguggcacgugaacaacgccaccaacaaggcgacguacaagccgaacaccuggugcauccggugccucuggagcaccaagcccgucgagaccuccaacagcuucgacgugcugaaguccgaggacgcccaggggauggacaaccuggccugcgaggaccucaagcccgugagcgaggaggucguggagaaccccacgauccagaaggacgugcuggagugcaacgucaagaccaccgagguggugggcgacaucauccugaagccggccaacaacucccucaagaucaccgaggaggucgggcacacggaccugauggccgcguacguggacaacagcucccugaccaucaagaagcccaacgagcucagccgcgugcugggccugaagacccucgccauccacgggcuggccgccgucaacuccgugcccugggacaccaucgccaacuacgcgaagccguuccugaacaagguggucagcacgaccaccaacaucgugacccgcugccucaaccgggugugcacgaacuacaugcccuacuucuucacccugcugcuccagcugugcaccuucacccgcuccaccaacagccggaucaaggccuccaugcccacgaccaucgccaagaacaccgucaagagcgugggcaaguucugccuggaggccagcuucaacuaccucaagucccccaacuucagcaagcugaucaacaucaucaucugguuccugcuccuguccgugugccugggcagccucaucuacuccaccgccgcgcuggggguccugaugagcaaccucggcaugccguccuacugcacgggguaccgcgagggcuaccugaacagcaccaacgugaccaucgccaccuacugcacgggcuccauccccugcagcgugugccuguccgggcucgacagccuggacaccuaccccucccuggagaccauccagaucaccaucagcuccuucaagugggaccucacggccuucggccuggucgccgagugguuccuggccuacauccucuucacccgguucuucuacgugcuggggcuggcggccaucaugcagcucuucuucagcuacuucgccgugcacuucaucuccaacagcuggcugauguggcugaucaucaaccugguccagauggcccccaucuccgcgauggugcgcauguacaucuucuucgccagcuucuacuacguguggaagagcuacguccacgugguggacggcugcaacuccagcaccugcaugaugugcuacaagcggaaccgcgccacccgggucgagugcacgaccaucgugaacgggguccgccgguccuucuacguguacgccaacggcggcaagggguucugcaagcuccacaacuggaacugcgugaacugcgacaccuucugcgccggcagcaccuucaucuccgacgaggucgcgcgcgaccugagccugcaguucaagcggccgaucaaccccacggaccaguccagcuacaucguggacuccgugaccgucaagaacgggagcauccaccucuacuucgacaaggccggccagaagaccuacgagcgccacucccugagccacuucgugaaccuggacaaccuccgggccaacaacaccaaggggucccugcccaucaacgugaucgucuucgacggcaagagcaagugcgaggaguccagcgccaaguccgccagcguguacuacucccagcugaugugccagcccauccuccugcuggaccaggcgcucgugagcgacgucggcgacagcgccgagguggccgugaagauguucgacgccuacgucaacacguucuccagcaccuucaacaucccgauggagaagcugaagacccugguggccaccgcggaggccgagcucgccaagaacgugucccuggacaacguccugagcacguucaucuccgccgcgcgccagggguucguggacagcgacguggagaccaaggacgucguggagugccucaagcugucccaccagagcgacaucgaggugaccggcgacuccugcaacaacuacaugcugaccuacaacaaggucgagaacaugacgccccgggaccucggggccugcaucgacugcagcgcccgccacaucaacgcccagguggccaagucccacaacaucgcgcugaucuggaacgugaaggacuucaugagccuguccgagcagcuccggaagcagauccgcagcgccgccaagaagaacaaccugcccuucaagcugaccugcgccaccacccgccaggucgugaacguggucacgaccaagaucgcccucaagggcgggugaggacuagucccuguucccagagcccacuuuuuuuucuuuuuuugaaauaaaauagccugucuuucagaucucaaaggcucuuuucagagccaccaaaaaaaaaaaaaaaaaaaaaaaaaaaaaaaaaaaaaaaaaaaaaaaaaaaaaaaaaaaaaaaaaaaaaaaaaaaaaaaaaaaaaaaaaaaaaaaaaaaaa

SEQ ID NO: 19670 - RNA, 6113 nt, Artificial Sequence
  SARS-CoV-2__MT831729.1__non-structural protein 3 (NSP3) mRNA gc
aggagagucccgcagucggcguccagcggcucugcuuguucgugugugugucguugcaggccuuauucaagcuuaccauggcccccaccaaggugaccuucggcgacgacacggucaucgaggugcagggguacaagagcgugaacaucaccuucgagcuggacgagcgcaucgacaagguccucaacgagaagugcuccgccuacaccguggagcugggcaccgaggugaacgaguucgcgugcgucguggccgacgccgugaucaagacgcugcagccggucagcgagcuccugaccccccuggggaucgaccucgacgagugguccauggccaccuacuaccuguucgacgagagcggcgaguucaagcuggccucccacauguacugcagcuucuacccccccgacgaggacgaggaggagggggacugcgaggaggaggaguucgagccguccacccaguacgaguacggcacggaggacgacuaccagggcaagccccucgaguucggggcgaccagcgccgcccugcagcccgaggaggagcaggaggaggacuggcuggacgacgacucccagcagaccgugggccagcaggacgggagcgaggacaaccagaccacgaccauccagaccaucguggagguccagccccagcucgagauggagcugaccccgguggugcagacgaucgaggucaacuccuucagcggcuaccugaagcucaccgacaacguguacaucaagaacgccgacaucguggaggaggcgaagaaggucaagcccaccgugguggucaacgccgccaacguguaccugaagcacgggggcggcguggccggggcccugaacaaggcgaccaacaacgccaugcaggucgaguccgacgacuacaucgccacgaacggcccccucaagguggggggcagcugcguccuguccggccacaaccuggccaagcacugccuccacgugguggggcccaacgucaacaagggcgaggacauccagcugcugaagagcgccuacgagaacuucaaccagcacgaggugcuccuggcgccgcugcucuccgccgggaucuucggcgccgaccccauccacagccugcgggugugcgucgacaccgugcgcaccaacguguaccuggccgucuucgacaagaaccucuacgacaagcugguguccagcuuccuggagaugaagagcgagaagcagguggagcagaagaucgccgagauccccaaggaggaggucaagcccuucaucaccgaguccaagccgagcguggagcagcggaagcaggacgacaagaagaucaaggcgugcguggaggaggucacgaccacccucgaggagaccaaguuccugacggagaaccugcuccuguacaucgacaucaacgggaaccugcaccccgacuccgccacccucgugagcgacaucgacaucaccuuccugaagaaggacgcccccuacaucgugggcgacgucgugcaggagggcgugcugaccgccgucgugauccccacgaagaaggccgggggcaccaccgagaugcucgcgaaggcccugcgcaaggugccgaccgacaacuacaucacgaccuaccccgggcagggccugaacggguacaccgucgaggaggccaagaccgugcucaagaagugcaaguccgccuucuacauccugcccagcaucaucuccaacgagaagcaggagauccugggcaccgugagcuggaaccuccgggagaugcuggcgcacgccgaggagacgcgcaagcugaugcccgucugcguggagaccaaggccaucguguccaccauccagcggaaguacaagggcaucaagauccaggagggggucguggacuacggcgcccgcuucuacuucuacaccagcaagacgaccguggccucccugaucaacacccucaacgaccugaacgagacccuggucacgaugccgcucggguacgugacccacggccugaaccuggaggaggcggcccgguacaugcgcagccucaaggugcccgccaccgucuccgugagcucccccgacgccgugaccgccuacaacggguaccugacgagcuccagcaagacccccgaggagcacuucaucgagaccaucucccuggcgggcagcuacaaggacuggagcuacuccggccagagcacccagcucgggaucgaguuccugaagcggggcgacaaguccgucuacuacacgagcaacccgaccaccuuccaccuggacggggaggugaucaccuucgacaaccucaagacgcugcugucccuccgcgaggugcggaccaucaaggucuucaccaccguggacaacaucaaccugcacacgcagguggucgacaugagcaugaccuacggccagcaguucggccccaccuaccuggacggggccgacgugaccaagaucaagccccacaacucccacgagggcaagacguucuacgugcucccgaacgacgacacccugcgcgucgaggccuucgaguacuaccacaccaccgaccccagcuuccuggggcgguacauguccgcccucaaccacacgaagaaguggaaguacccccaggugaacggccugaccagcaucaagugggccgacaacaacugcuaccuggcgaccgcccuccugacccugcagcagaucgagcucaaguucaaccccccggcccugcaggacgccuacuaccgcgcgcgggccggggaggccgccaacuucugcgcccugauccucgcguacugcaacaagacggugggcgagcugggcgacguccgcgagaccauguccuaccuguuccagcacgccaaccucgacagcugcaagcgggugcugaacgucgugugcaagaccugcgggcagcagcagaccacccugaagggcguggaggccgucauguacauggggacgcucuccuacgagcaguucaagaagggcgugcagauccccugcaccugcgggaagcaggccaccaaguaccuggugcagcaggagagccccuucgucaugauguccgcccccccggcgcaguacgagcugaagcacggcaccuucacgugcgccagcgaguacaccggcaacuaccagugcgggcacuacaagcacaucaccuccaaggagacccucuacugcaucgacggcgcccugcugacgaagagcagcgaguacaaggggcccaucaccgacguguucuacaaggagaacuccuacaccaccacgaucaagcccgugaccuacaagcucgacggcgucgugugcaccgagaucgaccccaagcuggacaacuacuacaagaaggacaacagcuacuucaccgagcagccgaucgaccuggugcccaaccagcccuaccccaacgccuccuucgacaacuucaaguucgucugcgacaacaucaaguucgccgacgaccucaaccagcugacgggguacaagaagccggcgagccgcgagcugaaggugaccuucuuccccgaccucaacggcgacguggucgccaucgacuacaagcacuacacccccuccuucaagaagggcgccaagcugcugcacaagcccaucguguggcacgugaacaacgccaccaacaaggcgacguacaagccgaacaccuggugcauccggugccucuggagcaccaagcccgucgagaccuccaacagcuucgacgugcugaaguccgaggacgcccaggggauggacaaccuggccugcgaggaccucaagcccgugagcgaggaggucguggagaaccccacgauccagaaggacgugcuggagugcaacgucaagaccaccgagguggugggcgacaucauccugaagccggccaacaacucccucaagaucaccgaggaggucgggcacacggaccugauggccgcguacguggacaacagcucccugaccaucaagaagcccaacgagcucagccgcgugcugggccugaagacccucgccacccacgggcuggccgccgucaacuccgugcccugggacacgaucgccaacuacgcgaagccguuccugaacaagguggucagcaccaccaccaacaucgugacgcgcugccucaaccgggugugcaccaacuacaugcccuacuucuucacccugcugcuccagcugugcaccuucacccgcuccacgaacagccggaucaaggccuccaugcccaccaccaucgccaagaacaccgucaagagcgugggcaaguucugccuggaggccagcuucaacuaccucaagucccccaacuucagcaagcugaucaacaucaucaucugguuccugcuccuguccgugugccugggcagccucaucuacuccacggccgcgcuggggguccugaugagcaaccucggcaugccguccuacugcaccggguaccgcgagggcuaccugaacagcaccaacgugaccaucgccacguacugcaccggcuccauccccugcagcgugugccuguccgggcucgacagccuggacaccuaccccucccuggagaccauccagaucacgaucagcuccuucaagugggaccucaccgccuucggccuggucgccgagugguuccuggccuacauccucuucacccgguucuucuacgugcuggggcuggcggccaucaugcagcucuucuucagcuacuucgccgugcacuucaucuccaacagcuggcugaucuggcugaucaucaaccugguccagauggcccccaucuccgcgauggugcgcauguacaucuucuucgccagcuucuacuacguguggaagagcuacguccacgugguggacggcugcaacuccagcaccugcaugaugugcuacaagcggaaccgcgccacgcgggucgagugcaccaccaucgugaacgggguccgccgguccuucuacguguacgccaacggcggcaagggguucugcaagcuccacaacuggaacugcgugaacugcgacaccuucugcgccggcagcacguucaucuccgacgaggucgcgcgcgaccugagccugcaguucaagcggccgaucaaccccaccgaccaguccagcuacaucguggacuccgugaccgucaagaacgggagcauccaccucuacuucgacaaggccggccagaagaccuacgagcgccacucccugagccacuucgugaaccuggacaaccuccgggccaacaacacgaaggggucccugcccaucaacgugaucgucuucgacggcaagagcaagugcgaggaguccagcgccaaguccgccagcguguacuacucccagcugaugugccagcccauccuccugcuggaccaggcgcucgugagcgacgucggcgacagcgccgagguggccgugaagauguucgacgccuacgucaacaccuucuccagcaccuucaacgugccgauggagaagcugaagacccugguggccacggcggaggccgagcucgccaagaacgucucccuggacaacgugcugagcaccuucaucuccgccgcgcgccagggguucguggacagcgacgucgagaccaaggacgugguggagugccucaagcugucccaccagagcgacaucgaggucaccggcgacuccugcaacaacuacaugcugacguacaacaagguggagaacaugaccccccgggaccucggggccugcaucgacugcagcgcccgccacaucaacgcccagguggccaagucccacaacaucgcgcugaucuggaacgucaaggacuucaugagccuguccgagcagcuccggaagcagauccgcagcgccgccaagaagaacaaccugcccuucaagcugaccugcgccaccacgcgccagguggugaacgucgugaccaccaagaucgcccucaagggcgggugaggacuagucccuguucccagagcccacuuuuuuuucuuuuuuugaaauaaaauagccugucuuucagaucucaaaggcucuuuucagagccaccaaaaaaaaaaaaaaaaaaaaaaaaaaaaaaaaaaaaaaaaaaaaaaaaaaaaaaaaaaaaaaaaaaaaaaaaaaaaaaaaaaaaaaaaaaaaaaaaaaaaa

SEQ ID NO: 19671 - RNA, 6113 nt, Artificial Sequence
  SARS-CoV-2__MT831867.1__non-structural protein 3 (NSP3) mRNA gc
aggagagucccgcagucggcguccagcggcucugcuuguucgugugugugucguugcaggccuuauucaagcuuaccauggcccccaccaaggugaccuucggcgacgacacggucaucgaggugcagggguacaagagcgugaacaucaccuucgagcuggacgagcgcaucgacaagguccucaacgagaagugcuccgccuacaccguggagcugggcaccgaggugaacgaguucgcgugcgucguggccgacgccgugaucaagacgcugcagccggucagcgagcuccugaccccccuggggaucgaccucgacgagugguccauggccaccuacuaccuguucgacgagagcggcgaguucaagcuggccucccacauguacugcagcuucuacccccccgacgaggacgaggaggagggggacugcgaggaggaggaguucgagccguccacccaguacgaguacggcacggaggacgacuaccagggcaagccccucgaguucggggcgaccagcgccgcccugcagcccgaggaggagcaggaggaggacuggcuggacgacgacucccagcagaccgugggccagcaggacgggagcgaggacaaccagaccacgaccauccagaccaucguggagguccagccccagcucgagauggagcugaccccgguggugcagacgaucgaggucaacuccuucagcggcuaccugaagcucaccgacaacguguacaucaagaacgccgacaucguggaggaggcgaagaaggucaagcccaccgugguggucaacgccgccaacguguaccugaagcacgggggcggcguggccggggcccugaacaaggcgaccaacaacgccaugcaggucgaguccgacgacuacaucgccacgaacggcccccucaagguggggggcagcugcguccuguccggccacaaccuggccaagcacugccuccacgugguggggcccaacgucaacaagggcgaggacauccagcugcugaagagcgccuacgagaacuucaaccagcacgaggugcuccuggcgccgcugcucuccgccgggaucuucggcgccgaccccauccacagccugcgggugugcgucgacaccgugcgcaccaacguguaccuggccgucuucgacaagaaccucuacgacaagcugguguccagcuuccuggagaugaagagcgagaagcagguggagcagaagaucgccgagauccccaaggaggaggucaagcccuucaucaccgaguccaagccgagcguggagcagcggaagcaggacgacaagaagaucaaggcgugcguggaggaggucacgaccacccucgaggagaccaaguuccugacggagaaccugcuccuguacaucgacaucaacgggaaccugcaccccgacuccgccacccucgugagcgacaucgacaucaccuuccugaagaaggacgcccccuacaucgugggcgacgucgugcaggagggcgugcugaccgccgucgugauccccacgaagaaggccgggggcaccaccgagaugcucgcgaaggcccugcgcaaggugccgaccgacaacuacaucacgaccuaccccgggcagggccugaacggguacaccgucgaggaggccaagaccgugcucaagaagugcaaguccgccuucuacauccugcccagcaucaucuccaacgagaagcaggagauccugggcaccgugagcuggaaccuccgggagaugcuggcgcacgccgaggagacgcgcaagcugaugcccgucugcguggagaccaaggccaucguguccaccauccagcggaaguacaagggcaucaagauccaggagggggucguggacuacggcgcccgcuucuacuucuacaccagcaagacgaccguggccucccugaucaacacccucaacgaccugaacgagacccuggucacgaugccgcucggguacgugacccacggccugaaccuggaggaggcggcccgguacaugcgcagccucaaggugcccgccaccgucuccgugagcucccccgacgccgugaccgccuacaacggguaccugacgagcuccagcaagacccccgaggagcacuucaucgagaccaucucccuggcgggcagcuacaaggacuggagcuacuccggccagagcacccagcucgggaucgaguuccugaagcggggcgacaaguccgucuacuacacgagcaacccgaccaccuuccaccuggacggggaggugaucaccuucgacaaccucaagacgcugcugucccuccgcgaggugcggaccaucaaggucuucaccaccguggacaacaucaaccugcacacgcagguggucgacaugagcaugaccuacggccagcaguucggccccaccuaccuggacggggccgacgugaccaagaucaagccccacaacucccacgagggcaagacguucuacgugcucccgaacgacgacacccugcgcgucgaggccuucgaguacuaccacaccaccgaccccagcuuccuggggcgguacauguccgcccucaaccacacgaagaaguggaaguacccccaggugaacggccugaccagcaucaagugggccgacaacaacugcuaccuggcgaccgcccuccugacccugcagcagaucgagcucaaguucaaccccccggcccugcaggacgccuacuaccgcgcgcgggccggggaggccgccaacuucugcgcccugauccucgcguacugcaacaagacggugggcgagcugggcgacguccgcgagaccauguccuaccuguuccagcacgccaaccucgacagcugcaagcgggugcugaacgucgugugcaagaccugcgggcagcagcagaccacccugaagggcguggaggccgucauguacauggggacgcucuccuacgagcaguucaagaagggcgugcagauccccugcaccugcgggaagcaggccaccaaguaccuggugcagcaggagagccccuucgucaugauguccgcccccccggcgcaguacgagcugaagcacggcaccuucacgugcgccagcgaguacaccggcaacuaccagugcgggcacuacaagcacaucaccuccaaggagacccucuacugcaucgacggcgcccugcugacgaagagcagcgaguacaaggggcccaucaccgacguguucuacaaggagaacuccuacaccaccacgaucaagcccgugaccuacaagcucgacggcgucgugugcaccgagaucgaccccaagcuggacaacuacuacaagaaggacaacagcuacuucaccgagcagccgaucgaccuggugcccaaccagcccuaccccaacgccuccuucgacaacuucaaguucgucugcgacaacaucaaguucgccgacgaccucaaccagcugacgggguacaagaagccggcgagccgcgagcugaaggugaccuucuuccccgaccucaacggcgacguggucgccaucgacuacaagcacuacacccccuccuucaagaagggcgccaagcugcugcacaagcccaucguguggcacgugaacaacgccaccaacaaggcgacguacaagccgaacaccuggugcauccggugccucuggagcaccaagcccgucgagaccuccaacagcuucgacgugcugaaguccgaggacgcccaggggauggacaaccuggccugcgaggaccucaagcccgugagcgaggaggucguggagaaccccacgauccagaaggacgugcuggagugcaacgucaagaccaccgagguggugggcgacaucauccugaagccggccaacaacucccucaagaucaccgaggaggucgggcacacggaccugauggccgcguacguggacaacagcucccugaccaucaagaagcccaacgagcucagccgcgugcugggccugaagacccucgccacccacgggcuggccgccgucaacuccgugcccugggacacgaucgccaacuacgcgaagccguuccugaacaagguggucagcaccaccaccaacaucgugacgcgcugccucaaccgggugugcaccaacuacaugcccuacuucuucacccugcugcuccagcugugcaccuucacccgcuccacgaacagccggaucaaggccuccaugcccaccaccaucgccaagaacaccgucaagagcgugggcaaguucugccuggaggccagcuucaacuaccucaagucccccaacuucagcaagcugaucaacaucaucaucugguuccugcuccuguccgugugccugggcagccucaucuacuccacggccgcgcuggggguccugaugagcaaccucggcaugccguccuacugcaccggguaccgcgagggcuaccugaacagcaccaacgugaccaucgccacguacugcaccggcuccauccccugcagcgugugccuguccgggcucgacagccuggacaccuaccccucccuggagaccauccagaucacgaucagcuccuucaagugggaccucaccgccuucggccuggucgccgagugguuccuggccuacauccucuucacccgguucuucuacgugcuggggcuggcggccaucaugcagcucuucuucagcuacuucgccgugcacuucaucuccaacagcuggcugauguggcugaucaucaaccugguccagauggcccccaucuccgcgauggugcgcauguacaucuucuucgccagcuucuacuacguguggaagagcuacguccacgugguggacggcugcaacuccagcaccugcaugaugugcuacaagcggaaccgcgccacgcgggucgagugcaccaccaucgugaacgggguccgccgguccuucuacguguacgccaacggcggcaagggguucugcaagcuccacaacuggaacugcgugaacugcgacaccuucugcgccggcagcacguucaucuccgacgaggucgcgcgcgaccugagccugcaguucaagcggccgaucaaccccaccgaccaguccagcuacaucguggacuccgugaccgucaagaacgggagcauccaccucuacuucgacaaggccggccagaagaccuacgagcgccacucccugagccacuucgugaaccuggacaaccuccgggccaacaacacgaaggggucccugcccaucaacgugaucgucuucgacggcaagagcaagugcgaggaguccagcgccaaguccgccagcguguacuacucccagcugaugugccagcccauccuccugcuggaccaggcgcucgugagcgacgucggcgacagcgccgagguggccgugaagauguucgacgccuacgucaacaccuucucccugaccuucaacgugccgauggagaagcugaagacccucguggccacggcggaggccgagcuggccaagaacgucagccuggacaacgugcucuccaccuucaucagcgccgcgcgccagggguucguggacuccgacgucgagaccaaggacgugguggagugccugaagcugagccaccaguccgacaucgaggucaccggcgacagcugcaacaacuacaugcucacguacaacaagguggagaacaugaccccccgggaccugggggccugcaucgacugcuccgcccgccacaucaacgcccagguggccaagagccacaacaucgcgcugaucuggaacgucaaggacuucaugucccucagcgagcagcugcggaagcagauccgcuccgccgccaagaagaacaaccugcccuucaagcucaccugcgccaccacgcgccagguggugaacgucgugaccaccaagaucgcccugaagggcgggugaggacuagucccuguucccagagcccacuuuuuuuucuuuuuuugaaauaaaauagccugucuuucagaucucaaaggcucuuuucagagccaccaaaaaaaaaaaaaaaaaaaaaaaaaaaaaaaaaaaaaaaaaaaaaaaaaaaaaaaaaaaaaaaaaaaaaaaaaaaaaaaaaaaaaaaaaaaaaaaaaaaaa

SEQ ID NO: 19672 - RNA, 6113 nt, Artificial Sequence
  SARS-CoV-2__MT833962.1__non-structural protein 3 (NSP3) mRNA gc
aggagagucccgcagucggcguccagcggcucugcuuguucgugugugugucguugcaggccuuauucaagcuuaccauggcccccaccaaggugaccuucggcgacgacacggucaucgaggugcagggguacaagagcgugaacaucaccuucgagcuggacgagcgcaucgacaagguccucaacgagaagugcuccgccuacaccguggagcugggcaccgaggugaacgaguucgcgugcgucguggccgacgccgugaucaagacgcugcagccggucagcgagcuccugaccccccuggggaucgaccucgacgagugguccauggccaccuacuaccuguucgacgagagcggcgaguucaagcuggccucccacauguacugcagcuucuacccccccgacgaggacgaggaggagggggacugcgaggaggaggaguucgagccguccacccaguacgaguacggcacggaggacgacuaccagggcaagccccucgaguucggggcgaccagcgccgcccugcagcccgaggaggagcaggaggaggacuggcuggacgacgacucccagcagaccgugggccagcaggacgggagcgaggacaaccagaccacgaccauccagaccaucguggagguccagccccagcucgagauggagcugaccccgguggugcagacgaucgaggucaacuccuucagcggcuaccugaagcucaccgacaacguguacaucaagaacgccgacaucguggaggaggcgaagaaggucaagcccaccgugguggucaacgccgccaacguguaccugaagcacgggggcggcguggccggggcccugaacaaggcgaccaacaacgccaugcaggucgaguccgacgacuacaucgccacgaacggcccccucaagguggggggcagcugcguccuguccggccacaaccuggccaagcacugccuccacgugguggggcccaacgucaacaagggcgaggacauccagcugcugaagagcgccuacgagaacuucaaccagcacgaggugcuccuggcgccgcugcucuccgccgggaucuucggcgccgaccccauccacagccugcgggugugcgucgacaccgugcgcaccaacguguaccuggccgucuucgacaagaaccucuacgacaagcugguguccagcuuccuggagaugaagagcgagaagcagguggagcagaagaucgccgagauccccaaggaggaggucaagcccuucaucaucgaguccaagccgagcguggagcagcggaagcaggacgacaagaagaucaaggcgugcguggaggaggucaccacgacccucgaggagaccaaguuccugaccgagaaccugcuccuguacaucgacaucaacgggaaccugcaccccgacuccgccacgcucgugagcgacaucgacaucaccuuccugaagaaggacgcccccuacaucgugggcgacgucgugcaggagggcgugcugaccgccgucgugauccccaccaagaaggccgggggcacgaccgagaugcucgcgaaggcccugcgcaaggugccgaccgacaacuacaucaccacguaccccgggcagggccugaacggguacaccgucgaggaggccaagaccgugcucaagaagugcaaguccgccuucuacauccugcccagcaucaucuccaacgagaagcaggagauccugggcaccgugagcuggaaccuccgggagaugcuggcgcacgccgaggagacccgcaagcugaugcccgucugcguggagacgaaggccaucguguccaccauccagcggaaguacaagggcaucaagauccaggagggggucguggacuacggcgcccgcuucuacuucuacaccagcaagaccacgguggccucccugaucaacacccucaacgaccugaacgagacccuggucaccaugccgcucggguacgugacgcacggccugaaccuggaggaggcggcccgguacaugcgcagccucaaggugcccgccaccgucuccgugagcucccccgacgccgugaccgccuacaacggguaccugaccagcuccagcaagacgcccgaggagcacuucaucgagaccaucucccuggcgggcagcuacaaggacuggagcuacuccggccagagcacccagcucgggaucgaguuccugaagcggggcgacaaguccgucuacuacaccagcaacccgacgaccuuccaccuggacggggaggugaucaccuucgacaaccucaagacccugcugucccuccgcgaggugcggacgaucaaggucuucaccaccguggacaacaucaaccugcacacccagguggucgacaugagcaugacguacggccagcaguucggccccaccuaccuggacggggccgacgugaccaagaucaagccccacaacucccacgagggcaagaccuucuacgugcucccgaacgacgacacgcugcgcgucgaggccuucgaguacuaccacaccaccgaccccagcuuccuggggcgguacauguccgcccucaaccacaccaagaaguggaaguacccccaggugaacggccugacgagcaucaagugggccgacaacaacugcuaccuggcgaccgcccuccugacccugcagcagaucgagcucaaguucaaccccccggcccugcaggacgccuacuaccgcgcgcgggccggggaggccgccaacuucugcgcccugauccucgcguacugcaacaagaccgugggcgagcugggcgacguccgcgagacgauguccuaccuguuccagcacgccaaccucgacagcugcaagcgggugcugaacgucgugugcaagaccugcgggcagcagcagaccacccugaagggcguggaggccgucauguacauggggacccucuccuacgagcaguucaagaagggcgugcagauccccugcacgugcgggaagcaggccaccaaguaccuggugcagcaggagagccccuucgucaugauguccgcccccccggcgcaguacgagcugaagcacggcaccuucaccugcgccagcgaguacacgggcaacuaccagugcgggcacuacaagcacaucaccuccaaggagacccucuacugcaucgacggcgcccugcugaccaagagcagcgaguacaaggggcccaucacggacguguucuacaaggagaacuccuacaccaccaccaucaagcccgugacguacaagcucgacggcgucgugugcaccgagaucgaccccaagcuggacaacuacuacaagaaggacaacagcuacuucaccgagcagccgaucgaccuggugcccaaccagcccuaccccaacgccuccuucgacaacuucaaguucgucugcgacaacaucaaguucgccgacgaccucaaccagcugaccggguacaagaagccggcgagccgcgagcugaaggugacguucuuccccgaccucaacggcgacguggucgccaucgacuacaagcacuacacccccuccuucaagaagggcgccaagcugcugcacaagcccaucguguggcacgugaacaacgccaccaacaaggcgaccuacaagccgaacacguggugcauccggugccucuggagcaccaagcccgucgagaccuccaacagcuucgacgugcugaaguccgaggacgcccaggggauggacaaccuggccugcgaggaccucaagcuggugagcgaggaggucguggagaaccccaccauccagaaggacgugcuggagugcaacgucaagacgaccgagguggugggcgacaucauccucaagcccgccaacaacucccugaagaucaucgaggaggucgggcacaccgaccugauggccgcguacguggacaacagcucccucaccaucaagaagccgaacgagcugagccgcgugcugggccucaagacgcuggccacccacgggcuggccgccgucaacuccgugcccugggacaccaucgccaacuacgcgaagcccuuccucaacaagguggucagcaccacgaccaacaucgugacccgcugccugaaccgggugugcaccaacuacaugccguacuucuucacgcugcuccugcagcugugcaccuucacccgcuccaccaacagccggaucaaggccuccaugcccaccacgaucgccaagaacaccgucaagagcgugggcaaguucugccucgaggccagcuucaacuaccugaagucccccaacuucagcaagcugaucaacaucaucaucugguuccuccugcuguccgugugccucggcagccugaucuacuccaccgccgcgcuggggguccucaugagcaaccugggcaugcccuccuacugcaccggguaccgcgagggcuaccugaacagcacgaacgugaccaucgccaccuacugcaccggcuccaucccgugcagcgugugccucuccgggcuggacagccuggacacguaccccucccucgagaccauccagaucaccaucagcuccuucaagugggaccugaccgccuucggccuggucgccgagugguuccucgccuacauccuguucacgcgguucuucuacgugcuggggcucgcggccaucaugcagcuguucuucagcuacuucgccgugcacuucaucuccaacagcuggcugauguggcugaucaucaaccucguccagauggcccccaucuccgcgauggugcgcauguacaucuucuucgccagcuucuacuacguguggaagagcuacguccacgugguggacggcugcaacuccagcaccugcaugaugugcuacaagcggaaccgcgccacccgggucgagugcaccacgaucgugaacgggguccgccgguccuucuacguguacgccaacggcggcaagggguucugcaagcugcacaacuggaacugcgugaacugcgacaccuucugcgccggcagcaccuucaucuccgacgaggucgcgcgcgaccugagccuccaguucaagcggcccaucaacccgaccgaccaguccagcuacaucguggacuccgugacggucaagaacgggagcauccaccuguacuucgacaaggccggccagaagaccuacgagcgccacucccugagccacuucgugaaccucgacaaccugcgggccaacaacaccaaggggucccugcccaucaacgugaucgucuucgacggcaagagcaagugcgaggaguccagcgccaaguccgccagcguguacuacucccagcucaugugccagcccauccugcugcucgaccaggcgcuggugagcgacgucggcgacagcgccgagguggccgugaagauguucgacgccuacgucaacaccuucuccagcacguucaacgugcccauggagaagcugaagacccucguggccaccgcggaggccgagcuggccaagaacgucucccuggacaacgugcucagcaccuucaucuccgccgcgcgccagggguucguggacagcgacgucgagacgaaggacgugguggagugccugaagcugucccaccagagcgacaucgaggucaccggcgacuccugcaacaacuacaugcucaccuacaacaagguggagaacaugaccccgcgggaccugggggccugcaucgacugcagcgcccgccacaucaacgcccagguggccaagucccacaacaucgcgcugaucuggaacgucaaggacuucaugagccucuccgagcagcugcggaagcagauccgcagcgccgccaagaagaacaaccugcccuucaagcucacgugcgccaccacccgccagguggugaacgucgugaccacgaagaucgcccugaagggcgggugaggacuagucccuguucccagagcccacuuuuuuuucuuuuuuugaaauaaaauagccugucuuucagaucucaaaggcucuuuucagagccaccaaaaaaaaaaaaaaaaaaaaaaaaaaaaaaaaaaaaaaaaaaaaaaaaaaaaaaaaaaaaaaaaaaaaaaaaaaaaaaaaaaaaaaaaaaaaaaaaaaaaa

SEQ ID NO: 19673 - RNA, 6113 nt, Artificial Sequence
  SARS-CoV-2__MT833985.1__non-structural protein 3 (NSP3) mRNA gc
aggagagucccgcagucggcguccagcggcucugcuuguucgugugugugucguugcaggccuuauucaagcuuaccauggcccccaccaaggugaccuucggcgacgacacggucaucgaggugcagggguacaagagcgugaacaucaccuucgagcuggacgagcgcaucgacaagguccucaacgagaagugcuccgccuacaccguggagcugggcaccgaggugaacgaguucgcgugcgucguggccgacgccgugaucaagacgcugcagccggucagcgagcuccugaccccccuggggaucgaccucgacgagugguccauggccaccuacuaccuguucgacgagagcggcgaguucaagcuggccucccacauguacugcagcuucuacccccccgacgaggacgaggaggagggggacugcgaggaggaggaguucgagccguccacccaguacgaguacggcacggaggacgacuaccagggcaagccccucgaguucggggcgaccagcgccgcccugcagcccgaggaggagcaggaggaggacuggcuggacgacgacucccagcagaccgugggccagcaggacgggagcgaggacaaccagaccacgaccauccagaccaucguggagguccagccccagcucgagauggagcugaccccgguggugcagacgaucgaggucaacuccuucagcggcuaccugaagcucaccgacaacguguacaucaagaacgccgacaucguggaggaggcgaagaaggucaagcccaccgugguggucaacgccgccaacguguaccugaagcacgggggcggcguggccggggcccugaacaaggcgaccaacaacgccaugcaggucgaguccgacgacuacaucgccacgaacggcccccucaagguggggggcagcugcguccuguccggccacaaccuggccaagcacugccuccacgugguggggcccaacgucaacaagggcgaggacauccagcugcugaagagcgccuacgagaacuucaaccagcacgaggugcuccuggcgccgcugcucuccgccgggaucuucggcgccgaccccauccacagccugcgggugugcgucgacaccgugcgcaccaacguguaccuggccgucuucgacaagaaccucuacgacaagcugguguccagcuuccuggagaugaagagcgagaagcagguggagcagaagaucgccgagauccccaaggaggaggucaagcccuucaucaccgaguccaagccgagcguggagcagcggaagcaggacgacaagaagaucaaggcgugcguggaggaggucacgaccacccucgaggagaccaaguuccugacggagaaccugcuccuguacaucgacaucaacgggaaccugcaccccgacuccgccacccucgugagcgacaucgacaucaccuuccugaagaaggacgcccccuacaucgugggcgacgucgugcaggagggcgugcugaccgccgucgugauccccacgaagaaggccgggggcaccaccgagaugcucgcgaaggcccugcgcaaggugccgaccgacaacuacaucacgaccuaccccgggcagggccugaacggguacaccgucgaggaggccaagaccgugcucaagaagugcaaguccgccuucuacauccugcccagcaucaucuccaacgagaagcaggagauccugggcaccgugagcuggaaccuccgggagaugcuggcgcacgccgaggagacgcgcaagcugaugcccgucugcguggagaccaaggccaucguguccaccauccagcggaaguacaagggcaucaagauccaggagggggucguggacuacggcgcccgcuucuacuucuacaccagcaagacgaccguggccucccugaucaacacccucaacgaccugaacgagacccuggucacgaugccgcucggguacgugacccacggccugaaccuggaggaggcggcccgguacaugcgcagccucaaggugcccgccaccgucuccgugagcucccccgacgccgugaccgccuacaacggguaccugacgagcuccagcaagacccccgaggagcacuucaucgagaccaucucccuggcgggcagcuacaaggacuggagcuacuccggccagagcacccagcucgggaucgaguuccugaagcggggcgacaaguccgucuacuacacgagcaacccgaccaccuuccaccuggacggggaggugaucaccuucgacaaccucaagacgcugcugucccuccgcgaggugcggaccaucaaggucuucaccaccguggacaacaucaaccugcacacgcagguggucgacaugagcaugaccuacggccagcaguucggccccaccuaccuggacggggccgacgugaccaagaucaagccccacaacucccacgagggcaagacguucuacgugcucccgaacgacgacacccugcgcgucgaggccuucgaguacuaccacaccaccgaccccagcuuccuggggcgguacauguccgcccucaaccacacgaagaaguggaaguacccccaggugaacggccugaccagcaucaagugggccgacaacaacugcuaccuggcgaccgcccuccugacccugcagcagaucgagcucaaguucaaccccccggcccugcaggacgccuacuaccgcgcgcgggccggggaggccgccaacuucugcgcccugauccucgcguacugcaacaagacggugggcgagcugggcgacguccgcgagaccauguccuaccuguuccagcacgccaaccucgacagcugcaagcgggugcugaacgucgugugcaagaccugcgggcagcagcagaccacccugaagggcguggaggccgucauguacauggggacgcucuccuacgagcaguucaagaagggcgugcagauccccugcaccugcgggaagcaggccaccaaguaccuggugcagcaggagagccccuucgucaugauguccgcccccccggcgcaguacgagcugaagcacggcaccuucacgugcgccagcgaguacaccggcaacuaccagugcgggcacuacaagcacaucaccuccaaggagacccucuacugcaucgacggcgcccugcugacgaagagcagcgaguacaaggggcccaucaccgacguguucuacaaggagaacuccuacaccaccacgaucaagcccgugaccuacaagcucgacggcgucgugugcaccgagaucgaccccaagcuggacaacuacuacaagaaggacaacagcuacuucaccgagcagccgaucgaccuggugcccaaccagcccuaccccaacgccuccuucgacaacuucaaguucgucugcgacaacaucaaguucgccgacgaccucaaccagcugacgggguacaagaagccggcgagccgcgagcugaaggugaccuucuuccccgaccucaacggcgacguggucgccaucgacuacaagcacuacacccccuccuucaagaagggcgccaagcugcugcacaagcccaucguguggcacgugaacaacgccaccaacaaggcgacguacaagccgaacaccuggugcauccggugccucuggagcaccaagcccgucgagaccuccaacagcuucgacgugcugaaguccgaggacgcccaggggauggacaaccuggccugcgaggaccucaagcccgugagcgaggaggucguggagaaccccacgauccagaaggacgugcuggagugcaacgucaagaccaccgagguggugggcgacaucauccugaagccggccaacaacucccucaagaucaucgaggaggucgggcacaccgaccugauggccgcguacguggacaacagcucccugacgaucaagaagcccaacgagcucagccgcgugcugggccugaagacccucgccacccacgggcuggccgccgucaacuccgugcccugggacaccaucgccaacuacgcgaagccguuccugaacaagguggucagcacgaccaccaacaucgugacccgcugccucaaccgggugugcacgaacuacaugcccuacuucuucacccugcugcuccagcugugcaccuucacccgcuccaccaacagccggaucaaggccuccaugcccacgaccaucgccaagaacaccgucaagagcgugggcaaguucugccuggaggccagcuucaacuaccucaagucccccaacuucagcaagcugaucaacaucaucaucugguuccugcuccuguccgugugccugggcagccucaucuacuccaccgccgcgcuggggguccugaugagcaaccucggcaugccguccuacugcacgggguaccgcgagggcuaccugaacagcaccaacgugaccaucgccaccuacugcacgggcuccauccccugcagcgugugccuguccgggcucgacagccuggacaccuaccccucccuggagaccauccagaucaccaucagcuccuucaagugggaccucacggccuucggccuggucgccgagugguuccuggccuacauccucuucacccgguucuucuacgugcuggggcuggcggccaucaugcagcucuucuucagcuacuucgccgugcacuucaucuccaacagcuggcugauguggcugaucaucaaccugguccagauggcccccaucuccgcgauggugcgcauguacaucuucuucgccagcuucuacuacguguggaagagcuacguccacgugguggacggcugcaacuccagcaccugcaugaugugcuacaagcggaaccgcgccacccgggucgagugcacgaccaucgugaacgggguccgccgguccuucuacguguacgccaacggcggcaagggguucugcaagcuccacaacuggaacugcgugaacugcgacaccuucugcgccggcagcaccuucaucuccgacgaggucgcgcgcgaccugagccugcaguucaagcggccgaucaaccccacggaccaguccagcuacaucguggacuccgugaccgucaagaacgggagcauccaccucuacuucgacaaggccggccagaagaccuacgagcgccacucccugagccacuucgugaaccuggacaaccuccgggccaacaacaccaaggggucccugcccaucaacgugaucgucuucgacggcaagagcaagugcgaggaguccagcgccaaguccgccagcguguacuacucccagcugaugugccagcccauccuccugcuggaccaggcgcucgugagcgacgucggcgacagcgccgagguggccgugaagauguucgacgccuacgucaacacguucuccagcaccuucaacgugccgauggagaagcugaagacccugguggccaccgcggaggccgagcucgccaagaacgucucccuggacaacgugcugagcacguucaucuccgccgcgcgccagggguucguggacagcgacgucgagaccaaggacgugguggagugccucaagcugucccaccagagcgacaucgaggucaccggcgacuccugcaacaacuacaugcugaccuacaacaagguggagaacaugacgccccgggaccucggggccugcaucgacugcagcgcccgccacaucaacgcccagguggccaagucccacaacaucgcgcugaucuggaacgucaaggacuucaugagccuguccgagcagcuccggaagcagauccgcagcgccgccaagaagaacaaccugcccuucaagcugaccugcgccaccacccgccagguggugaacgucgugacgaccaagaucgcccucaagggcgggugaggacuagucccuguucccagagcccacuuuuuuuucuuuuuuugaaauaaaauagccugucuuucagaucucaaaggcucuuuucagagccaccaaaaaaaaaaaaaaaaaaaaaaaaaaaaaaaaaaaaaaaaaaaaaaaaaaaaaaaaaaaaaaaaaaaaaaaaaaaaaaaaaaaaaaaaaaaaaaaaaaaaa

SEQ ID NO: 19674 - RNA, 6113 nt, Artificial Sequence
  SARS-CoV-2__MT834038.1__non-structural protein 3 (NSP3) mRNA gc
aggagagucccgcagucggcguccagcggcucugcuuguucgugugugugucguugcaggccuuauucaagcuuaccauggcccccaccaaggugaccuucggcgacgacacggucaucgaggugcagggguacaagagcgugaacaucaccuucgagcuggacgagcgcaucgacaagguccucaacgagaagugcuccgccuacaccguggagcugggcaccgaggugaacgaguucgcgugcgucguggccgacgccgugaucaagacgcugcagccggucagcgagcuccugaccccccuggggaucgaccucgacgagugguccauggccaccuacuaccuguucgacgagagcggcgaguucaagcuggccucccacauguacugcagcuucuacccccccgacgaggacgaggaggagggggacugcgaggaggaggaguucgagccguccacccaguacgaguacggcacggaggacgacuaccagggcaagccccucgaguucggggcgaccagcgccgcccugcagcccgaggaggagcaggaggaggacuggcuggacgacgacucccagcagaccgugggccagcaggacgggagcgaggacaaccagaccacgaccauccagaccaucguggagguccagccccagcucgagauggagcugaccccgguggugcagacgaucgaggucaacuccuucagcggcuaccugaagcucaccgacaacguguacaucaagaacgccgacaucguggaggaggcgaagaaggucaagcccaccgugguggucaacgccgccaacguguaccugaagcacgggggcggcguggccggggcccugaacaaggcgaccaacaacgccaugcaggucgaguccgacgacuacaucgccacgaacggcccccucaagguggggggcagcugcguccuguccggccacaaccuggccaagcacugccuccacgugguggggcccaacgucaacaagggcgaggacauccagcugcugaagagcgccuacgagaacuucaaccagcacgaggugcuccuggcgccgcugcucuccgccgggaucuucggcgccgaccccauccacagccugcgggugugcgucgacaccgugcgcaccaacguguaccuggccgucuucgacaagaaccucuacgacaagcugguguccagcuuccuggagaugaagagcgagaagcagguggagcagaagaucgccgagauccccaaggaggaggucaagcccuucaucaccgaguccaagccgagcguggagcagcggaagcaggacgacaagaagaucaaggcgugcguggaggaggucacgaccacccucgaggagaccaaguuccugacggagaaccugcuccuguacaucgacaucaacgggaaccugcaccccgacuccgccacccucgugagcgacaucgacaucaccuuccugaagaaggacgcccccuacaucgugggcgacgucgugcaggagggcgugcugaccgccgucgugauccccacgaagaaggccgggggcaccaccgagaugcucgcgaaggcccugcgcaaggugccgaccgacaacuacaucacgaccuaccccgggcagggccugaacggguacaccgucgaggaggccaagaccgugcucaagaagugcaaguccgccuucuacauccugcccagcaucaucuccaacgagaagcaggagauccugggcaccgugagcuggaaccuccgggagaugcuggcgcacgccgaggagacgcgcaagcugaugcccgucugcguggagaccaaggccaucguguccaccauccagcggaaguacaagggcaucaagauccaggagggggucguggacuacggcgcccgcuucuacuucuacaccagcaagacgaccguggccucccugaucaacacccucaacgaccugaacgagacccuggucacgaugccgcucggguacgugacccacggccugaaccuggaggaggcggcccgguacaugcgcagccucaaggugcccgccaccgucuccgugagcucccccgacgccgugaccgccuacaacggguaccugacgagcuccagcaagacccccgaggagcacuucaucgagaccaucucccuggcgggcagcuacaaggacuggagcuacuccggccagagcacccagcucgggaucgaguuccugaagcggggcgacaaguccgucuacuacacgagcaacccgaccaccuuccaccuggacggggaggugaucaccuucgacaaccucaagacgcugcugucccuccgcgaggugcggaccaucaaggucuucaccaccguggacaacaucaaccugcacacgcagguggucgacaugagcaugaccuacggccagcaguucggccccaccuaccuggacggggccgacgugaccaagaucaagccccacaacucccacgagggcaagacguucuacgugcucccgaacgacgacacccugcgcgucgaggccuucgaguacuaccacaccaccgaccccagcuuccuggggcgguacauguccgcccucaaccacacgaagaaguggaaguacccccaggugaacggccugaccagcaucaagugggccgacaacaacugcuaccuggcgaccgcccuccugacccugcagcagaucgagcucaaguucaaccccccggcccugcaggacgccuacuaccgcgcgcgggccggggaggccgccaacuucugcgcccugauccucgcguacugcaacaagacggugggcgagcugggcgacguccgcgagaccauguccuaccuguuccagcacgccaaccucgacagcugcaagcgggugcugaacgucgugugcaagaccugcgggcagcagcagaccacccugaagggcguggaggccgucauguacauggggacgcucuccuacgagcaguucaagaagggcgugcagauccccugcaccugcgggaagcaggccaccaaguaccuggugcagcaggagagccccuucgucaugauguccgcccccccggcgcaguacgagcugaagcacggcaccuucacgugcgccagcgaguacaccggcaacuaccagugcgggcacuacaagcacaucaccuccaaggagacccucuacugcaucgacggcgcccugcugacgaagagcagcgaguacaaggggcccaucaccgacguguucuacaaggagaacuccuacaccaccacgaucaagcccgugaccuacaagcucgacggcgucgugugcaccgagaucgaccccaagcuggacaacuacuacaagaaggacaacagcuacuucaccgagcagccgaucgaccuggugcccaaccagcccuaccccaacgccuccuucgacaacuucaaguucgucugcgacaacaucaaguucgccgacgaccucaaccagcugacgggguacaagaagccggcgagccgcgagcugaaggugaccuucuuccccgaccucaacggcgacguggucgccaucgacuacaagcacuacacccccuccuucaagaagggcgccaagcugcugcacaagcccaucguguggcacgugaacaacgccaccaacaaggcgacguacaagccgaacaccuggugcauccggugccucuggagcaccaagcccgucgagaccuccaacagcuucgacgugcugaaguccgaggacgcccaggggauggacaaccuggccugcgaggaccucaagcccgugagcgaggaggucguggagaaccccacgauccagaaggacgugcuggagugcaacgucaagaccaccgagguggugggcgacaucauccugaagccggccaacaacucccucaagaucaccgaggaggucgggcacacggaccugauggccgcguacguggacaacagcucccugaccaucaagaagcccaacgagcucagccgcgugcugggccugaagacccucgccacccacgggcuggccgccgucaacuccgugcccugggacacgaucgccaacuacgcgaagccguuccugaacaagguggucagcaccaccaccaacaucgugacgcgcugccucaaccgggugugcaccaacuacaugcccuacuucuucacccugcugcuccagcugugcaccuucacccgcuccacgaacagccggaucaaggccuccaugcccaccaccaucgccaagaacaccgucaagagcgugggcaaguucugccuggaggccagcuucaacuaccucaagucccccaacuucagcaagcugaucaacaucaucaucugguuccugcuccuguccgugugccugggcagccucaucuacuccacggccgcgcuggggguccugaugagcaaccucggcaugccguccuacugcaccggguaccgcgagggcuaccugaacagcaccaacgugaccaucgccacguacugcaccggcuccauccccugcagcgugugccuguccgggcucgacagccuggacaucuaccccucccuggagaccauccagaucaccaucagcuccuucaagugggaccucacggccuucggccuggucgccgagugguuccuggccuacauccucuucacccgguucuucuacgugcuggggcuggcggccaucaugcagcucuucuucagcuacuucgccgugcacuucaucuccaacagcuggcugauguggcugaucaucaaccugguccagauggcccccaucuccgcgauggugcgcauguacaucuucuucgccagcuucuacuacguguggaagagcuacguccacgugguggacggcugcaacuccagcaccugcaugaugugcuacaagcggaaccgcgccacccgggucgagugcacgaccaucgugaacgggguccgccgguccuucuacguguacgccaacggcggcaagggguucugcaagcuccacaacuggaacugcgugaacugcgacaccuucugcgccggcagcaccuucaucuccgacgaggucgcgcgcgaccugagccugcaguucaagcggccgaucaaccccacggaccaguccagcuacaucguggacuccgugaccgucaagaacgggagcauccaccucuacuucgacaaggccggccagaagaccuacgagcgccacucccugagccacuucgugaaccuggacaaccuccgggccaacaacaccaaggggucccugcccaucaacgugaucgucuucgacggcaagagcaagugcgaggaguccagcgccaaguccgccagcguguacuacucccagcugaugugccagcccauccuccugcuggaccaggcgcucgugagcgacgucggcgacagcgccgagguggccgugaagauguucgacgccuacgucaacacguucuccagcaccuucaacgugccgauggagaagcugaagacccugguggccaccgcggaggccgagcucgccaagaacgucucccuggacaacgugcugagcacguucaucuccgccgcgcgccagggguucguggacagcgacgucgagaccaaggacgugguggagugccucaagcugucccaccagagcgacaucgaggucaccggcgacuccugcaacaacuacaugcugaccuacaacaagguggagaacaugacgccccgggaccucggggccugcaucgacugcagcgcccgccacaucaacgcccagguggccaagucccacaacaucgcgcugaucuggaacgucaaggacuucaugagccuguccgagcagcuccggaagcagauccgcagcgccgccaagaagaacaaccugcccuucaagcugaccugcgccaccacccgccagguggugaacgucgugacgaccaagaucgcccucaagggcgggugaggacuagucccuguucccagagcccacuuuuuuuucuuuuuuugaaauaaaauagccugucuuucagaucucaaaggcucuuuucagagccaccaaaaaaaaaaaaaaaaaaaaaaaaaaaaaaaaaaaaaaaaaaaaaaaaaaaaaaaaaaaaaaaaaaaaaaaaaaaaaaaaaaaaaaaaaaaaaaaaaaaaa

SEQ ID NO: 19675 - RNA, 6113 nt, Artificial Sequence
  SARS-CoV-2__MT834080.1__non-structural protein 3 (NSP3) mRNA gc
aggagagucccgcagucggcguccagcggcucugcuuguucgugugugugucguugcaggccuuauucaagcuuaccauggcccccaccaaggugaccuucggcgacgacacggucaucgaggugcagggguacaagagcgugaacaucaccuucgagcuggacgagcgcaucgacaagguccucaacgagaagugcuccgccuacaccguggagcugggcaccgaggugaacgaguucgcgugcgucguggccgacgccgugaucaagacgcugcagccggucagcgagcuccugaccccccuggggaucgaccucgacgagugguccauggccaccuacuaccuguucgacgagagcggcgaguucaagcuggccucccacauguacugcagcuucuacccccccgacgaggacgaggaggagggggacugcgaggaggaggaguucgagccguccacccaguacgaguacggcacggaggacgacuaccagggcaagccccucgaguucggggcgaccagcgccgcccugcagcccgaggaggagcaggaggaggacuggcuggacgacgacucccagcagaccgugggccagcaggacgggagcgaggacaaccagaccacgaccauccagaccaucguggagguccagccccagcucgagauggagcugaccccgguggugcagacgaucgaggucaacuccuucagcggcuaccugaagcucaccgacaacguguacaucaagaacgccgacaucguggaggaggcgaagaaggucaagcccaccgugguggucaacgccgccaacguguaccugaagcacgggggcggcguggccggggcccugaacaaggcgaccaacaacgccaugcaggucgaguccgacgacuacaucgccacgaacggcccccucaagguggggggcagcugcguccuguccggccacaaccuggccaagcacugccuccacgugguggggcccaacgucaacaagggcgaggacauccagcugcugaagagcgccuacgagaacuucaaccagcacgaggugcuccuggcgccgcugcucuccgccgggaucuucggcgccgaccccauccacagccugcgggugugcgucgacaccgugcgcaccaacguguaccuggccgucuucgacaagaaccucuacgacaagcugguguccagcuuccuggagaugaagagcgagaagcagguggagcagaagaucgccgagauccccaaggaggaggucaagcccuucaucaccgaguccaagccgagcguggagcagcggaagcaggacgacaagaagaucaaggcgugcguggaggaggucacgaccacccucgaggagaccaaguuccugacggagaaccugcuccuguacaucgacaucaacgggaaccugcaccccgacuccgccacccucgugagcgacaucgacaucaccuuccugaagaaggacgcccccuacaucgugggcgacgucgugcaggagggcgugcugaccgccgucgugauccccacgaagaaggccgggggcaccaccgagaugcucgcgaaggcccugcgcaaggugccgaccgacaacuacaucacgaccuaccccgggcagggccugaacggguacaccgucgaggaggccaagaccgugcucaagaagugcaaguccgccuucuacauccugcccagcaucaucuccaacgagaagcaggagauccugggcaccgugagcuggaaccuccgggagaugcuggcgcacgccgaggagacgcgcaagcugaugcccgucugcguggagaccaaggccaucguguccaccauccagcggaaguacaagggcaucaagauccaggagggggucguggacuacggcgcccgcuucuacuucuacaccagcaagacgaccguggccucccugaucaacacccucaacgaccugaacgagacccuggucacgaugccgcucggguacgugacccacggccugaaccuggaggaggcggcccgguacaugcgcagccucaaggugcccgccaccgucuccgugagcucccccgacgccgugaccgccuacaacggguaccugacgagcuccagcaagacccccgaggagcacuucaucgagaccaucucccuggcgggcagcuacaaggacuggagcuacuccggccagagcacccagcucgggaucgaguuccugaagcggggcgacaaguccgucuacuacacgagcaacccgaccaccuuccaccuggacggggaggugaucaccuucgacaaccucaagacgcugcugucccuccgcgaggugcggaccaucaaggucuucaccaccguggacaacaucaaccugcacacgcagguggucgacaugagcaugaccuacggccagcaguucggccccaccuaccuggacggggccgacgugaccaaggugaagccccacaacucccacgagggcaagacguucuacguccucccgaacgacgacacccugcgcguggaggccuucgaguacuaccacaccaccgaccccagcuuccuggggcgguacauguccgcccucaaccacacgaagaaguggaaguacccccaggugaacggccugaccagcaucaagugggccgacaacaacugcuaccuggcgaccgcccuccugacccugcagcagaucgagcucaaguucaaccccccggcccugcaggacgccuacuaccgcgcgcgggccggggaggccgccaacuucugcgcccugauccucgcguacugcaacaagacggucggcgagcugggcgacgugcgcgagaccauguccuaccuguuccagcacgccaaccucgacagcugcaagcggguccugaacguggugugcaagaccugcgggcagcagcagaccacccugaagggcgucgaggccgugauguacauggggacgcucuccuacgagcaguucaagaagggcgugcagauccccugcaccugcgggaagcaggccaccaaguaccugguccagcaggagagccccuucgugaugauguccgcccccccggcgcaguacgagcugaagcacggcaccuucacgugcgccagcgaguacaccggcaacuaccagugcgggcacuacaagcacaucaccuccaaggagacccucuacugcaucgacggcgcccugcugacgaagagcagcgaguacaaggggcccaucaccgacguguucuacaaggagaacuccuacaccaccacgaucaagcccgucaccuacaagcucgacggcguggugugcaccgagaucgaccccaagcuggacaacuacuacaagaaggacaacagcuacuucaccgagcagccgaucgaccugguccccaaccagcccuaccccaacgccuccuucgacaacuucaaguucgugugcgacaacaucaaguucgccgacgaccucaaccagcugacgggguacaagaagccggcgagccgcgagcugaaggugaccuucuuccccgaccucaacggcgacgucguggccaucgacuacaagcacuacacccccuccuucaagaagggcgccaagcugcugcacaagcccaucguguggcacgucaacaacgccaccaacaaggcgacguacaagccgaacaccuggugcauccggugccucuggagcaccaagcccguggagaccuccaacagcuucgacgugcugaaguccgaggacgcccaggggauggacaaccuggccugcgaggaccucaagcccgucagcgaggaggugguggagaaccccacgauccagaaggacguccuggagugcaacgugaagaccaccgagguggucggcgacaucauccugaagccggccaacaacucccucaagaucaccgaggagguggggcacacggaccugauggccgcguacguggacaacagcucccugaccaucaagaagcccaacgagcucagccgcguccugggccugaagacccucgccacccacgggcuggccgccgugaacuccgugcccugggacacgaucgccaacuacgcgaagccguuccugaacaaggucgugagcaccaccaccaacaucgugacgcgcugccucaaccgggucugcaccaacuacaugcccuacuucuucacccugcugcuccagcugugcaccuucacccgcuccacgaacagccggaucaaggccuccaugcccaccaccaucgccaagaacaccgugaagagcgugggcaaguucugccuggaggccagcuucaacuaccucaagucccccaacuucagcaagcugaucaacaucaucaucugguuccugcuccuguccgucugccugggcagccucaucuacuccacggccgcgcugggggugcugaugagcaaccucggcaugccguccuacugcaccggguaccgcgagggcuaccugaacagcaccaacgugaccaucgccacguacugcaccggcuccauccccugcagcgucugccuguccgggcucgacagccuggacaccuaccccucccuggagaccauccagaucacgaucagcuccuucaagugggaccucaccgccuucggccugguggccgagugguuccuggccuacauccucuucacccgguucuucuacgugcuggggcuggcggccaucaugcagcucuucuucagcuacuucgccguccacuucaucuccaacagcuggcugauguggcugaucaucaaccuggugcagauggcccccaucuccgcgauggugcgcauguacaucuucuucgccagcuucuacuacgucuggaagagcuacgugcacguggucgacggcugcaacuccagcaccugcaugaugugcuacaagcggaaccgcgccacgcggguggagugcaccaccaucgucaacggggugcgccgguccuucuacguguacgccaacggcggcaagggguucugcaagcuccacaacuggaacugcgucaacugcgacaccuucugcgccggcagcacguucaucuccgacgagguggcgcgcgaccugagccugcaguucaagcggccgaucaaccccaccgaccaguccagcuacaucguggacuccgucaccgugaagaacgggagcauccaccucuacuucgacaaggccggccagaagaccuacgagcgccacucccugagccacuucgugaaccuggacaaccuccgggccaacaacacgaaggggucccugcccaucaacgucaucguguucgacggcaagagcaagugcgaggaguccagcgccaaguccgccagcguguacuacucccagcugaugugccagcccauccuccugcuggaccaggcgcucgucagcgacgugggcgacagcgccgagguggccgucaagauguucgacgccuacgugaacaccuucuccagcaccuucaacgugccgauggagaagcugaagacccuggucgccacggcggaggccgagcucgccaagaacgugucccuggacaacgugcugagcaccuucaucuccgccgcgcgccagggguucgucgacagcgacguggagaccaaggacguggucgagugccucaagcugucccaccagagcgacaucgaggugaccggcgacuccugcaacaacuacaugcugacguacaacaagguggagaacaugaccccccgggaccucggggccugcaucgacugcagcgcccgccacaucaacgcccaggucgccaagucccacaacaucgcgcugaucuggaacgugaaggacuucaugagccuguccgagcagcuccggaagcagauccgcagcgccgccaagaagaacaaccugcccuucaagcugaccugcgccaccacgcgccagguggucaacguggugaccaccaagaucgcccucaagggcgggugaggacuagucccuguucccagagcccacuuuuuuuucuuuuuuugaaauaaaauagccugucuuucagaucucaaaggcucuuuucagagccaccaaaaaaaaaaaaaaaaaaaaaaaaaaaaaaaaaaaaaaaaaaaaaaaaaaaaaaaaaaaaaaaaaaaaaaaaaaaaaaaaaaaaaaaaaaaaaaaaaaaaa

SEQ ID NO: 19676 - RNA, 6113 nt, Artificial Sequence
  SARS-CoV-2__MT834097.1__non-structural protein 3 (NSP3) mRNA gc
aggagagucccgcagucggcguccagcggcucugcuuguucgugugugugucguugcaggccuuauucaagcuuaccauggcccccaccaaggugaccuucggcgacgacacggucaucgaggugcagggguacaagagcgugaacaucaccuucgagcuggacgagcgcaucgacaagguccucaacgagaagugcuccgccuacaccguggagcugggcaccgaggugaacgaguucgcgugcgucguggccgacgccgugaucaagacgcugcagccggucagcgagcuccugaccccccuggggaucgaccucgacgagugguccauggccaccuacuaccuguucgacgagagcggcgaguucaagcuggccucccacauguacugcagcuucuacccccccgacgaggacgaggaggagggggacugcgaggaggaggaguucgagccguccacccaguacgaguacggcacggaggacgacuaccagggcaagccccucgaguucggggcgaccagcgccgcccugcagcccgaggaggagcaggaggaggacuggcuggacgacgacucccagcagaccgugggccagcaggacgggagcgaggacaaccagaccacgaccauccagaccaucguggagguccagccccagcucgagauggagcugaccccgguggugcagacgaucgaggucaacuccuucagcggcuaccugaagcucaccgacaacguguacaucaagaacgccgacaucguggaggaggcgaagaaggucaagcccaccgugguggucaacgccgccaacguguaccugaagcacgggggcggcguggccggggcccugaacaaggcgaccaacaacgccaugcaggucgaguccgacgacuacaucgccacgaacggcccccucaagguggggggcagcugcguccuguccggccacaaccuggccaagcacugccuccacgugguggggcccaacgucaacaagggcgaggacauccagcugcugaagagcgccuacgagaacuucaaccagcacgaggugcuccuggcgccgcugcucuccgccgggaucuucggcgccgaccccauccacagccugcgggugugcgucgacaccgugcgcaccaacguguaccuggccgucuucgacaagaaccucuacgacaagcugguguccagcuuccuggagaugaagagcgagaagcagguggagcagaagaucgccgagauccccaaggaggaggucaagcccuucaucaccgaguccaagccgagcguggagcagcggaagcaggacgacaagaagaucaaggcgugcguggaggaggucacgaccacccucgaggagaccaaguuccugacggagaaccugcuccuguacaucgacaucaacgggaaccugcaccccgacuccgccacccucgugagcgacaucgacaucaccuuccugaagaaggacgcccccuacaucgugggcgacgucgugcaggagggcgugcugaccgccgucgugauccccacgaagaaggccgggggcaccaccgggaugcucgcgaaggcccugcgcaaggugccgaccgacaacuacaucacgaccuaccccggccaggggcugaacggcuacaccgucgaggaggccaagaccgugcucaagaagugcaaguccgccuucuacauccugcccagcaucaucuccaacgagaagcaggagauccugggcaccgugagcuggaaccuccgggagaugcuggcgcacgccgaggagacgcgcaagcugaugcccgucugcguggagaccaaggccaucguguccaccauccagcggaaguacaaggggaucaagauccaggagggcgucguggacuacggggcccgcuucuacuucuacaccagcaagacgaccguggccucccugaucaacacccucaacgaccugaacgagacccuggucacgaugccgcucggcuacgugacccacgggcugaaccuggaggaggcggcccgguacaugcgcagccucaaggugcccgccaccgucuccgugagcucccccgacgccgugaccgccuacaacggcuaccugacgagcuccagcaagacccccgaggagcacuucaucgagaccaucucccuggcgggcagcuacaaggacuggagcuacuccgggcagagcacccagcucggcaucgaguuccugaagcggggggacaaguccgucuacuacacgagcaacccgaccaccuuccaccuggacggcgaggugaucaccuucgacaaccucaagacgcugcugucccuccgcgaggugcggaccaucaaggucuucaccaccguggacaacaucaaccugcacacgcagguggucgacaugagcaugaccuacggccagcaguucgggcccaccuaccuggacggcgccgacgugaccaagaucaagccccacaacucccacgaggggaagacguucuacgugcucccgaacgacgacacccugcgcgucgaggccuucgaguacuaccacaccaccgaccccagcuuccugggccgguacauguccgcccucaaccacacgaagaaguggaaguacccccaggugaacgggcugaccagcaucaagugggccgacaacaacugcuaccuggcgaccgcccuccugacccugcagcagaucgagcucaaguucaaccccccggcccugcaggacgccuacuaccgcgcgcgggccggcgaggccgccaacuucugcgcccugauccucgcguacugcaacaagacggugggcgagcugggggacguccgcgagaccauguccuaccuguuccagcacgccaaccucgacagcugcaagcgggugcugaacgucgugugcaagaccugcggccagcagcagaccacccugaaggggguggaggccgucauguacaugggcacgcucuccuacgagcaguucaagaagggggugcagauccccugcaccugcggcaagcaggccaccaaguaccuggugcagcaggagagccccuucgucaugauguccgcccccccggcgcaguacgagcugaagcacggcaccuucacgugcgccagcgaguacaccgggaacuaccagugcggccacuacaagcacaucaccuccaaggagacccucuacugcaucgacggggcccugcugacgaagagcagcgaguacaagggccccaucaccgacguguucuacaaggagaacuccuacaccaccacgaucaagcccgugaccuacaagcucgacggggucgugugcaccgagaucgaccccaagcuggacaacuacuacaagaaggacaacagcuacuucaccgagcagccgaucgaccuggugcccaaccagcccuaccccaacgccuccuucgacaacuucaaguucgucugcgacaacaucaaguucgccgacgaccucaaccagcugacgggcuacaagaagccggcgagccgcgagcugaaggugaccuucuuccccgaccucaacggcgacguggucgccaucgacuacaagcacuacacccccuccuucaagaagggggccaagcugcugcacaagcccaucguguggcacgugaacaacgccaccaacaaggcgacguacaagccgaacaucuggugcauccggugccucuggagcaccaagcccgucgagaccuccaacagcuucgacgugcugaaguccgaggacgcccagggcauggacaaccuggccugcgaggaccucaagcccgugagcgaggaggucguggagaaccccaccauccagaaggacgugcuggagugcaacgucaagacgaccgagguggugggggacaucauccugaagccggccaacaacucccucaagaucaccgaggaggucggccacaccgaccugauggccgcguacguggacaacagcucccugacgaucaagaagcccaacgagcucagccgcgugcuggggcugaagacccucgccacccacggccuggccgccgucaacuccgugcccugggacaccaucgccaacuacgcgaagccguuccugaacaagguggucagcacgaccaccaacaucgugacccgcugccucaaccgggugugcacgaacuacaugcccuacuucuucacccugcugcuccagcugugcaccuucacccgcuccaccaacagccggaucaaggccuccaugcccacgaccaucgccaagaacaccgucaagagcgugggcaaguucugccuggaggccagcuucaacuaccucaagucccccaacuucagcaagcugaucaacaucaucaucugguuccugcuccuguccgugugccuggggagccucaucuacuccaccgccgcgcugggcguccugaugagcaaccucgggaugccguccuacugcacgggcuaccgcgagggcuaccugaacagcaccaacgugaccaucgccaccuacugcacgggguccauccccugcagcgugugccuguccggccucgacagccuggacaccuaccccucccuggagaccauccagaucaccaucagcuccuucaagugggaccucacggccuucgggcuggucgccgagugguuccuggccuacauccucuucacccgguucuucuacgugcugggccuggcggccaucaugcagcucuucuucagcuacuucgccgugcacuucaucuccaacagcuggcugauguggcugaucaucaaccugguccagauggcccccaucuccgcgauggugcgcauguacaucuucuucgccagcuucuacuacguguggaagagcuacguccacgugguggacgggugcaacuccagcaccugcaugaugugcuacaagcggaaccgcgccacccgggucgagugcacgaccaucgugaacggcguccgccgguccuucuacguguacgccaacggcgggaagggcuucugcaagcuccacaacuggaacugcgugaacugcgacaccuucugcgccgggagcaccuucaucuccgacgaggucgcgcgcgaccugagccugcaguucaagcggccgaucaaccccacggaccaguccagcuacaucguggacuccgugaccgucaagaacggcagcauccaccucuacuucgacaaggccgggcagaagaccuacgagcgccacucccugagccacuucgugaaccuggacaaccuccgggccaacaacaccaagggcucccugcccaucaacgugaucgucuucgacggcaagagcaagugcgaggaguccagcgccaaguccgccagcguguacuacucccagcugaugugccagcccauccuccugcuggaccaggcgcucgugagcgacgucggggacagcgccgagguggccgugaagauguucgacgccuacgucaacacguucuccagcaccuucaacgugccgauggagaagcugaagacccugguggccaccgcggaggccgagcucgccaagaacgucucccuggacaacgugcugagcacguucaucuccgccgcgcgccagggcuucguggacagcgacgucgagaccaaggacgugguggagugccucaagcugucccaccagagcgacaucgaggucaccggggacuccugcaacaacuacaugcugaccuacaacaagguggagaacaugacgccccgggaccucggcgccugcaucgacugcagcgcccgccacaucaacgcccagguggccaagucccacaacaucgcgcugaucuggaacgucaaggacuucaugagccuguccgagcagcuccggaagcagauccgcagcgccgccaagaagaacaaccugcccuucaagcugaccugcgccaccacccgccagguggugaacgucgugacgaccaagaucgcccucaaggggggcugaggacuagucccuguucccagagcccacuuuuuuuucuuuuuuugaaauaaaauagccugucuuucagaucucaaaggcucuuuucagagccaccaaaaaaaaaaaaaaaaaaaaaaaaaaaaaaaaaaaaaaaaaaaaaaaaaaaaaaaaaaaaaaaaaaaaaaaaaaaaaaaaaaaaaaaaaaaaaaaaaaaaa

SEQ ID NO: 19677 - RNA, 6113 nt, Artificial Sequence
  SARS-CoV-2__MT834119.1__non-structural protein 3 (NSP3) mRNA gc
aggagagucccgcagucggcguccagcggcucugcuuguucgugugugugucguugcaggccuuauucaagcuuaccauggcccccaccaaggugaccuucggcgacgacacggucaucgaggugcagggguacaagagcgugaacaucaccuucgagcuggacgagcgcaucgacaagguccucaacgagaagugcuccgccuacaccguggagcugggcaccgaggugaacgaguucgcgugcgucguggccgacgccgugaucaagacgcugcagccggucagcgagcuccugaccccccuggggaucgaccucgacgagugguccauggccaccuacuaccuguucgacgagagcggcgaguucaagcuggccucccacauguacugcagcuucuacccccccgacgaggacgaggaggagggggacugcgaggaggaggaguucgagccguccacccaguacgaguacggcacggaggacgacuaccagggcaagccccucgaguucggggcgaccagcgccgcccugcagcccgaggaggagcaggaggaggacuggcuggacgacgacucccagcagaccgugggccagcaggacgggagcgaggacaaccagaccacgaccauccagaccaucguggagguccagccccagcucgagauggagcugaccccgguggugcagacgaucgaggucaacuccuucagcggcuaccugaagcucaccgacaacguguacaucaagaacgccgacaucguggaggaggcgaagaaggucaagcccaccgugguggucaacgccgccaacguguaccugaagcacgggggcggcguggccggggcccugaacaaggcgaccaacaacgccaugcaggucgaguccgacgacuacaucgccacgaacggcccccucaagguggggggcagcugcguccuguccggccacaaccuggccaagcacugccuccacgugguggggcccaacgucaacaagggcgaggacauccagcugcugaagagcgccuacgagaacuucaaccagcacgaggugcuccuggcgccgcugcucuccgccgggaucuucggcgccgaccccauccacagccugcgggugugcgucgacaccgugcgcaccaacguguaccuggccgucuucgacaagaaccucuacgacaagcugguguccagcuuccuggagaugaagagcgagaagcagguggagcagaagaucgccgagauccccaaggaggaggucaagcccuucaucaccgaguccaagccgagcguggagcagcggaagcaggacgacaagaagaucaaggcgugcguggaggaggucacgaccacccucgaggagaccaaguuccugacggagaaccugcuccuguacaucgacaucaacgggaaccugcaccccgacuccgccacccucgugagcgacaucgacaucaccuuccugaagaaggacgcccccuacaucgugggcgacgucgugcaggagggcgugcugaccgccgucgugauccccacgaagaaggccgggggcaccaccgagaugcucgcgaaggcccugcgcaaggugccgaccgacaacuacaucacgaccuaccccgggcagggccugaacggguacaccgucgaggaggccaagaccgugcucaagaagugcaaguccgccuucuacauccugcccagcaucaucuccaacgagaagcaggagauccugggcaccgugagcuggaaccuccgggagaugcuggcgcacgccgaggagacgcgcaagcugaugcccgucugcguggagaccaaggccaucguguccaccauccagcggaaguacaagggcaucaagauccaggagggggucguggacuacggcgcccgcuucuacuucuacaccagcaagacgaccguggccucccugaucaacacccucaacgaccugaacgagacccuggucacgaugccgcucggguacgugacccacggccugaaccuggaggaggcggcccgguacaugcgcagccucaaggugcccgccaccgucuccgugagcucccccgacgccgugaccgccuacaacggguaccugacgagcuccagcaagacccccgaggagcacuucaucgagaccaucucccuggcgggcagcuacaaggacuggagcuacuccggccagagcacccagcucgggaucgaguuccugaagcggggcgacaaguccgucuacuacacgagcaacccgaccaccuuccaccuggacggggaggugaucaccuucgacaaccucaagacgcugcugucccuccgcgaggugcggaccaucaaggucuucaccaccguggacaacaucaaccugcacacgcagguggucgacaugagcaugaccuacggccagcaguucggccccaccuaccuggacggggccgacgugaccaagaucaagccccacaacucccacgagggcaagacguucuacgugcucccgaacgacgacacccugcgcgucgaggccuucgaguacuaccacaccaccgaccccagcuuccuggggcgguacauguccgcccucaaccacacgaagaaguggaaguacccccaggugaacggccugaccagcaucaagugggccgacaacaacugcuaccuggcgaccgcccuccugacccugcagcagaucgagcucaaguucaaccccccggcccugcaggacgccuacuaccgcgcgcgggccggggaggccgccaacuucugcgcccugauccucgcguacugcaacaagacggugggcgagcugggcgacguccgcgagaccauguccuaccuguuccagcacgccaaccucgacagcugcaagcgggugcugaacgucgugugcaagaccugcgggcagcagcagaccacccugaagggcguggaggccgucauguacauggggacgcucuccuacgagcaguucaagaagggcgugcagauccccugcaccugcgggaagcaggccaccaaguaccuggugcagcaggagagccccuucgucaugauguccgcccccccggcgcaguacgagcugaagcacggcaccuucacgugcgccagcgaguacaccggcaacuaccagugcgggcacuacaagcacaucaccuccaaggagacccucuacugcaucgacggcgcccugcugacgaagagcagcgaguacaaggggcccaucaccgacguguucuacaaggagaacuccuacaccaccacgaucaagcccgugaccuacaagcucgacggcgucgugugcaccgagaucgaccccaagcuggacaacuacuacaagaaggacaacagcuacuucaccgagcagccgaucgaccuggugcccaaccagcccuaccccaacgccuccuucgacaacuucaaguucgucugcgacaacaucaaguucgccgacgaccucaaccagcugacgggguacaagaagccggcgagccgcgagcugaaggugaccuucuuccccgaccucaacggcgacguggucgccaucgacuacaagcacuacacccccuccuucaagaagggcgccaagcugcugcacaagcccaucguguggcacgugaacaacgccaccaacaaggcgacguacaagccgaacaccuggugcauccggugccucuggagcaccaagcccgucgagaccuccaacagcuucgacgugcugaaguccgaggacgcccaggggauggacaaccuggccugcgaggaccucaagcccgugagcgaggaggucguggagaaccccacgauccagaaggacgugcuggagugcaacgucaagaccaccgagguggugggcgacaucauccugaagccggccaacaacucccucaagaucaccgaggaggucgggcacacggaccugauggccgcguacguggacaacagcucccugaccaucaagaagcccaacgagcucagccgcgugcugggccugaagacccucgccacccacgggcuggccgccgucaacuccgugcccugggacacgaucgccaacuacgcgaagccguuccugaacaagguggucagcaccaccaccaacaucgugacgcgcugccucaaccgggugugcaccaacuacaugcccuacuucuucacccugcugcuccagcugugcaccuucacccgcuccacgaacagccggaucaaggccuccaugcccaccaccaucgccaagaacaccgucaagagcgugagcaaguucugccuggaggccuccuucaacuaccucaagagccccaacuucuccaagcugaucaacaucaucaucugguuccugcuccugagcgugugccugggcucccucaucuacagcacggccgcgcugggcguccugauguccaaccucgggaugccgagcuacugcaccggcuaccgcgagggguaccugaacuccaccaacgugaccaucgccacguacugcaccggcagcauccccugcuccgugugccugagcggccucgacucccuggacaccuaccccagccuggagaccauccagaucacgaucuccagcuucaagugggaccucaccgccuucgggcuggucgccgagugguuccuggccuacauccucuucacccgguucuucuacgugcugggccuggcggccaucaugcagcucuucuucuccuacuucgccgugcacuucaucagcaacuccuggcugauguggcugaucaucaaccugguccagauggcccccaucagcgcgauggugcgcauguacaucuucuucgccagcuucuacuacguguggaaguccuacguccacgugguggacgggugcaacagcuccaccugcaugaugugcuacaagcggaaccgcgccacgcgggucgagugcaccaccaucgugaacggcguccgccggagcuucuacguguacgccaacgggggcaagggcuucugcaagcuccacaacuggaacugcgugaacugcgacaccuucugcgccggguccacguucaucagcgacgaggucgcgcgcgaccugucccugcaguucaagcggccgaucaaccccaccgaccagagcuccuacaucguggacagcgugaccgucaagaacggcuccauccaccucuacuucgacaaggccgggcagaagaccuacgagcgccacagccugucccacuucgugaaccuggacaaccuccgggccaacaacacgaagggcagccugcccaucaacgugaucgucuucgacgggaaguccaagugcgaggagagcuccgccaagagcgccuccguguacuacagccagcugaugugccagcccauccuccugcuggaccaggcgcucgugagcgacgucggcgacuccgccgagguggccgugaagauguucgacgccuacgucaacaccuucagcuccaccuucaacgugccgauggagaagcugaagacccugguggccacggcggaggccgagcucgccaagaacgucagccuggacaacgugcuguccaccuucaucagcgccgcgcgccagggcuucguggacuccgacgucgagaccaaggacgugguggagugccucaagcugagccaccaguccgacaucgaggucaccggggacagcugcaacaacuacaugcugacguacaacaagguggagaacaugaccccccgggaccucggcgccugcaucgacugcuccgcccgccacaucaacgcccagguggccaagagccacaacaucgcgcugaucuggaacgucaaggacuucaugucccugagcgagcagcuccggaagcagauccgcuccgccgccaagaagaacaaccugcccuucaagcugaccugcgccaccacgcgccagguggugaacgucgugaccaccaagaucgcccucaaggggggcugaggacuagucccuguucccagagcccacuuuuuuuucuuuuuuugaaauaaaauagccugucuuucagaucucaaaggcucuuuucagagccaccaaaaaaaaaaaaaaaaaaaaaaaaaaaaaaaaaaaaaaaaaaaaaaaaaaaaaaaaaaaaaaaaaaaaaaaaaaaaaaaaaaaaaaaaaaaaaaaaaaaaa

SEQ ID NO: 19678 - RNA, 6113 nt, Artificial Sequence
  SARS-CoV-2__MT834129.1__non-structural protein 3 (NSP3) mRNA gc
aggagagucccgcagucggcguccagcggcucugcuuguucgugugugugucguugcaggccuuauucaagcuuaccauggcccccaccaaggugaccuucggcgacgacacggucaucgaggugcagggguacaagagcgugaacaucaccuucgagcuggacgagcgcaucgacaagguccucaacgagaagugcuccgccuacaccguggagcugggcaccgaggugaacgaguucgcgugcgucguggccgacgccgugaucaagacgcugcagccggucagcgagcuccugaccccccuggggaucgaccucgacgagugguccauggccaccuacuaccuguucgacgagagcggcgaguucaagcuggccucccacauguacugcagcuucuacccccccgacgaggacgaggaggagggggacugcgaggaggaggaguucgagccguccacccaguacgaguacggcacggaggacgacuaccagggcaagccccucgaguucggggcgaccagcgccgcccugcagcccgaggaggagcaggaggaggacuggcuggacgacgacucccagcagaccgugggccagcaggacgggagcgaggacaaccagaccacgaccauccagaccaucguggagguccagccccagcucgagauggagcugaccccgguggugcagacgaucgaggucaacuccuucagcggcuaccugaagcucaccgacaacguguacaucaagaacgccgacaucguggaggaggcgaagaaggucaagcccaccgugguggucaacgccgccaacguguaccugaagcacgggggcggcguggccggggcccugaacaaggcgaccaacaacgccaugcaggucgaguccgacgacuacaucgccacgaacggcccccucaagguggggggcagcugcguccuguccggccacaaccuggccaagcacugccuccacgugguggggcccaacgucaacaagggcgaggacauccagcugcugaagagcgccuacgagaacuucaaccagcacgaggugcuccuggcgccgcugcucuccgccgggaucuucggcgccgaccccauccacagccugcgggugugcgucgacaccgugcgcaccaacguguaccuggccgucuucgacaagaaccucuacgacaagcugguguccagcuuccuggagaugaagagcgagaagcagguggagcagaagaucgccgagauccccaaggaggaggucaagcccuucaucaccgaguccaagccgagcguggagcagcggaagcaggacgacaagaagaucaaggcgugcguggaggaggucacgaccacccucgaggagaccaaguuccugacggagaaccugcuccuguacaucgacaucaacgggaaccugcaccccgacuccgccagccucguguccgacaucgacaucaccuuccugaagaaggacgcccccuacaucgugggcgacgucgugcaggagggcgugcugaccgccgucgugauccccaccaagaaggccgggggcacgaccgagaugcucgcgaaggcccugcgcaaggugccgaccgacaacuacaucaccacguaccccgggcagggccugaacggguacaccgucgaggaggccaagaccgugcucaagaagugcaagagcgccuucuacauccugcccuccaucaucagcaacgagaagcaggagauccugggcaccguguccuggaaccuccgggagaugcuggcgcacgccgaggagacccgcaagcugaugcccgucugcguggagacgaaggccaucgugagcaccauccagcggaaguacaagggcaucaagauccaggagggggucguggacuacggcgcccgcuucuacuucuacaccuccaagaccacgguggccagccugaucaacacccucaacgaccugaacgagacccuggucaccaugccgcucggguacgugacgcacggccugaaccuggaggaggcggcccgguacaugcgcucccucaaggugcccgccaccgucagcguguccagccccgacgccgugaccgccuacaacggguaccugaccuccagcuccaagacgcccgaggagcacuucaucgagaccaucagccuggcgggcagcuacaaggacugguccuacagcggccaguccacccagcucgggaucgaguuccugaagcggggcgacaagagcgucuacuacaccuccaacccgacgaccuuccaccuggacggggaggugaucaccuucgacaaccucaagacccugcugagccuccgcgaggugcggacgaucaaggucuucaccaccguggacaacaucaaccugcacacccagguggucgacauguccaugacguacggccagcaguucggccccaccuaccuggacggggccgacgugaccaagaucaagccccacaacagccacgagggcaagaccuucuacgugcucccgaacgacgacacgcugcgcgucgaggccuucgaguacuaccacaccaccgaccccuccuuccuggggcgguacaugagcgcccucaaccacaccaagaaguggaaguacccccaggugaacggccugacguccaucaagugggccgacaacaacugcuaccuggcgaccgcccuccugacccugcagcagaucgagcucaaguucaaccccccggcccugcaggacgccuacuaccgcgcgcgggccggggaggccgccaacuucugcgcccugauccucgcguacugcaacaagaccgugggcgagcugggcgacguccgcgagacgaugagcuaccuguuccagcacgccaaccucgacuccugcaagcgggugcugaacgucgugugcaagaccugcgggcagcagcagaccacccugaagggcguggaggccgucauguacauggggacccucagcuacgagcaguucaagaagggcgugcagauccccugcacgugcgggaagcaggccaccaaguaccuggugcagcaggagucccccuucgucaugaugagcgcccccccggcgcaguacgagcugaagcacggcaccuucaccugcgccuccgaguacacgggcaacuaccagugcgggcacuacaagcacaucaccagcaaggagacccucuacugcaucgacggcgcccugcugaccaagagcuccgaguacaaggggcccaucacggacguguucuacaaggagaacagcuacaccaccaccaucaagcccgugacguacaagcucgacggcgucgugugcaccgagaucgaccccaagcuggacaacuacuacaagaaggacaacuccuacuucaccgagcagccgaucgaccuggugcccaaccagcccuaccccaacgccagcuucgacaacuucaaguucgucugcgacaacaucaaguucgccgacgaccucaaccagcugaccggguacaagaagccggcgucccgcgagcugaaggugacguucuuccccgaccucaacggcgacguggucgccaucgacuacaagcacuacacccccagcuucaagaagggcgccaagcugcugcacaagcccaucguguggcacgugaacaacgccaccaacaaggcgaccuacaagccgaacacguggugcauccggugccucugguccaccaagcccgucgagaccagcaacuccuucgacgugcugaagagcgaggacgcccaggggauggacaaccuggccugcgaggaccucaagcccguguccgaggaggucguggagaaccccaccauccagaaggacgugcuggagugcaacgucaagacgaccgagguggugggcgacaucauccugaagccggccaacaacagccucaagaucaccgaggaggucgggcacaccgaccugauggccgcguacguggacaacuccagccugacgaucaagaagcccaacgagcucucccgcgugcugggccugaagacccucgccacccacgggcuggccgccgucaacagcgugcccugggacaccaucgccaacuacgcgaagccguuccugaacaagguggucuccacgaccaccaacaucgugacccgcugccucaaccgggugugcacgaacuacaugcccuacuucuucacccugcugcuccagcugugcaccuucacccgcagcaccaacucccggaucaaggccagcaugcccacgaccaucgccaagaacaccgucaagagcgugggcaaguucugccuggaggccuccuucaacuaccucaagagccccaacuucuccaagcugaucaacaucaucaucugguuccugcuccugagcgugugccugggcucccucaucuacagcaccgccgcgcuggggguccugauguccaaccucggcaugccgagcuacugcacgggguaccgcgagggcuaccugaacuccaccaacgugaccaucgccaccuacugcacgggcagcauccccugcuccgugugccugagcgggcucgacucccuggacaccuaccccagccuggagaccauccagaucaccaucuccagcuucaagugggaccucacggccuucggccuggucgccgagugguuccuggccuacauccucuucacccgguucuucuacgugcuggggcuggcggccaucaugcagcucuucuucuccuacuucgccgugcacuucaucagcaacuccuggcugauguggcugaucaucaaccugguccagauggcccccaucagcgcgauggugcgcauguacaucuucuucgccagcuucuacuacguguggaaguccuacguccacgugguggacggcugcaacagcuccaccugcaugaugugcuacaagcggaaccgcgccacccgggucgagugcacgaccaucgugaacgggguccgccggagcuucuacguguacgccaacggcggcaagggguucugcaagcuccacaacuggaacugcgugaacugcgacaccuucugcgccggcuccaccuucaucagcgacgaggucgcgcgcgaccugucccugcaguucaagcggccgaucaaccccacggaccagagcuccuacaucguggacagcgugaccgucaagaacggguccauccaccucuacuucgacaaggccggccagaagaccuacgagcgccacagccugucccacuucgugaaccuggacaaccuccgggccaacaacaccaaggggagccugcccaucaacgugaucgucuucgacggcaaguccaagugcgaggagagcuccgccaagagcgccuccguguacuacagccagcugaugugccagcccauccuccugcuggaccaggcgcucgugagcgacgucggcgacuccgccgagguggccgugaagauguucgacgccuacgucaacacguucagcuccaccuucaacgugccgauggagaagcugaagacccugguggccaccgcggaggccgagcucgccaagaacgucagccuggacaacgugcuguccacguucaucagcgccgcgcgccagggguucguggacuccgacgucgagaccaaggacgugguggagugccucaagcugagccaccaguccgacaucgaggucaccggcgacagcugcaacaacuacaugcugaccuacaacaagguggagaacaugacgccccgggaccucggggccugcaucgacugcuccgcccgccacaucaacgcccagguggccaagagccacaacaucgcgcugaucuggaacgucaaggacuucaugucccugagcgagcagcuccggaagcagauccgcuccgccgccaagaagaacaaccugcccuucaagcugaccugcgccaccacccgccagguggugaacgucgugacgaccaagaucgcccucaagggcgggugaggacuagucccuguucccagagcccacuuuuuuuucuuuuuuugaaauaaaauagccugucuuucagaucucaaaggcucuuuucagagccaccaaaaaaaaaaaaaaaaaaaaaaaaaaaaaaaaaaaaaaaaaaaaaaaaaaaaaaaaaaaaaaaaaaaaaaaaaaaaaaaaaaaaaaaaaaaaaaaaaaaaa

SEQ ID NO: 19679 - RNA, 6113 nt, Artificial Sequence
  SARS-CoV-2__MT834626.1__non-structural protein 3 (NSP3) mRNA gc
aggagagucccgcagucggcguccagcggcucugcuuguucgugugugugucguugcaggccuuauucaagcuuaccauggcccccaccaaggugaccuucggcgacgacacggucaucgaggugcagggguacaagagcgugaacaucaccuucgagcuggacgagcgcaucgacaagguccucaacgagaagugcuccgccuacaccguggagcugggcaccgaggugaacgaguucgcgugcgucguggccgacgccgugaucaagacgcugcagccggucagcgagcuccugaccccccuggggaucgaccucgacgagugguccauggccaccuacuaccuguucgacgagagcggcgaguucaagcuggccucccacauguacugcagcuucuacccccccgacgaggacgaggaggagggggacugcgaggaggaggaguucgagccguccacccaguacgaguacggcacggaggacgacuaccagggcaagccccucgaguucggggcgaccagcgccgcccugcagcccgaggaggagcaggaggaggacuggcuggacgacgacucccagcagaccgugggccagcaggacgggagcgaggacaaccagaccacgaccauccagaccaucguggagguccagccccagcucgagauggagcugaccccgguggugcagacgaucgaggucaacuccuucagcggcuaccugaagcucaccgacaacguguacaucaagaacgccgacaucguggaggaggcgaagaaggucaagcccaccgugguggucaacgccgccaacguguaccugaagcacgggggcggcguggccggggcccugaacaaggcgaccaacaacgccaugcaggucgaguccgacgacuacaucgccacgaacggcccccucaagguggggggcagcugcguccuguccggccacaaccuggccaagcacugccuccacgugguggggcccaacgucaacaagggcgaggacauccagcugcugaagagcgccuacgagaacuucaaccagcacgaggugcuccuggcgccgcugcucuccgccgggaucuucggcgccgaccccauccacagccugcgggugugcgucgacaccgugcgcaccaacguguaccuggccgucuucgacaagaaccucuacgacaagcugguguccagcuuccuggagaugaagagcgagaagcagguggagcagaagaucgccgagauccccaaggaggaggucaagcccuucaucaccgaguccaagccgagcguggagcagcggaagcaggacgacaagaagaucaaggcgugcguggaggaggucacgaccacccucgaggagaccaaguuccugacggagaaccugcuccuguacaucgacaucaacgggaaccugcaccccgacuccgccacccucgugagcgacaucgacaucaccuuccugaagaaggacgcccccuacaucgugggcgacgucgugcaggagggcgugcugaccgccgucgugauccccacgaagaaggccgggggcaccaccgagaugcucgcgaaggcccugcgcaaggugccgaccgacaacuacaucacgaccuaccccgggcagggccugaacggguacaccgucgaggaggccaagaccgugcucaagaagugcaaguccgccuucuacauccugcccagcaucaucuccaacgagaagcaggagauccugggcaccgugagcuggaaccuccgggagaugcuggcgcacgccgaggagacgcgcaagcugaugcccgucugcguggagaccaaggccaucguguccaccauccagcggaaguacaagggcaucaagauccaggagggggucguggacuacggcgcccgcuucuacuucuacaccagcaagacgaccguggccucccugaucaacacccucaacgaccugaacgagacccuggucacgaugccgcucggguacgugacccacggccugaaccuggaggaggcggcccgguacaugcgcagccucaaggugcccgccaccgucuccgugagcucccccgacgccgugaccgccuacaacggguaccugacgagcuccagcaagacccccgaggagcacuucaucgagaccaucucccuggcgggcagcuacaaggacuggagcuacuccggccagagcacccagcucgggaucgaguuccugaagcggggcgacaaguccgucuacuacacgagcaacccgaccaccuuccaccuggacggggaggugaucaccuucgacaaccucaagacgcugcugucccuccgcgaggugcggaccaucaaggucuucaccaccguggacaacaucaaccugcacacgcagguggucgacaugagcaugaccuacggccagcaguucggccccaccuaccuggacggggccgacgugaccaagaucaagccccacaacucccacgagggcaagacguucuacgugcucccgaacgacgacacccugcgcgucgaggccuucgaguacuaccacaccaccgaccccagcuuccuggggcgguacauguccgcccucaaccacacgaagaaguggaaguacccccaggugaacggccugaccagcaucaagugggccgacaacaacugcuaccuggcgaccgcccuccugacccugcagcagaucgagcucaaguucaaccccccggcccugcaggacgccuacuaccgcgcgcgggccggggaggccgccaacuucugcgcccugauccucgcguacugcaacaagacggugggcgagcugggcgacguccgcgagaccauguccuaccuguuccagcacgccaaccucgacagcugcaagcgggugcugaacgucgugugcaagaccugcgggcagcagcagaccacccugaagggcguggaggccgucauguacauggggacgcucuccuacgagcaguucaagaagggcgugcagauccccugcaccugcgggaagcaggccaccaaguaccuggugcagcaggagagccccuucgucaugauguccgcccccccggcgcaguacgagcugaagcacggcaccuucacgugcgccagcgaguacaccggcaacuaccagugcgggcacuacaagcacaucaccuccaaggagacccucuacugcaucgacggcgcccugcugacgaagagcagcgaguacaaggggcccaucaccgacguguucuacaaggagaacuccuacaccaccacgaucaagcccgugaccuacaagcucgacggcgucgugugcaccgagaucgaccccaagcuggacaacuacuacaagaaggacaacagcuacuucaccgagcagccgaucgaccuggugcccaaccagcccuaccccaacgccuccuucgacaacuucaaguucgucugcgacaacaucaaguucgccgacgaccucaaccagcugacgggguacaagaagccggcgagccgcgagcugaaggugaccuucuuccccgaccucaacggcgacguggucgccaucgacuacaagcacuacacccccuccuucaagaagggcgccaagcugcugcacaagcccaucguguggcacgugaacaacgccaccaacaaggcgacguacaagccgaacaccuggugcauccggugccucuggagcaccaagcccgucgagaccuccaacagcuucgacgugcugaaguccgaggacgcccaggggauggacaaccuggccugcgaggaccucaagcccgugagcgaggaggucguggagaaccccacgauccagaaggacgugcuggagugcaacgucaagaccaccgagguggugggcgacaucauccugaagccggccaacaacucccucaagaucaccgaggaggucgggcacacggaccugauggccgcguacguggacaacagcucccugaccaucaagaagcccaacgagcucagccgcgugcugggccugaagacccucgccacccacgggcuggccgccgucaacuccgugcccugggacacgaucgccaacuacgcgaagccguuccugaacaagguggucagcaccaccaccaacaucgugacgcgcugccucaaccgggugugcaccaacuacaugcccuacuucuucacccugcugcuccagcugugcaccuucacccgcuccacgaacagccggaucaaggccuccaugcccaccaccaucgccaagaacaccgucaagagcgugggcaaguucugccuggaggccagcuucaacuaccucaagucccccaacuucagcaagcugaucaacaucaucaucugguuccugcuccuguccgugugccugggcagccucaucuacuccacggccgcgcuggggguccugaugagcaaccucggcaugccguccuacugcaccggguaccgcgagggcuaccugaacagcaccaacgugaccaucgccacguacugcaccggcuccauccccugcagcgugugccuguccgggcucgacagccuggacaccuaccccucccuggagaccauccagaucacgaucagcuccuucaagugggaccucaccgccuucggccuggucgccgagugguuccuggccuacauccucuucacccgguucuucuacgugcuggggcuggcggccaucaugcagcucuucuucagcuacuucgccgugcacuucaucuccaacagcuggcugauguggcugaucaucaaccugguccagauggcccccaucuccgcgauggugcgcauguacaucuucuucgccagcuucuacuacguguggaagagcuacguccacgugguggacggcugcaacuccagcaccugcaugaugugcuacaagcggaaccgcgccacgcgggucgagugcaccaccaucgugaacgggguccgccgguccuucuacguguacgccaacggcggcaagggguucugcaagcuccacaacuggaacugcgugaacugcgacaccuucugcgccggcagcacguucaucuccgacgaggucgcgcgcgaccugagccugcaguucaagcggccgaucaaccccaccgaccaguccagcuacaucguggacuccgugaccgucaaggacgggagcauccaccucuacuucgacaaggccggccagaagaccuacgagcgccacucccugagccacuucgugaaccuggacaaccuccgggccaacaacacgaaggggucccugcccaucaacgugaucgucuucgacggcaagagcaagugcgaggaguccagcgccaaguccgccagcguguacuacucccagcugaugugccagcccauccuccugcuggaccaggcgcucgugagcgacgucggcgacagcgccgagguggccgugaagauguucgacgccuacgucaacaccuucuccagcaccuucaacgugccgauggagaagcugaagacccugguggccacggcggaggccgagcucgccaagaacgucucccuggacaacgugcugagcaccuucaucuccgccgcgcgccagggguucguggacagcgacgucgagaccaaggacgugguggagugccucaagcugucccaccagagcgacaucgaggucaccggcgacuccugcaacaacuacaugcugacguacaacaagguggagaacaugaccccccgggaccucggggccugcaucgacugcagcgcccgccacaucaacgcccagguggccaagucccacaacaucgcgcugaucuggaacgucaaggacuucaugagccuguccgagcagcuccggaagcagauccgcagcgccgccaagaagaacaaccugcccuucaagcugaccugcgccaccacgcgccagguggugaacgucgugaccaccaagaucgcccucaagggcgggugaggacuagucccuguucccagagcccacuuuuuuuucuuuuuuugaaauaaaauagccugucuuucagaucucaaaggcucuuuucagagccaccaaaaaaaaaaaaaaaaaaaaaaaaaaaaaaaaaaaaaaaaaaaaaaaaaaaaaaaaaaaaaaaaaaaaaaaaaaaaaaaaaaaaaaaaaaaaaaaaaaaaa

SEQ ID NO: 19680 - RNA, 6113 nt, Artificial Sequence
  SARS-CoV-2__MT834646.1__non-structural protein 3 (NSP3) mRNA gc
aggagagucccgcagucggcguccagcggcucugcuuguucgugugugugucguugcaggccuuauucaagcuuaccauggcccccaccaaggugaccuucggcgacgacacggucaucgaggugcagggguacaagagcgugaacaucaccuucgagcuggacgagcgcaucgacaagguccucaacgagaagugcuccgccuacaccguggagcugggcaccgaggugaacgaguucgcgugcgucguggccgacgccgugaucaagacgcugcagccggucagcgagcuccugaccccccuggggaucgaccucgacgagugguccauggccaccuacuaccuguucgacgagagcggcgaguucaagcuggccucccacauguacugcagcuucuacccccccgacgaggacgaggaggagggggacugcgaggaggaggaguucgagccguccacccaguacgaguacggcacggaggacgacuaccagggcaagccccucgaguucggggcgaccagcgccgcccugcagcccgaggaggagcaggaggaggacuggcuggacgacgacucccagcagaccgugggccagcaggacgggagcgaggacaaccagaccacgaccauccagaccaucguggagguccagccccagcucgagauggagcugaccccgguggugcagacgaucgaggucaacuccuucagcggcuaccugaagcucaccgacaacguguacaucaagaacgccgacaucguggaggaggcgaagaaggucaagcccaccgugguggucaacgccgccaacguguaccugaagcacgggggcggcguggccggggcccugaacaaggcgaccaacaacgccaugcaggucgaguccgacgacuacaucgccacgaacggcccccucaagguggggggcagcugcguccuguccggccacaaccuggccaagcacugccuccacgugguggggcccaacgucaacaagggcgaggacauccagcugcugaagagcgccuacgagaacuucaaccagcacgaggugcuccuggcgccgcugcucuccgccgggaucuucggcgccgaccccauccacagccugcgggugugcgucgacaccgugcgcaccaacguguaccuggccgucuucgacaagaaccucuacgacaagcugguguccagcuuccuggagaugaagagcgagaagcagguggagcagaagaucgccgagauccccaaggaggaggucaagcccuucaucaccgaguccaagccgagcguggagcagcggaagcaggacgacaagaagaucaaggcgugcguggaggaggucacgaccacccucgaggagaccaaguuccugacggagaaccugcuccuguacaucgacaucaacgggaaccugcaccccgacuccgccacccucgugagcgacaucgacaucaccuuccugaagaaggacgcccccuacaucgugggcgacgucgugcaggagggcgugcugaccgccgucgugauccccacgaagaaggccgggggcaccaccgagaugcucgcgaaggcccugcgcaaggugccgaccgacaacuacaucacgaccuaccccgggcagggccugaacggguacaccgucgaggaggccaagaccgugcucaagaagugcaaguccgccuucuacauccugcccagcaucaucuccaacgagaagcaggagauccugggcaccgugagcuggaaccuccgggagaugcuggcgcacgccgaggagacgcgcaagcugaugcccgucugcguggagaccaaggccaucguguccaccauccagcggaaguacaagggcaucaagauccaggagggggucguggacuacggcgcccgcuucuacuucuacaccagcaagacgaccguggccucccugaucaacacccucaacgaccugaacgagacccuggucacgaugccgcucggguacgugacccacggccugaaccuggaggaggcggcccgguacaugcgcagccucaaggugcccgccaccgucuccgugagcucccccgacgccgugaccgccuacaacggguaccugacgagcuccagcaagacccccgaggagcacuucaucgagaccaucucccuggcgggcagcuacaaggacuggagcuacuccggccagagcacccagcucgggaucgaguuccugaagcggggcgacaaguccgucuacuacacgagcaacccgaccaccuuccaccuggacggggacgugaucaccuucgacaaccucaagacgcugcugucccuccgcgaggugcggaccaucaaggucuucaccaccguggacaacaucaaccugcacacgcagguggucgacaugagcaugaccuacggccagcaguucggccccaccuaccuggacggggccgacgugaccaagaucaagccccacaacucccacgagggcaagacguucuacgugcucccgaacgacgacacccugcgcgucgaggccuucgaguacuaccacaccaccgaccccagcuuccuggggcgguacauguccgcccucaaccacacgaagaaguggaaguacccccaggugaacggccugaccagcaucaagugggccgacaacaacugcuaccuggcgaccgcccuccugacccugcagcagaucgagcucaaguucaaccccccggcccugcaggacgccuacuaccgcgcgcgggccggggaggccgccaacuucugcgcccugauccucgcguacugcaacaagacggugggcgagcugggcgacguccgcgagaccauguccuaccuguuccagcacgccaaccucgacagcugcaagcgggugcugaacgucgugugcaagaccugcgggcagcagcagaccacccugaagggcguggaggccgucauguacauggggacgcucuccuacgagcaguucaagaagggcgugcagauccccugcaccugcgggaagcaggccaccaaguaccuggugcagcaggagagccccuucgucaugauguccgcccccccggcgcaguacgagcugaagcacggcaccuucacgugcgccagcgaguacaccggcaacuaccagugcgggcacuacaagcacaucaccuccaaggagacccucuacugcaucgacggcgcccugcugacgaagagcagcgaguacaaggggcccaucaccgacguguucuacaaggagaacuccuacaccaccacgaucaagcccgugaccuacaagcucgacggcgucgugugcaccgagaucgaccccaagcuggacaacuacuacaagaaggacaacagcuacuucaccgagcagccgaucgaccuggugcccaaccagcccuaccccaacgccuccuucgacaacuucaaguucgucugcgacaacaucaaguucgccgacgaccucaaccagcugacgggguacaagaagccggcgagccgcgagcugaaggugaccuucuuccccgaccucaacggcgacguggucgccaucgacuacaagcacuacacccccuccuucaagaagggcgccaagcugcugcacaagcccaucguguggcacgugaacaacgccaccaacaaggcgacguacaagccgaacaccuggugcauccggugccucuggagcaccaagcccgucgagaccuccaacagcuucgacgugcugaaguccgaggacgcccaggggauggacaaccuggccugcgaggaccucaagcccgugagcgaggaggucguggagaaccccacgauccagaaggacgugcuggagugcaacgucaagaccaccgagguggugggcgacaucauccugaagccggccaacaacucccucaagaucaccgaggaggucgggcacacggaccugauggccgcguacguggacaacagcucccugaccaucaagaagcccaacgagcucagccgcgugcugggccugaagacccucgccacccacgggcuggccgccgucaacuccgugcccugggacacgaucgccaacuacgcgaagccguuccugaacaagguggucagcaccaccaccaacaucgugacgcgcugccucaaccgggugugcaccaacuacaugcccuacuucuucacccugcugcuccagcugugcaccuucacccgcuccacgaacagccggaucaaggccuccaugcccaccaccaucgccaagaacaccgucaagagcgugggcaaguucugccuggaggccagcuucaacuaccucaagucccccaacuucagcaagcugaucaacaucaucaucugguuccugcuccuguccgugugccugggcagccucaucuacuccacggccgcgcuggggguccugaugagcaaccucggcaugccguccuacugcaccggguaccgcgagggcuaccugaacagcaccaacgugaccaucgccacguacugcaccggcuccauccccugcagcgugugccuguccgggcucgacagccuggacaccuaccccucccuggagaccauccagaucacgaucagcuccuucaagugggaccucaccgccuucggccuggucgccgagugguuccuggccuacauccucuucacccgguucuucuacgugcuggggcuggcggccaucaugcagcucuucuucagcuacuucgccgugcacuucaucuccaacagcuggcugauguggcugaucaucaaccugguccagauggcccccaucuccgcgauggugcgcauguacaucuucuucgccagcuucuacuacguguggaagagcuacguccacgugguggacggcugcaacuccagcaccugcaugaugugcuacaagcggaaccgcgccacgcgggucgagugcaccaccaucgugaacgggguccgccgguccuucuacguguacgccaacggcggcaagggguucugcaagcuccacaacuggaacugcgugaacugcgacaccuucugcgccggcagcacguucaucuccgacgaggucgcgcgcgaccugagccugcaguucaagcggccgaucaaccccaccgaccaguccagcuacaucguggacuccgugaccgucaagaacgggagcauccaccucuacuucgacaaggccggccagaagaccuacgagcgccacucccugagccacuucgugaaccuggacaaccuccgggccaacaacacgaaggggucccugcccaucaacgugaucgucuucgacggcaagagcaagugcgaggaguccagcgccaaguccgccagcguguacuacucccagcugaugugccagcccauccuccugcuggaccaggcgcucgugagcgacgucggcgacagcgccgagguggccgugaagauguucgacgccuacgucaacaccuucuccagcaccuucaacgugccgauggagaagcugaagacccugguggccacggcggaggccgagcucgccaagaacgucucccuggacaacgugcugagcaccuucaucuccgccgcgcgccagggguucguggacagcgacgucgagaccaaggacgugguggagugccucaagcugucccaccagagcgacaucgaggucaccggcgacuccugcaacaacuacaugcugacguacaacaagguggagaacaugaccccccgggaccucggggccugcaucgacugcagcgcccgccacaucaacgcccagguggccaagucccacaacaucgcgcugaucuggaacgucaaggacuucaugagccuguccgagcagcuccggaagcagauccgcagcgccgccaagaagaacaaccugcccuucaagcugaccugcgccaccacgcgccagguggugaacgucgugaccaccaagaucgcccucaagggcgggugaggacuagucccuguucccagagcccacuuuuuuuucuuuuuuugaaauaaaauagccugucuuucagaucucaaaggcucuuuucagagccaccaaaaaaaaaaaaaaaaaaaaaaaaaaaaaaaaaaaaaaaaaaaaaaaaaaaaaaaaaaaaaaaaaaaaaaaaaaaaaaaaaaaaaaaaaaaaaaaaaaaaa

SEQ ID NO: 19681 - RNA, 6113 nt, Artificial Sequence
  SARS-CoV-2__MT834656.1__non-structural protein 3 (NSP3) mRNA gc
aggagagucccgcagucggcguccagcggcucugcuuguucgugugugugucguugcaggccuuauucaagcuuaccauggcccccaccaaggugaccuucggcgacgacacggucaucgaggugcagggguacaagagcgugaacaucaccuucgagcuggacgagcgcaucgacaagguccucaacgagaagugcuccgccuacaccguggagcugggcaccgaggugaacgaguucgcgugcgucguggccgacgccgugaucaagacgcugcagccggucagcgagcuccugaccccccuggggaucgaccucgacgagugguccauggccaccuacuaccuguucgacgagagcggcgaguucaagcuggccucccacauguacugcagcuucuacccccccgacgaggacgaggaggagggggacugcgaggaggaggaguucgagccguccacccaguacgaguacggcacggaggacgacuaccagggcaagccccucgaguucggggcgaccagcgccgcccugcagcccgaggaggagcaggaggaggacuggcuggacgacgacucccagcagaccgugggccagcaggacgggagcgaggacaaccagaccacgaccauccagaccaucguggagguccagccccagcucgagauggagcugaccccgguggugcagacgaucgaggucaacuccuucagcggcuaccugaagcucaccgacaacguguacaucaagaacgccgacaucguggaggaggcgaagaaggucaagcccaccgugguggucaacgccgccaacguguaccugaagcacgggggcggcguggccggggcccugaacaaggcgaccaacaacgccaugcaggucgaguccgacgacuacaucgccacgaacggcccccucaagguggggggcagcugcguccuguccggccacaaccuggccaagcacugccuccacgugguggggcccaacgucaacaagggcgaggacauccagcugcugaagagcgccuacgagaacuucaaccagcacgaggugcuccuggcgccgcugcucuccgccgggaucuucggcgccgaccccauccacagccugcgggugugcgucgacaccgugcgcaccaacguguaccuggccgucuucgacaagaaccucuacgacaagcugguguccagcuuccuggagaugaagagcgagaagcagguggagcagaagaucgccgagauccccaaggaggaggucaagcccuucaucaccgaguccaagccgagcguggagcagcggaagcaggacgacaagaagaucaaggcgugcguggaggaggucacgaccacccucgaggagaccaaguuccugacggagaaccugcuccuguacaucgacaucaacgggaaccugcaccccgacuccgccacccucgugagcgacaucgacaucaccuuccugaagaaggacgcccccuacaucgugggcgacgucgugcaggagggcgugcugaccgccgucgugauccccacgaagaaggccgggggcaccaccgagaugcucgcgaaggcccugcgcaaggugccgaccgacaacuacaucacgaccuaccccgggcagggccugaacggguacaccgucgaggaggccaagaccgugcucaagaagugcaaguccgccuucuacauccugcccagcaucaucuccaacgagaagcaggagauccugggcaccgugagcuggaaccuccgggagaugcuggcgcacgccgaggagacgcgcaagcugaugcccgucugcguggagaccaaggccaucguguccaccauccagcggaaguacaagggcaucaagauccaggagggggucguggacuacggcgcccgcuucuacuucuacaccagcaagacgaccguggccucccugaucaacacccucaacgaccugaacgagacccuggucacgaugccgcucggguacgugacccacggccugaaccuggaggaggcggcccgguacaugcgcagccucaaggugcccgccaccgucuccgugagcucccccgacgccgugaccgccuacaacggguaccugacgagcuccagcaagacccccgaggagcacuucaucgagaccaucucccuggcgggcagcuacaaggacuggagcuacuccggccagagcacccagcucgggaucgaguuccugaagcggggcgacaaguccgucuacuacacgagcaacccgaccaccuuccaccuggacggggaggugaucaccuucgacaaccucaagacgcugcugucccuccgcgaggugcggaccaucaaggucuucaccaccguggacaacaucaaccugcacacgcagguggucgacaugagcaugaccuacggccagcaguucggccccaccuaccuggacggggccgacgugaccaagaucaagccccacaacucccacgagggcaagacguucuacgugcucccgaacgacgacacccugcgcgucgaggccuucgaguacuaccacaccaccgaccccagcuuccuggggcgguacauguccgcccucaaccacacgaagaaguggaaguacccccaggugaacggccugaccagcaucaagugggccgacaacaacugcuaccuggcgaccgcccuccugacccugcagcagaucgagcucaaguucaaccccccggcccugcaggacgccuacuaccgcgcgcgggccggggaggccgccaacuucugcgcccugauccucgcguacugcaacaagacggugggcgagcugggcgacguccgcgagaccauguccuaccuguuccagcacgccaaccucgacagcugcaagcgggugcugaacgucgugugcaagaccugcgggcagcagcagaccacccugaagggcguggaggccgucauguacauggggacgcucuccuacgagcaguucaagaagggcgugcagauccccugcaccugcgggaagcaggccaccaaguaccuggugcagcaggagagccccuucgucaugauguccgcccccccggcgcaguacgagcugaagcacggcaccuucacgugcgccagcgaguacaccggcaacuaccagugcgggcacuacaagcacaucaccuccaaggagacccucuacugcaucgacggcgcccugcugacgaagagcagcgaguacaaggggcccaucaccgacguguucuacaaggagaacuccuacaccaccacgaucaagcccgugaccuacaagcucgacggcgucgugugcaccgagaucgaccccaagcuggacaacuacuacaagaaggacaacagcuacuucaccgagcagccgaucgaccuggugcccaaccagcccuaccccaacgccggguucgacaacuucaaguucgucugcgacaacaucaaguucgccgacgaccucaaccagcugacgggcuacaagaagccggcgucccgcgagcugaaggugaccuucuuccccgaccucaacggcgacguggucgccaucgacuacaagcacuacacccccagcuucaagaagggggccaagcugcugcacaagcccaucguguggcacgugaacaacgccaccaacaaggcgacguacaagccgaacaccuggugcauccggugccucugguccaccaagcccgucgagaccagcaacuccuucgacgugcugaagagcgaggacgcccagggcauggacaaccuggccugcgaggaccucaagcccguguccgaggaggucguggagaaccccacgauccagaaggacgugcuggagugcaacgucaagaccaccgagguggugggggacaucauccugaagccggccaacaacagccucaagaucaccgaggaggucggccacacggaccugauggccgcguacguggacaacuccagccugaccaucaagaagcccaacgagcucucccgcgugcuggggcugaagacccucgccacccacggccuggccgccgucaacagcgugcccugggacacgaucgccaacuacgcgaagccguuccugaacaagguggucuccaccaccaccaacaucgugacgcgcugccucaaccgggugugcaccaacuacaugcccuacuucuucacccugcugcuccagcugugcaccuucacccgcagcacgaacucccggaucaaggccagcaugcccaccaccaucgccaagaacaccgucaaguccgugggcaaguucugccuggaggccagcuucaacuaccucaagagccccaacuucuccaagcugaucaacaucaucaucugguuccugcuccugagcgugugccuggggucccucaucuacagcacggccgcgcugggcguccugauguccaaccucgggaugccgagcuacugcaccggcuaccgcgagggcuaccugaacuccaccaacgugaccaucgccacguacugcaccgggagcauccccugcuccgugugccugagcggccucgacucccuggacaccuaccccagccuggagaccauccagaucacgaucuccagcuucaagugggaccucaccgccuucgggcuggucgccgagugguuccuggccuacauccucuucacccgguucuucuacgugcugggccuggcggccaucaugcagcucuucuucuccuacuucgccgugcacuucaucagcaacuccuggcugauguggcugaucaucaaccugguccagauggcccccaucagcgcgauggugcgcauguacaucuucuucgccuccuucuacuacguguggaagagcuacguccacgugguggacgggugcaacagcuccaccugcaugaugugcuacaagcggaaccgcgccacgcgggucgagugcaccaccaucgugaacggcguccgccggagcuucuacguguacgccaacggcgggaagggcuucugcaagcuccacaacuggaacugcgugaacugcgacaccuucugcgccggguccacguucaucagcgacgaggucgcgcgcgaccugucccugcaguucaagcggccgaucaaccccaccgaccagagcuccuacaucguggacagcgugaccgucaagaacggcuccauccaccucuacuucgacaaggccgggcagaagaccuacgagcgccacagccugucccacuucgugaaccuggacaaccuccgggccaacaacacgaagggcagccugcccaucaacgugaucgucuucgacggcaaguccaagugcgaggagagcuccgccaagagcgccuccguguacuacagccagcugaugugccagcccauccuccugcuggaccaggcgcucguguccgacgucggggacagcgccgagguggccgugaagauguucgacgccuacgucaacaccuucagcuccaccuucaacgugccgauggagaagcugaagacccugguggccacggcggaggccgagcucgccaagaacgucagccuggacaacgugcuguccaccuucaucagcgccgcgcgccagggcuucguggacuccgacgucgagaccaaggacgugguggagugccucaagcugagccaccaguccgacaucgaggucaccggggacagcugcaacaacuacaugcugacguacaacaagguggagaacaugaccccccgggaccucggcgccugcaucgacugcuccgcccgccacaucaacgcccagguggccaagagccacaacaucgcgcugaucuggaacgucaaggacuucaugucccugagcgagcagcuccggaagcagauccgcuccgccgccaagaagaacaaccugcccuucaagcugaccugcgccaccacgcgccagguggugaacgucgugaccaccaagaucgcccucaaggggggcugaggacuagucccuguucccagagcccacuuuuuuuucuuuuuuugaaauaaaauagccugucuuucagaucucaaaggcucuuuucagagccaccaaaaaaaaaaaaaaaaaaaaaaaaaaaaaaaaaaaaaaaaaaaaaaaaaaaaaaaaaaaaaaaaaaaaaaaaaaaaaaaaaaaaaaaaaaaaaaaaaaaaa

SEQ ID NO: 19682 - RNA, 6113 nt, Artificial Sequence
  SARS-CoV-2__MT834661.1__non-structural protein 3 (NSP3) mRNA gc
aggagagucccgcagucggcguccagcggcucugcuuguucgugugugugucguugcaggccuuauucaagcuuaccauggcccccaccaaggugaccuucggcgacgacacggucaucgaggugcagggguacaagagcgugaacaucaccuucgagcuggacgagcgcaucgacaagguccucaacgagaagugcuccgccuacaccguggagcugggcaccgaggugaacgaguucgcgugcgucguggccgacgccgugaucaagacgcugcagccggucagcgagcuccugaccccccuggggaucgaccucgacgagugguccauggccaccuacuaccuguucgacgagagcggcgaguucaagcuggccucccacauguacugcagcuucuacccccccgacgaggacgaggaggagggggacugcgaggaggaggaguucgagccguccacccaguacgaguacggcacggaggacgacuaccagggcaagccccucgaguucggggcgaccagcgccgcccugcagcccgaggaggagcaggaggaggacuggcuggacgacgacucccagcagaccgugggccagcaggacgggagcgaggacaaccagaccacgaccauccagaccaucguggagguccagccccagcucgagauggagcugaccccgguggugcagacgaucgaggucaacuccuucagcggcuaccugaagcucaccgacaacguguacaucaagaacgccgacaucguggaggaggcgaagaaggucaagcccaccgugguggucaacgccgccaacguguaccugaagcacgggggcggcguggccggggcccugaacaaggcgaccaacaacgccaugcaggucgaguccgacgacuacaucgccacgaacggcccccucaagguggggggcagcugcguccuguccggccacaaccuggccaagcacugccuccacgugguggggcccaacgucaacaagggcgaggacauccagcugcugaagagcgccuacgagaacuucaaccagcacgaggugcuccuggcgccgcugcucuccgccgggaucuucggcgccgaccccauccacagccugcgggugugcgucgacaccgugcgcaccaacguguaccuggccgucuucgacaagaaccucuacgacaagcugguguccagcuuccuggagaugaagagcgagaagcagguggagcagaagaucgccgagauccccaaggaggaggucaagcccuucaucaccgaguccaagccgagcguggagcagcggaagcaggacgacaagaagaucaaggcgugcguggaggaggucacgaccacccucgaggagaccaaguuccugacggagaaccugcuccuguacaucgacaucaacgggaaccugcaccccgacuccgccacccucgugagcgacaucgacaucaccuuccugaagaaggacgcccccuacaucgugggcgacgucgugcaggagggcgugcugaccgccgucgugauccccacgaagaaggccgggggcaccaccgagaugcucgcgaaggcccugcgcaaggugccgaccgacaacuacaucacgaccuaccccgggcagggccugaacggguacaccgucgaggaggccaagaccgugcucaagaagugcaaguccgccuucuacauccugcccagcaucaucuccaacgagaagcaggagauccugggcaccgugagcuggaaccuccgggagaugcuggcgcacgccgaggagacgcgcaagcugaugcccgucugcguggagaccaaggccaucguguccaccauccagcggaaguacaagggcaucaagauccaggagggggucguggacuacggcgcccgcuucuacuucuacaccagcaagacgaccguggccucccugaucaacacccucaacgaccugaacgagacccuggucacgaugccgcucggguacgugacccacggccugaaccuggaggaggcggcccgguacaugcgcagccucaaggugcccgccaccgucuccgugagcucccccgacgccgugaccgccuacaacggguaccugacgagcuccagcaagacccccgaggagcacuucaucgagaccaucucccuggcgggcagcuacaaggacuggagcuacuccggccagagcacccagcucgggaucgaguuccugaagcggggcgacaaguccgucuacuacacgagcaacccgaccaccuuccaccuggacggggaggugaucaccuucgacaaccucaagacgcugcugucccuccgcgaggugcggaccaucaaggucuucaccaccguggacaacaucaaccugcacacgcagguggucgacaugagcaugaccuacggccagcaguucggccccaccuaccuggacggggccgacgugaccaagaucaagccccacaacucccacgagggcaagacguucuacgugcucccgaacgacgacacccugcgcgucgaggccuucgaguacuaccacaccaccgaccccagcuuccuggggcgguacauguccgcccucaaccacacgaagaaguggaaguacccccaggugaacggccugaccagcaucaagugggccgacaacaacugcuaccuggcgaccgcccuccugacccugcagcagaucgagcucaaguucaaccccccggcccugcaggacgccuacuaccgcgcgcgggccggggaggccgccaacuucugcgcccugauccucgcguacugcaacaagacggugggcgagcugggcgacguccgcgagaccauguccuaccuguuccagcacgccaaccucgacagcugcaagcgggugcugaacgucgugugcaagaccugcgggcagcagcagaccacccugaagggcguggaggccgucauguacauggggacgcucuccuacgagcaguucaagaagggcgugcagauccccugcaccugcgggaagcaggccaccaaguaccuggugcagcaggagagccccuucgucaugauguccgcccccccggcgcaguacgagcugaagcacggcaccuucacgugcgccagcgaguacaccggcaacuaccagugcgggcacuacaagcacaucaccuccaaggagacccucuacugcaucgacggcgcccugcugacgaagagcagcgaguacaaggggcccaucaccgacguguucuacaaggagaacuccuacaccaccacgaucaagcccgugaccuacaagcucgacggcgucgugugcaccgagaucgaccccaagcuggacaacuacuacaagaaggacaacagcuacuucaccgagcagccgaucgaccuggugcccaaccagcccuaccccaacgccuccuucgacaacuucaaguucgucugcgacaacaucaaguucgccgacgaccucaaccagcugacgggguacaagaagccggcgagccgcgagcugaaggugaccuucuuccccgaccucaacggcgacguggucgccaucgacuacaagcacuacacccccuccuucaagaagggcgccaagcugcugcacaagcccaucguguggcacgugaacaacgccaccaacaaggcgacguacaagccgaacaccuggugcauccggugccucuggagcaccaagcccgucgagaccuccaacagcuucgacgugcugaaguccgaggacgcccaggggauggacaaccuggccugcgaggaccucaagcccgugagcgaggaggucguggagaaccccacgauccagaaggacgugcuggagugcaacgucaagaccaccgagguggugggcgacaucauccugaagccggccaacaacucccucaagaucaccgaggaggucgggcacacggaccugauggccgcguacguggacaacagcucccugaccaucaagaagcccaacgagcucagccgcgugcugggccugaagacccucgccacccacgggcuggccgccgucaacuccgugcccugggacacgaucgccaacuacgcgaagccguuccugaacaagguggucagcaccaccaccaacaucgugacgcgcugccucaaccgggugugcaccaacuacaugcccuacuucuucacccugcugcuccagcugugcaccuucacccgcuccacgaacagccggaucaaggccuccaugcccaccaccaucgccaagaacaccgucaagagcgugggcaaguucugccuggaggccagcuucaacuaccucaagucccccaacuucagcaagcugaucaacaucaucaucugguuccugcuccuguccgugugccugggcagccucaucuacuccacggccgcgcuggggguccugaugagcaaccucggcaugccguccuacugcaccggguaccgcgagggcuaccugaacagcaccaacgugaccaucgccacguacugcaccggcuccauccccugcagcgugugccuguccgggcucgacagccuggacaccuaccccucccuggagaccauccagaucacgaucagcuccuucaagugggaccucaccgccuucggccuggucgccgagugguuccuggccuacauccucuucacccgguucuucuacgugcuggggcuggcggccaucaugcagcucuucuucagcuacuucgccgugcacuucaucuccaacagcuggcugauguggcugaucaucaaccugguccagauggcccccaucuccgcgauggugcgcauguacaucuucuucgccagcuucuacuacguguggaagagcuacguccacgugguggacggcugcaacuccagcaccugcaugaugugcuacaagcggaaccgcgccacgcgggucgagugcaccaccaucgugaacgggguccgccgguccuucuacguguacgccaacggcggcaagggguucugcaagcuccacaacuggaacugcgugaacugcgacaccuucugcgccggcagcacguucaucuccgacgaggucgcgcgcgaccugagccugcaguucaagcggccgaucaaccccaccgaccaguccuucuacaucguggacagcgugaccgucaagaacggguccauccaccucuacuucgacaaggccggccagaagaccuacgagcgccacagccugucccacuucgugaaccuggacaaccuccgggccaacaacacgaaggggagccugcccaucaacgugaucgucuucgacggcaaguccaagugcgaggagagcuccgccaagagcgccuccguguacuacagccagcugaugugccagcccauccuccugcuggaccaggcgcucguguccgacgucggcgacagcgccgagguggccgugaagauguucgacgccuacgucaacaccuucagcuccaccuucaacgugccgauggagaagcugaagacccugguggccacggcggaggccgagcucgccaagaacgucagccuggacaacgugcuguccaccuucaucagcgccgcgcgccagggguucguggacuccgacgucgagaccaaggacgugguggagugccucaagcugagccaccaguccgacaucgaggucaccggcgacagcugcaacaacuacaugcugacguacaacaagguggagaacaugaccccccgggaccucggggccugcaucgacugcuccgcccgccacaucaacgcccagguggccaagagccacaacaucgcgcugaucuggaacgucaaggacuucaugucccugagcgagcagcuccggaagcagauccgcuccgccgccaagaagaacaaccugcccuucaagcugaccugcgccaccacgcgccagguggugaacgucgugaccaccaagaucgcccucaagggcgggugaggacuagucccuguucccagagcccacuuuuuuuucuuuuuuugaaauaaaauagccugucuuucagaucucaaaggcucuuuucagagccaccaaaaaaaaaaaaaaaaaaaaaaaaaaaaaaaaaaaaaaaaaaaaaaaaaaaaaaaaaaaaaaaaaaaaaaaaaaaaaaaaaaaaaaaaaaaaaaaaaaaaa

SEQ ID NO: 19683 - RNA, 6113 nt, Artificial Sequence
  SARS-CoV-2__MT834662.1__non-structural protein 3 (NSP3) mRNA gc
aggagagucccgcagucggcguccagcggcucugcuuguucgugugugugucguugcaggccuuauucaagcuuaccauggcccccaccaaggugaccuucggcgacgacacggucaucgaggugcagggguacaagagcgugaacaucaccuucgagcuggacgagcgcaucgacaagguccucaacgagaagugcuccgccuacaccguggagcugggcaccgaggugaacgaguucgcgugcgucguggccgacgccgugaucaagacgcugcagccggucagcgagcuccugaccccccuggggaucgaccucgacgagugguccauggccaccuacuaccuguucgacgagagcggcgaguucaagcuggccucccacauguacugcagcuucuacccccccgacgaggacgaggaggagggggacugcgaggaggaggaguucgagccguccacccaguacgaguacggcacggaggacgacuaccagggcaagccccucgaguucggggcgaccagcgccgcccugcagcccgaggaggagcaggaggaggacuggcuggacgacgacucccagcagaccgugggccagcaggacgggagcgaggacaaccagaccacgaccauccagaccaucguggagguccagccccagcucgagauggagcugaccccgguggugcagacgaucgaggucaacuccuucagcggcuaccugaagcucaccgacaacguguacaucaagaacgccgacaucguggaggaggcgaagaaggucaagcccaccgugguggucaacgccgccaacguguaccugaagcacgggggcggcguggccggggcccugaacaaggcgaccaacaacgccaugcaggucgaguccgacgacuacaucgccacgaacggcccccucaagguggggggcagcugcguccuguccggccacaaccuggccaagcacugccuccacgugguggggcccaacgucaacaagggcgaggacauccagcugcugaagagcgccuacgagaacuucaaccagcacgaggugcuccuggcgccgcugcucuccgccgggaucuucggcgccgaccccauccacagccugcgggugugcgucgacaccgugcgcaccaacguguaccuggccgucuucgacaagaaccucuacgacaagcugguguccagcuuccuggagaugaagagcgagaagcagguggagcagaagaucgccgagauccccaaggaggaggucaagcccuucaucaccgaguccaagccgagcguggagcagcggaagcaggacgacaagaagaucaaggcgugcguggaggaggucacgaccacccucgaggagaccaaguuccugacggagaaccugcuccuguacaucgacaucaacgggaaccugcaccccgacuccgccacccucgugagcgacaucgacaucaccuuccugaagaaggacgcccccuacaucgugggcgacgucgugcaggagggcgugcugaccgccgucgugauccccacgaagaaggccgggggcaccaccgagaugcucgcgaaggcccugcgcaaggugccgaccgacaacuacaucacgaccuaccccgggcagggccugaacggguacaccgucgaggaggccaagaccgugcucaagaagugcaaguccgccuucuacauccugcccagcaucaucuccaacgagaagcaggagauccugggcaccgugagcuggaaccuccgggagaugcuggcgcacgccgaggagacgcgcaagcugaugcccgucugcguggagaccaaggccaucguguccaccauccagcggaaguacaagggcaucaagauccaggagggggucguggacuacggcgcccgcuucuacuucuacaccagcaagacgaccguggccucccugaucaacacccucaacgaccugaacgagacccuggucacgaugccgcucggguacgugacccacggccugaaccuggaggaggcggcccgguacaugcgcagccucaaggugcccgccaccgucuccgugagcucccccgacgccgugaccgccuacaacggguaccugacgagcuccagcaagacccccgaggagcacuucaucgagaccaucucccuggcgggcagcuacaaggacuggagcuacuccggccagagcacccagcucgggaucgaguuccugaagcggggcgacaaguccgucuacuacacgagcaacccgaccaccuuccaccuggacggggaggugaucaccuucgacaaccucaagacgcugcugucccuccgcgaggugcggaccaucaaggucuucaccaccguggacaacaucaaccugcacacgcagguggucgacaugagcaugaccuacggccagcaguucggccccaccuaccuggacggggccgacgugaccaagaucaagccccacaacucccacgagggcaagacguucuacgugcucccgaacgacgacacccugcgcgucgaggccuucgaguacuaccacaccaccgaccccagcuuccuggggcgguacauguccgcccucaaccacacgaagaaguggaaguacccccaggugaacggccugaccagcaucaagugggccgacaacaacugcuaccuggcgaccgcccuccugacccugcagcagaucgagcucaaguucaaccccccggcccugcaggacgccuacuaccgcgcgcgggccggggaggccgccaacuucugcgcccugauccucgcguacugcaacaagacggugggcgagcugggcgacguccgcgagaccauguccuaccuguuccagcacgccaaccucgacagcugcaagcgggugcugaacgucgugugcaagaccugcgggcagcagcagaccacccugaagggcguggaggccgucauguacauggggacgcucuccuacgagcaguucaagaagggcgugcagauccccugcaccugcgggaagcaggccaccaaguaccuggugcagcaggagagccccuucgucaugauguccgcccccccggcgcaguacgagcugaagcacggcaccuucacgugcgccagcgaguacaccggcaacuaccagugcgggcacuacaagcacaucaccuccaaggagacccucuacugcaucgacggcgcccugcugacgaagagcagcgaguacaaggggcccaucaccgacguguucuacaaggagaacuccuacaccaccacgaucaagcccgugaccuacaagcucgacggcgucgugugcaccgagaucgaccccaagcuggacaacuacuacaagaaggacaacagcuacuucaccgagcagccgaucgaccuggugcccaaccagcccuaccccaacgccuccuucgacaacuucaaguucgucugcgacaacaucaaguucgccgacgaccucaaccagcugacgggguacaagaagccggcgagccgcgagcugaaggugaccuucuuccccgaccucaacggcgacguggucgccaucgacuacaagcacuacacccccuccuucaagaagggcgccaagcugcugcacaagcccaucguguggcacgugaacaacgccaccaacaaggcgacguacaagccgaacaccuggugcauccggugccucuggagcaccaagcccgucgagaccuccaacagcuucgacgugcugaaguccgaggacgcccaggggauggacaaccuggccugcgaggaccucaagcccgugagcgaggaggucguggagaaccccacgauccagaaggacgugcuggagugcaacgucaagaccaccgagguggugggcgacaucauccugaagccggccaacaacucccucaagaucaccgaggaggucgggcacacggaccugauggccgcguacguggacaacagcucccugaccaucaagaagcccaacgagcucagccgcgugcugggccugaagacccucgccacccacgggcuggccgccgucaacuccgugcccugggacacgaucgccaacuacgcgaagccguuccugaacaagguggucagcaccaccaccaacaucgugacgcgcugccucaaccgggugugcaccaacuacaugcccuacuucuucacccugcugcuccagcugugcaccuucacccgcuccacgaacagccggaucaaggccuccaugcccaccaccaucgccaagaacaccgucaagagcgugggcaaguucugccuggaggccagcuucaacuaccucaagucccccaacuucagcaagcugaucaacaucaucaucugguuccugcuccuguccgugugccugggcagccucaucuacuccacggccgcgcuggggguccugaugagcaaccucggcaugccguccuacugcaccggguaccgcgagggcuaccugaacagcaccaacgugaccaucgccacguacugcaccggcuccauccccugcagcgugugccuguccgggcucgacagccuggacaccuaccccucccuggagaccauccagaucacgaucagcuccuucaagugggaccucaccgccuucggccuggucgccgagugguuccuggccuacauccucuucacccgguucuucuacgugcuggggcuggcggccaucaugcagcucuucuucagcuacuucgccgugcacuucaucuccaacagcuggcugauguggcugaucaucaaccugguccagauggcccccaucuccgcgauggugcgcauguacaucuucuucgccagcuucuacuacguguggaagagcuacguccacgugguggacggcugcaacuccagcaccugcaugaugugcuacaagcggaaccgcgccacgcgggucgagugcaccaccaucgugaacgggguccgccgguccuucuacguguacgccaacggcggcaagggguucugcaagcuccacaacuggaacugcgugaacugcgacaccuucugcgccggcagcacguucaucuccgacgaggucgcgcgcgaccugagccugcaguucaagcggccgaucaaccccaccgaccaguccagcuacaucguggacuccgugaccgucaagaacgggagcauccaccucuacuucgacaaggccggccagaagaccuacgagcgccacucccugagccacuucgugaaccuggacaaccuccgggccaacaacacgaaggggucccugcccaucaacgugaucgucuucgacggcaagagcaagugcgaggaguccagcgccaaguccgccagcguguacuacucccagcugaugugccagcccauccuccugcuggaccaggcgcucgugagcgacgucggcgacagcgccgagguggccgugaagauguucgacgccuacgucaacaccuucuccagcaccuucaacgugccgauggagaagcugaagacccugguggccacggcggaggccgagcucgccaagaacgucucccuggacaacgugcugagcaccuucaucuccgccgcgcgccagggguucguggacagcgacgucgagaccaaggacgugguggagugccucaagcugucccaccagagcgacaucgaggucaccggcgacuccugcaacaacuacaugcugacguacaacaagguggagaacaugaccccccgggacuucggggccugcaucgacugcagcgcccgccacaucaacgcccagguggccaagucccacaacaucgcgcucaucuggaacgucaaggacuucaugagccuguccgagcagcugcggaagcagauccgcagcgccgccaagaagaacaaccuccccuucaagcugaccugcgccaccacgcgccagguggugaacgucgugaccaccaagaucgcccugaagggcgggugaggacuagucccuguucccagagcccacuuuuuuuucuuuuuuugaaauaaaauagccugucuuucagaucucaaaggcucuuuucagagccaccaaaaaaaaaaaaaaaaaaaaaaaaaaaaaaaaaaaaaaaaaaaaaaaaaaaaaaaaaaaaaaaaaaaaaaaaaaaaaaaaaaaaaaaaaaaaaaaaaaaaa

SEQ ID NO: 19684 - RNA, 6113 nt, Artificial Sequence
  SARS-CoV-2__MT834668.1__non-structural protein 3 (NSP3) mRNA gc
aggagagucccgcagucggcguccagcggcucugcuuguucgugugugugucguugcaggccuuauucaagcuuaccauggcccccaccaaggugaccuucggcgacgacacggucaucgaggugcagggguacaagagcgugaacaucaccuucgagcuggacgagcgcaucgacaagguccucaacgagaagugcuccgccuacaccguggagcugggcaccgaggugaacgaguucgcgugcgucguggccgacgccgugaucaagacgcugcagccggucagcgagcuccugaccccccuggggaucgaccucgacgagugguccauggccaccuacuaccuguucgacgagagcggcgaguucaagcuggccucccacauguacugcagcuucuacccccccgacgaggacgaggaggagggggacugcgaggaggaggaguucgagccguccacccaguacgaguacggcacggaggacgacuaccagggcaagccccucgaguucggggcgaccagcgccgcccugcagcccgaggaggagcaggaggaggacuggcuggacgacgacucccagcagaccgugggccagcaggacgggagcgaggacaaccagaccacgaccauccagaccaucguggagguccagccccagcucgagauggagcugaccccgguggugcagacgaucgaggucaacuccuucagcggcuaccugaagcucaccgacaacguguacaucaagaacgccgacaucguggaggaggcgaagaaggucaagcccaccgugguggucaacgccgccaacguguaccugaagcacgggggcggcguggccggggcccugaacaaggcgaccaacaacgccaugcaggucgaguccgacgacuacaucgccacgaacggcccccucaagguggggggcagcugcguccuguccggccacaaccuggccaagcacugccuccacgugguggggcccaacgucaacaagggcgaggacauccagcugcugaagagcgccuacgagaacuucaaccagcacgaggugcuccuggcgccgcugcucuccgccgggaucuucggcgccgaccccauccacagccugcgggugugcgucgacaccgugcgcaccaacguguaccuggccgucuucgacaagaaccucuacgacaagcugguguccagcuuccuggagaugaagagcgagaagcagguggagcagaagaucgccgagauccccaaggaggaggucaagcccuucaucaccgaguccaagccgagcguggagcagcggaagcaggacgacaagaagaucaaggcgugcguggaggaggucacgaccacccucgaggagaccaaguuccugacggagaaccugcuccuguacaucgacaucaacgggaaccugcaccccgacuccgccacccucgugagcgacaucgacaucaccuuccugaagaaggacgcccccuacaucgugggcgacgucgugcaggagggcgugcugaccgccgucgugauccccacgaagaaggccgggggcaccaccgagaugcucgcgaaggcccugcgcaaggugccgaccgacaacuacaucacgaccuaccccgggcagggccugaacggguacaccgucgaggaggccaagaccgugcucaagaagugcaaguccgccuucuacauccugcccagcaucaucuccaacgagaagcaggagauccugggcaccgugagcuggaaccuccgggagaugcuggcgcacgccgaggagacgcgcaagcugaugcccgucugcguggagaccaaggccaucguguccaccauccagcggaaguacaagggcaucaagauccaggagggggucguggacuacggcgcccgcuucuacuucuacaccagcaagacgaccguggccucccugaucaacacccucaacgaccugaacgagacccuggucacgaugccgcucggguacgugacccacggccugaaccuggaggaggcggcccgguacaugcgcagccucaaggugcccgccaccgucuccgugagcucccccgacgccgugaccgccuacaacggguaccugacgagcuccagcaagacccccgaggagcacuucaucgagaccaucucccuggcgggcagcuacaaggacuggagcuacuccggccagagcacccagcucgggaucgaguuccugaagcggggcgacaaguccgucuacuacacgagcaacccgaccaccuuccaccuggacggggaggugaucaccuucgacaaccucaagacgcugcugucccuccgcgaggugcggaccaucaaggucuucaccaccguggacaacaucaaccugcacacgcagguggucgacaugagcaugaccuacggccagcaguucggccccaccuaccuggacggggccgacgugaccaagaucaagucccacaacagccacgagggcaagacguucuacgugcuccccaacgacgacacccugcgcgucgaggccuucgaguacuaccacaccaccgacccguccuuccuggggcgguacaugagcgcccucaaccacacgaagaaguggaaguacccccaggugaacggccugaccuccaucaagugggccgacaacaacugcuaccuggcgaccgcccuccugacccugcagcagaucgagcucaaguucaacccccccgcccugcaggacgccuacuaccgcgcgcgggccggggaggccgccaacuucugcgcccugauccucgcguacugcaacaagacggugggcgagcugggcgacguccgcgagaccaugagcuaccuguuccagcacgccaaccucgacuccugcaagcgggugcugaacgucgugugcaagaccugcgggcagcagcagaccacccugaagggcguggaggccgucauguacauggggacgcucagcuacgagcaguucaagaagggcgugcagaucccgugcaccugcgggaagcaggccaccaaguaccuggugcagcaggagucccccuucgucaugaugagcgccccccccgcgcaguacgagcugaagcacggcaccuucacgugcgccuccgaguacaccggcaacuaccagugcgggcacuacaagcacaucaccagcaaggagacccucuacugcaucgacggcgcccugcugacgaagagcuccgaguacaaggggccgaucaccgacguguucuacaaggagaacagcuacaccaccacgaucaagcccgugaccuacaagcucgacggcgucgugugcaccgagaucgaccccaagcuggacaacuacuacaagaaggacaacuccuacuucaccgagcagcccaucgaccuggugccgaaccagcccuaccccaacgccagcuucgacaacuucaaguucgucugcgacaacaucaaguucgccgacgaccucaaccagcugacgggguacaagaagcccgcgucccgcgagcugaaggugaccuucuucccggaccucaacggcgacguggucgccaucgacuacaagcacuacacccccagcuucaagaagggcgccaagcugcugcacaagcccaucguguggcacgugaacaacgccaccaacaaggcgacguacaagcccaacaccuggugcauccggugccucugguccaccaagccggucgagaccagcaacuccuucgacgugcugaagagcgaggacgcccaggggauggacaaccuggccugcgaggaccucaagcccguguccgaggaggucguggagaaccccacgauccagaaggacgugcuggagugcaacgucaagaccaccgagguggugggcgacaucauccugaagcccgccaacaacagccucaagaucaccgaggaggucgggcacacggaccugauggccgcguacguggacaacuccagccugaccaucaagaagccgaacgagcucucccgcgugcugggccugaagacccucgccacccacgggcuggccgccgucaacagcgugcccugggacacgaucgccaacuacgcgaagcccuuccugaacaagguggucuccaccaccaccaacaucgugacgcgcugccucaaccgggugugcaccaacuacaugccguacuucuucacccugcugcuccagcugugcaccuucacccgcagcacgaacucccggaucaaggccagcaugcccaccaccaucgccaagaacaccgucaagagcgugggcaaguucugccuggaggccuccuucaacuaccucaagagccccaacuucuccaagcugaucaacaucaucaucugguuccugcuccugagcgugugccugggcucccucaucuacagcacggccgcgcuggggguccugauguccaaccucggcaugcccagcuacugcaccggguaccgcgagggcuaccugaacuccaccaacgugaccaucgccacguacugcaccggcagcaucccgugcuccgugugccugagcgggcucgacucccuggacaccuaccccagccuggagaccauccagaucacgaucuccagcuucaagugggaccucaccgccuucggccuggucgccgagugguuccuggccuacauccucuucacccgguucuucuacgugcuggggcuggcggccaucaugcagcucuucuucuccuacuucgccgugcacuucaucagcaacuccuggcugauguggcugaucaucaaccugguccagauggcccccaucagcgcgauggugcgcauguacaucuucuucgccagcuucuacuacguguggaaguccuacguccacgugguggacggcugcaacagcuccaccugcaugaugugcuacaagcggaaccgcgccacgcgggucgagugcaccaccaucgugaacgggguccgccggagcuucuacguguacgccaacggcggcaagggguucugcaagcuccacaacuggaacugcgugaacugcgacaccuucugcgccggcuccacguucaucagcgacgaggucgcgcgcgaccugucccugcaguucaagcggcccaucaacccgaccgaccagagcuccuacaucguggacagcgugaccgucaagaacggguccauccaccucuacuucgacaaggccggccagaagaccuacgagcgccacagccugucccacuucgugaaccuggacaaccuccgggccaacaacacgaaggggagccugcccaucaacgugaucgucuucgacggcaaguccaagugcgaggagagcuccgccaagagcgccuccguguacuacagccagcugaugugccagcccauccuccugcuggaccaggcgcucgugagcgacgucggcgacuccgccgagguggccgugaagauguucgacgccuacgucaacaccuucagcuccaccuucaacgugcccauggagaagcugaagacccugguggccacggcggaggccgagcucgccaagaacgucagccuggacaacgugcuguccaccuucaucagcgccgcgcgccagggguucguggacuccgacgucgagaccaaggacgugguggagugccucaagcugagccaccaguccgacaucgaggucaccggcgacagcugcaacaacuacaugcugacguacaacaagguggagaacaugaccccgcgggaccucggggccugcaucgacugcuccgcccgccacaucaacgcccagguggccaagagccacaacaucgcgcugaucuggaacgucaaggacuucaugucccugagcgagcagcuccggaagcagauccgcuccgccgccaagaagaacaaccugcccuucaagcugaccugcgccaccacgcgccagguggugaacgucgugaccaccaagaucgcccucaagggcgggugaggacuagucccuguucccagagcccacuuuuuuuucuuuuuuugaaauaaaauagccugucuuucagaucucaaaggcucuuuucagagccaccaaaaaaaaaaaaaaaaaaaaaaaaaaaaaaaaaaaaaaaaaaaaaaaaaaaaaaaaaaaaaaaaaaaaaaaaaaaaaaaaaaaaaaaaaaaaaaaaaaaaa

SEQ ID NO: 19685 - RNA, 6113 nt, Artificial Sequence
  SARS-CoV-2__MT834697.1__non-structural protein 3 (NSP3) mRNA gc
aggagagucccgcagucggcguccagcggcucugcuuguucgugugugugucguugcaggccuuauucaagcuuaccauggcccccaccaaggugaccuucggcgacgacacggucaucgaggugcagggguacaagagcgugaacaucaccuucgagcuggacgagcgcaucgacaagguccucaacgagaagugcuccgccuacaccguggagcugggcaccgaggugaacgaguucgcgugcgucguggccgacgccgugaucaagacgcugcagccggucagcgagcuccugaccccccuggggaucgaccucgacgagugguccauggccaccuacuaccuguucgacgagagcggcgaguucaagcuggccucccacauguacugcagcuucuacccccccgacgaggacgaggaggagggggacugcgaggaggaggaguucgagccguccacccaguacgaguacggcacggaggacgacuaccagggcaagccccucgaguucggggcgaccagcgccgcccugcagcccgaggaggagcaggaggaggacuggcuggacgacgacucccagcagaccgugggccagcaggacgggagcgaggacaaccagaccacgaccauccagaccaucguggagguccagccccagcucgagauggagcugaccccgguggugcagacgaucgaggucaacuccuucagcggcuaccugaagcucaccgacaacguguacaucaagaacgccgacaucguggaggaggcgaagaaggucaagcccaccgugguggucaacgccgccaacguguaccugaagcacgggggcggcguggccggggcccugaacaaggcgaccaacaacgccaugcaggucgaguccgacgacuacaucgccacgaacggcccccucaagguggggggcagcugcguccuguccggccacaaccuggccaagcacugccuccacgugguggggcccaacgucaacaagggcgaggacauccagcugcugaagagcgccuacgagaacuucaaccagcacgaggugcuccuggcgccgcugcucuccgccgggaucuucggcgccgaccccauccacagccugcgggugugcgucgacaccgugcgcaccaacguguaccuggccgucuucgacaagaaccucuacgacaagcugguguccagcuuccuggagaugaagagcgagaagcagguggagcagaagaucgccgagauccccaaggaggaggucaagcccuucaucaccgaguccaagccgagcguggagcagcggaagcaggacgacaagaagaucaaggcgugcguggaggaggucacgaccacccucgaggagaccaaguuccugacggagaaccugcuccuguacaucgacaucaacgggaaccugcaccccgacuccgccacccucgugagcgacaucgacaucaccuuccugaagaaggacgcccccuacaucgugggcgacgucgugcaggagggcgugcugaccgccgucgugauccccacgaagaaggccgggggcaccaccgagaugcucgcgaaggcccugcgcaaggugccgaccgacaacuacaucacgaccuaccccgggcagggccugaacggguacaccgucgaggaggccaagaccgugcucaagaagugcaaguccgccuucuacauccugcccagcaucaucuccaacgagaagcaggagauccugggcaccgugagcuggaaccuccgggagaugcuggcgcacgccgaggagacgcgcaagcugaugcccgucugcguggagaccaaggccaucguguccaccauccagcggaaguacaagggcaucaagauccaggagggggucguggacuacggcgcccgcuucuacuucuacaccagcaagacgaccguggccucccugaucaacacccucaacgaccugaacgagacccuggucacgaugccgcucggguacgugacccacggccugaaccuggaggaggcggcccgguacaugcgcagccucaaggugcccgccaccgucuccgugagcucccccgacgccgugaccgccuacaacggguaccugacgagcuccagcaagacccccgaggagcacuucaucgagaccaucucccuggcgggcagcuacaaggacuggagcuacuccggccagagcacccagcucgggaucgaguuccugaagcggggcgacaaguccgucuacuacacgagcaacccgaccaccuuccaccuggacggggaggugaucaccuucgacaaccucaagacgcugcugucccuccgcgaggugcggaccaucaaggucuucaccaccguggacaacaucaaccugcacacgcagguggucgacaugagcaugaccuacggccagcaguucggccccaccuaccuggacggggccgacgugaccaagaucaagccccacaacucccacgagggcaagacguucuacgugcucccgaacgacgacacccugcgcgucgaggccuucgaguacuaccacaccaccgaccccagcuuccuggggcgguacauguccgcccucaaccacacgaagaaguggaaguacccccaggugaacggccugaccagcaucaagugggccgacaacaacugcuaccuggcgaccgcccuccugacccugcagcagaucgagcucaaguucaaccccccggcccugcaggacgccuacuaccgcgcgcgggccggggaggccgccaacuucugcgcccugauccucgcguacugcaacaagacggugggcgagcugggcgacguccgcgagaccauguccuaccuguuccagcacgccaaccucgacagcugcaagcgggugcugaacgucgugugcaagaccugcgggcagcagcagaccacccugaagggcguggaggccgucauguacauggggacgcucuccuacgagcaguucaagaagggcgugcagauccccugcaccugcgggaagcaggccaccaaguaccuggugcagcaggagagccccuucgucaugauguccgcccccccggcgcaguacgagcugaagcacggcaccuucacgugcgccagcgaguacaccggcaacuaccagugcgggcacuacaagcacaucaccuccaaggagacccucuacugcaucgacggcgcccugcugacgaagagcagcgaguacaaggggcccaucaccgacguguucuacaaggagaacuccuacaccaccacgaucaagcccgugaccuacaagcucgacggcgucgugugcaccgagaucgaccccaagcuggacaacuacuacaagaaggacaacagcuacuucaccgagcagccgaucgaccuggugcccaaccagcccuaccccaacgccaucuucgacaacuucaaguucgucugcgacaacaucaaguucgccgacgaccucaaccagcugacgggguacaagaagccggcgucccgcgagcugaaggugaccuucuuccccgaccucaacggcgacguggucgccaucgacuacaagcacuacacccccagcuucaagaagggcgccaagcugcugcacaagcccaucguguggcacgugaacaacgccaccaacaaggcgacguacaagccgaacaccuggugcauccggugccucugguccaccaagcccgucgagaccagcaacuccuucgacgugcugaagagcgaggacgcccaggggauggacaaccuggccugcgaggaccucaagcccguguccgaggaggucguggagaaccccacgauccagaaggacgugcuggagugcaacgucaagaccaccgagguggugggcgacaucauccugaagccggccaacaacagccucaagaucaccgaggaggucgggcacacggaccugauggccgcguacguggacaacuccagccugaccaucaagaagcccaacgagcucucccgcgugcugggccugaagacccucgccacccacgggcuggccgccgucaacagcgugcccugggacacgaucgccaacuacgcgaagccguuccugaacaagguggucuccaccaccaccaacaucgugacgcgcugccucaaccgggugugcaccaacuacaugcccuacuucuucacccugcugcuccagcugugcaccuucacccgcagcacgaacucccggaucaaggccagcaugcccaccaccaucgccaagaacaccgucaaguccgugggcaaguucugccuggaggccagcuucaacuaccucaagagccccaacuucuccaagcugaucaacaucaucaucugguuccugcuccugagcgugugccugggcucccucaucuacagcacggccgcgcuggggguccugauguccaaccucggcaugccgagcuacugcaccggguaccgcgagggcuaccugaacuccaccaacgugaccaucgccacguacugcaccggcagcauccccugcuccgugugccugagcgggcucgacucccuggacaccuaccccagccuggagaccauccagaucacgaucuccagcuucaagugggaccucaccgccuucggccuggucgccgagugguuccuggccuacauccucuucacccgguucuucuacgugcuggggcuggcggccaucaugcagcucuucuucuccuacuucgccgugcacuucaucagcaacuccuggcugauguggcugaucaucaaccugguccagauggcccccaucagcgcgauggugcgcauguacaucuucuucgccuccuucuacuacguguggaagagcuacguccacgugguggacggcugcaacagcuccaccugcaugaugugcuacaagcggaaccgcgccacgcgggucgagugcaccaccaucgugaacgggguccgccggagcuucuacguguacgccaacggcggcaagggguucugcaagcuccacaacuggaacugcgugaacugcgacaccuucugcgccggcuccacguucaucagcgacgaggucgcgcgcgaccugucccugcaguucaagcggccgaucaaccccaccgaccagagcuccuacaucguggacagcgugaccgucaagaacggguccauccaccucuacuucgacaaggccggccagaagaccuacgagcgccacagccugucccacuucgugaaccuggacaaccuccgggccaacaacacgaaggggagccugcccaucaacgugaucgucuucgacggcaaguccaagugcgaggagagcuccgccaagagcgccuccguguacuacagccagcugaugugccagcccauccuccugcuggaccaggcgcucguguccgacgucggcgacagcgccgagguggccgugaagauguucgacgccuacgucaacaccuucagcuccaccuucaacgugccgauggagaagcugaagacccugguggccacggcggaggccgagcucgccaagaacgucagccuggacaacgugcuguccaccuucaucagcgccgcgcgccagggguucguggacuccgacgucgagaccaaggacgugguggagugccucaagcugagccaccaguccgacaucgaggucaccggcgacagcugcaacaacuacaugcugacguacaacaagguggagaacaugaccccccgggaccucggggccugcaucgacugcuccgcccgccacaucaacgcccagguggccaagagccacaacaucgcgcugaucuggaacgucaaggacuucaugucccugagcgagcagcuccggaagcagauccgcuccgccgccaagaagaacaaccugcccuucaagcugaccugcgccaccacgcgccagguggugaacgucgugaccaccaagaucgcccucaagggcgggugaggacuagucccuguucccagagcccacuuuuuuuucuuuuuuugaaauaaaauagccugucuuucagaucucaaaggcucuuuucagagccaccaaaaaaaaaaaaaaaaaaaaaaaaaaaaaaaaaaaaaaaaaaaaaaaaaaaaaaaaaaaaaaaaaaaaaaaaaaaaaaaaaaaaaaaaaaaaaaaaaaaaa

SEQ ID NO: 19686 - RNA, 6113 nt, Artificial Sequence
  SARS-CoV-2__MT834733.1__non-structural protein 3 (NSP3) mRNA gc
aggagagucccgcagucggcguccagcggcucugcuuguucgugugugugucguugcaggccuuauucaagcuuaccauggcccccaccaaggugaccuucggcgacgacacggucaucgaggugcagggguacaagagcgugaacaucaccuucgagcuggacgagcgcaucgacaagguccucaacgagaagugcuccgccuacaccguggagcugggcaccgaggugaacgaguucgcgugcgucguggccgacgccgugaucaagacgcugcagccggucagcgagcuccugaccccccuggggaucgaccucgacgagugguccauggccaccuacuaccuguucgacgagagcggcgaguucaagcuggccucccacauguacugcagcuucuacccccccgacgaggacgaggaggagggggacugcgaggaggaggaguucggcccguccacccaguacgaguacggcacggaggacgacuaccaggggaagccccucgaguucggcgcgaccagcgccgcccugcagcccgaggaggagcaggaggaggacuggcuggacgacgacucccagcagaccguggggcagcaggacggcagcgaggacaaccagaccacgaccauccagaccaucguggagguccagccccagcucgagauggagcugaccccgguggugcagacgaucgaggucaacuccuucagcggguaccugaagcucaccgacaacguguacaucaagaacgccgacaucguggaggaggcgaagaaggucaagcccaccgugguggucaacgccgccaacguguaccugaagcacggcggcgggguggccggcgcccugaacaaggcgaccaacaacgccaugcaggucgaguccgacgacuacaucgccacgaacgggccccucaaggugggcggcagcugcguccuguccgggcacaaccuggccaagcacugccuccacguggugggccccaacgucaacaagggggaggacauccagcugcugaagagcgccuacgagaacuucaaccagcacgaggugcuccuggcgccgcugcucuccgccggcaucuucggggccgaccccauccacagccugcgggugugcgucgacaccgugcgcaccaacguguaccuggccgucuucgacaagaaccucuacgacaagcugguguccagcuuccuggagaugaagagcgagaagcagguggagcagaagaucgccgagauccccaaggaggaggucaagcccuucaucaccgaguccaagccgagcguggagcagcggaagcaggacgacaagaagaucaaggcgugcguggaggaggucacgaccacccucgaggagaccaaguuccugacggagaaccugcuccuguacaucgacaucaacggcaaccugcaccccgacuccgccacccucgugagcgacaucgacaucaccuuccugaagaaggacgcccccuacaucgugggcgacgucgugcaggagggggugcugaccgccgucgugauccccacgaagaaggccggcgggaccaccgagaugcucgcgaaggcccugcgcaaggugccgaccgacaacuacaucacgaccuaccccggccaggggcugaacggcuacaccgucgaggaggccaagaccgugcucaagaagugcaaguccgccuucuacauccugcccagcaucaucuccaacgagaagcaggagauccugggcaccgugagcuggaaccuccgggagaugcuggcgcacgccgaggagacgcgcaagcugaugcccgucugcguggagaccaaggccaucguguccaccauccagcggaaguacaaggggaucaagauccaggagggcgucguggacuacggggcccgcuucuacuucuacaccagcaagacgaccguggccucccugaucaacacccucaacgaccugaacgagacccuggucacgaugccgcucggcuacgugacccacgggcugaaccuggaggaggcggcccgguacaugcgcagccucaaggugcccgccaccgucuccgugagcucccccgacgccgugaccgccuacaacggcuaccugacgagcuccagcaagacccccgaggagcacuucaucgagaccaucucccuggcgggcagcuacaaggacuggagcuacuccgggcagagcacccagcucggcaucgaguuccugaagcggggggacaaguccgucuacuacacgagcaacccgaccaccuuccaccuggacggcgaggugaucaccuucgacaaccucaagacgcugcugucccuccgcgaggugcggaccaucaaggucuucaccaccguggacaacaucaaccugcacacgcagguggucgacaugagcaugaccuacggccagcaguucgggcccaccuaccuggacggcgccgacgugaccaagaucaagccccacaacucccacgaggggaagacguucuacgugcucccgaacgacgacacccugcgcgucgaggccuucgaguacuaccacaccaccgaccccagcuuccugggccgguacauguccgcccucaaccacacgaagaaguggaaguacccccaggugaacgggcugaccagcaucaagugggccgacaacaacugcuaccuggcgaccgcccuccugacccugcagcagaucgagcucaaguucaaccccccggcccugcaggacgccuacuaccgcgcgcgggccggcgaggccgccaacuucugcgcccugauccucgcguacugcaacaagacggugggcgagcugggggacguccgcgagaccauguccuaccuguuccagcacgccaaccucgacagcugcaagcgggugcugaacgucgugugcaagaccugcggccagcagcagaccacccugaaggggguggaggccgucauguacaugggcacgcucuccuacgagcaguucaagaagggggugcagauccccugcaccugcggcaagcaggccaccaaguaccuggugcagcaggagagccccuucgucaugauguccgcccccccggcgcaguacgagcugaagcacggcaccuucacgugcgccagcgaguacaccgggaacuaccagugcggccacuacaagcacaucaccuccaaggagacccucuacugcaucgacggggcccugcugacgaagagcagcgaguacaagggccccaucaccgacguguucuacaaggagaacuccuacaccaccacgaucaagcccgugaccuacaagcucgacggggucgugugcaccgagaucgaccccaagcuggacaacuacuacaagaaggacaacagcuacuucaccgagcagccgaucgaccuggugcccaaccagcccuaccccaacgccuccuucgacaacuucaaguucgucugcgacaacaucaaguucgccgacgaccucaaccagcugacgggcuacaagaagccggcgagccgcgagcugaaggugaccuucuuccccgaccucaacggcgacguggucgccaucgacuacaagcacuacacccccuccuucaagaagggggccaagcugcugcacaagcccaucguguggcacgugaacaacgccaccaacaaggcgacguacaagccgaacaccuggugcauccggugccucuggagcaccaagcccgucgagaccuccaacagcuucgacgugcugaaguccgaggacgcccagggcauggacaaccuggccugcgaggaccucaagcccgugagcgaggaggucguggagaaccccacgauccagaaggacgugcuggagugcaacgucaagaccaccgagguggugggggacaucauccugaagccggccaacaacucccucaagaucaccgaggaggucggccacacggaccugauggccgcguacguggacaacagcucccugaccaucaagaagcccaacgagcucagccgcgugcuggggcugaagacccucgccacccacggccuggccgccgucaacuccgugcccugggacacgaucgccaacuacgcgaagccguuccugaacaagguggucagcaccaccaccaacaucgugacgcgcugccucaaccgggugugcaccaacuacaugcccuacuucuucacccugcugcuccagcugugcaccuucacccgcuccacgaacagccggaucaaggccuccaugcccaccaccaucgccaagaacaccgucaagagcgugggcaaguucugccuggaggccagcuucaacuaccucaagucccccaacuucagcaagcugaucaacaucaucaucugguuccugcuccuguccgugugccuggggagccucaucuacuccacggccgcgcugggcguccugaugagcaaccucgggaugccguccuacugcaccggcuaccgcgagggcuaccugaacagcaccaacgugaccaucgccacguacugcaccggguccauccccugcagcgugugccuguccggccucgacagccuggacaccuaccccucccuggagaccauccagaucacgaucagcuccuucaagugggaccucaccgccuucgggcuggucgccgagugguuccuggccuacauccucuucacccgguucuucuacgugcugggccuggcggccaucaugcagcucuucuucagcuacuucgccgugcacuucaucuccaacagcuggcugauguggcugaucaucaaccugguccagauggcccccaucuccgcgauggugcgcauguacaucuucuucgccagcuucuacuacguguggaagagcuacguccacgugguggacgggugcaacuccagcaccugcaugaugugcuacaagcggaaccgcgccacgcgggucgagugcaccaccaucgugaacggcguccgccgguccuucuacguguacgccaacggcgggaagggcuucugcaagcuccacaacuggaacugcgugaacugcgacaccuucugcgccgggagcacguucaucuccgacgaggucgcgcgcgaccugagccugcaguucaagcggccgaucaaccccaccgaccaguccagcuacaucguggacuccgugaccgucaagaacggcagcauccaccucuacuucgacaaggccgggcagaagaccuacgagcgccacucccugagccacuucgugaaccuggacaaccuccgggccaacaacacgaagggcucccugcccaucaacgugaucgucuucgacggcaagagcaagugcgaggaguccagcgccaaguccgccagcguguacuacucccagcugaugugccagcccauccuccugcuggaccaggcgcucgugagcgacgucggggacagcgccgagguggccgugaagauguucgacgccuacgucaacaccuucuccagcaccuucaacgugccgauggagaagcugaagacccugguggccacggcggaggccgagcucgccaagaacgucucccuggacaacgugcugagcaccuucaucuccgccgcgcgccagggcuucguggacagcgacgucgagaccaaggacgugguggagugccucaagcugucccaccagagcgacaucgaggucaccggggacuccugcaacaacuacaugcugacguacaacaagguggagaacaugaccccccgggaccucggcgccugcaucgacugcagcgcccgccacaucaacgcccagguggccaagucccacaacaucgcgcugaucuggaacgucaaggacuucaugagccuguccgagcagcuccggaagcagauccgcagcgccgccaagaagaacaaccugcccuucaagcugaccugcgccaccacgcgccagguggugaacgucgugaccaccaagaucgcccucaaggggggcugaggacuagucccuguucccagagcccacuuuuuuuucuuuuuuugaaauaaaauagccugucuuucagaucucaaaggcucuuuucagagccaccaaaaaaaaaaaaaaaaaaaaaaaaaaaaaaaaaaaaaaaaaaaaaaaaaaaaaaaaaaaaaaaaaaaaaaaaaaaaaaaaaaaaaaaaaaaaaaaaaaaaa

SEQ ID NO: 19687 - RNA, 6113 nt, Artificial Sequence
  SARS-CoV-2__MT704820.1__non-structural protein 3 (NSP3) mRNA gc
aggagagucccgcagucggcguccagcggcucugcuuguucgugugugugucguugcaggccuuauucaagcuuaccauggcccccaccaaggugaccuucggcgacgacacggucaucgaggugcagggguacaagagcgugaacaucaccuucgagcuggacgagcgcaucgacaagguccucaacgagaagugcuccgccuacaccguggagcugggcaccgaggugaacgaguucgcgugcgucguggccgacgccgugaucaagacgcugcagccggucagcgagcuccugaccccccuggggaucgaccucgacgagugguccauggccaccuacuaccuguucgacgagagcggcgaguucaagcuggccucccacauguacugcagcuucuacccccccgacgaggacgaggaggagggggacugcgaggaggaggaguucgagccguccacccaguacgaguacggcacggaggacgacuaccagggcaagccccucgaguucggggcgaccagcgccgcccugcagcccgaggaggagcaggaggaggacuggcuggacgacgacucccagcagaccgugggccagcaggacgggagcgaggacaaccagaccacgaccauccagaccaucguggagguccagccccagcucgagauggagcugaccccgguggugcagacgaucgaggucaacuccuucagcggcuaccugaagcucaccgacaacguguacaucaagaacgccgacaucguggaggaggcgaagaaggucaagcccaccgugguggucaacgccgccaacguguaccugaagcacgggggcggcguggccggggcccugaacaaggcgaccaacaacgccaugcaggucgaguccgacgacuacaucgccacgaacggcccccucaagguggggggcagcugcguccuguccggccacaaccuggccaagcacugccuccacgugguggggcccaacgucaacaagggcgaggacauccagcugcugaagagcgccuacgagaacuucaaccagcacgaggugcuccuggcgccgcugcucuccgccgggaucuucggcgccgaccccauccacagccugcgggugugcgucgacaccgugcgcaccaacguguaccuggccgucuucgacaagaaccucuacgacaagcugguguccagcuuccuggagaugaagagcgagaagcagguggagcagaagaucgccgagauccccaaggaggaggucaagcccuucaucaccgaguccaagccgagcguggagcagcggaagcaggacgacaacaagaucaaggcgugcguggaggaggucacgaccacccucgaggagaccaaguuccugacggagaaccugcuccuguacaucgacaucaacgggaaccugcaccccgacuccgccacccucgugagcgacaucgacaucaccuuccugaagaaggacgcccccuacaucgugggcgacgucgugcaggagggcgugcugaccgccgucgugauccccacgaagaaggccgggggcaccaccgagaugcucgcgaaggcccugcgcaaggugccgaccgacaacuacaucacgaccuaccccgggcagggccugaacggguacaccgucgaggaggccaagaccgugcucaagaagugcaaguccgccuucuacauccugcccagcaucaucuccaacgagaagcaggagauccugggcaccgugagcuggaaccuccgggagaugcuggcgcacgccgaggagacgcgcaagcugaugcccgucugcguggagaccaaggccaucguguccaccauccagcggaaguacaagggcaucaagauccaggagggggucguggacuacggcgcccgcuucuacuucuacaccagcaagacgaccguggccucccugaucaacacccucaacgaccugaacgagacccuggucacgaugccgcucggguacgugacccacggccugaaccuggaggaggcggcccgguacaugcgcagccucaaggugcccgccaccgucuccgugagcucccccgacgccgugaccgccuacaacggguaccugacgagcuccagcaagacccccgaggagcacuucaucgagaccaucucccuggcgggcagcuacaaggacuggagcuacuccggccagagcacccagcucgggaucgaguuccugaagcggggcgacaaguccgucuacuacacgagcaacccgaccaccuuccaccuggacggggaggugaucaccuucgacaaccucaagacgcugcugucccuccgcgaggugcggaccaucaaggucuucaccaccguggacaacaucaaccugcacacgcagguggucgacaugagcaugaccuacggccagcaguucggccccaccuaccuggacggggccgacgugaccaagaucaagccccacaacucccacgagggcaagacguucuacgugcucccgaacgacgacacccugcgcgucgaggccuucgaguacuaccacaccaccgaccccagcuuccuggggcgguacauguccgcccucaaccacacgaagaaguggaaguacccccaggugaacggccugaccagcaucaagugggccgacaacaacugcuaccuggcgaccgcccuccugacccugcagcagaucgagcucaaguucaaccccccggcccugcaggacgccuacuaccgcgcgcgggccggggaggccgccaacuucugcgcccugauccucgcguacugcaacaagacggugggcgagcugggcgacguccgcgagaccauguccuaccuguuccagcacgccaaccucgacagcugcaagcgggugcugaacgucgugugcaagaccugcgggcagcagcagaccacccugaagggcguggaggccgucauguacauggggacgcucuccuacgagcaguucaagaagggcgugcagauccccugcaccugcgggaagcaggccaccaaguaccuggugcagcaggagagccccuucgucaugauguccgcccccccggcgcaguacgagcugaagcacggcaccuucacgugcgccagcgaguacaccggcaacuaccagugcgggcacuacaagcacaucaccuccaaggagacccucuacugcaucgacggcgcccugcugacgaagagcagcgaguacaaggggcccaucaccgacguguucuacaaggagaacuccuacaccaccacgaucaagcccgugaccuacaagcucgacggcgucgugugcaccgagaucgaccccaagcuggacaacuacuacaagaaggacaacagcuacuucaccgagcagccgaucgaccuggugcccaaccagcccuaccccaacgccuccuucgacaacuucaaguucgucugcgacaacaucaaguucgccgacgaccucaaccagcugacgggguacaagaagccggcgagccgcgagcugaaggugaccuucuuccccgaccucaacggcgacguggucgccaucgacuacaagcacuacacccccuccuucaagaagggcgccaagcugcugcacaagcccaucguguggcacgugaacaacgccaccaacaaggcgacguacaagccgaacaccuggugcauccggugccucuggagcaccaagcccgucgagaccuccaacagcuucgacgugcugaaguccgaggacgcccaggggauggacaaccuggccugcgaggaccucaagcccgugagcgaggaggucguggagaaccccacgauccagaaggacgugcuggagugcaacgucaagaccaccgagguggugggcgacaucauccugaagccggccaacaacucccucaagaucaccgaggaggucgggcacacggaccugauggccgcguacguggacaacagcucccugaccaucaagaagcccaacgagcucagccgcgugcugggccugaagacccucgccacccacgggcuggccgccgucaacuccgugcccugggacacgaucgccaacuacgcgaagccguuccugaacaagguggucagcaccaccaccaacaucgugacgcgcugccucaaccgggugugcaccaacuacaugcccuacuucuucacccugcugcuccagcugugcaccuucacccgcuccacgaacagccggaucaaggccuccaugcccaccaccaucgccaagaacaccgucaagagcgugggcaaguucugccuggaggccagcuucaacuaccucaagucccccaacuucagcaagcugaucaacaucaucaucugguuccugcuccuguccgugugccugggcagccucaucuacuccacggccgcgcuggggguccugaugagcaaccucggcaugccguccuacugcaccggguaccgcgagggcuaccugaacagcaccaacgugaccaucgccacguacugcaccggcuccauccccugcagcgugugccuguccgggcucgacagccuggacaccuaccccucccuggagaccauccagaucacgaucagcuccuucaagugggaccucaccgccuucggccuggucgccgagugguuccuggccuacauccucuucacccgguucuucuacgugcuggggcuggcggccaucaugcagcucuucuucagcuacuucgccgugcacuucaucuccaacagcuggcugauguggcugaucaucaaccugguccagauggcccccaucuccgcgauggugcgcauguacaucuucuucgccagcuucuacuacguguggaagagcuacguccacgugguggacggcugcaacuccagcaccugcaugaugugcuacaagcggaaccgcgccacgcgggucgagugcaccaccaucgugaacgggguccgccgguccuucuacguguacgccaacggcggcaagggguucugcaagcuccacaacuggaacugcgugaacugcgacaccuucugcgccggcagcacguucaucuccgacgaggucgcgcgcgaccugagccugcaguucaagcggccgaucaaccccaccgaccaguccagcuacaucguggacuccgugaccgucaagaacgggagcauccaccucuacuucgacaaggccggccagaagaccuacgagcgccacucccugagccacuucgugaaccuggacaaccuccgggccaacaacacgaaggggucccugcccaucaacgugaucgucuucgacggcaagagcaagugcgaggaguccagcgccaaguccgccagcguguacuacucccagcugaugugccagcccauccuccugcuggaccaggcgcucgugagcgacgucggcgacagcgccgagguggccgugaagauguucgacgccuacgucaacaccuucuccagcaccuucaacgugccgauggagaagcugaagacccugguggccacggcggaggccgagcucgccaagaacgucucccuggacaacgugcugagcaccuucaucuccgccgcgcgccagggguucguggacagcgacgucgagaccaaggacgugguggagugccucaagcugucccaccagagcgacaucgaggucaccggcgacuccugcaacaacuacaugcugacguacaacaagguggagaacaugaccccccgggaccucggggccugcaucgacugcagcgcccgccacaucaacgcccagguggccaagucccacaacaucgcgcugaucuggaacgucaaggacuucaugagccuguccgagcagcuccggaagcagauccgcagcgccgccaagaagaacaaccugcccuucaagcugaccugcgccaccacgcgccagguggugaacgucgugaccaccaagaucgcccucaagggcgggugaggacuagucccuguucccagagcccacuuuuuuuucuuuuuuugaaauaaaauagccugucuuucagaucucaaaggcucuuuucagagccaccaaaaaaaaaaaaaaaaaaaaaaaaaaaaaaaaaaaaaaaaaaaaaaaaaaaaaaaaaaaaaaaaaaaaaaaaaaaaaaaaaaaaaaaaaaaaaaaaaaaaa

SEQ ID NO: 19688 - RNA, 6113 nt, Artificial Sequence
  SARS-CoV-2__MT827209.1__non-structural protein 3 (NSP3) mRNA gc
aggagagucccgcagucggcguccagcggcucugcuuguucgugugugugucguugcaggccuuauucaagcuuaccauggcccccaccaaggugaccuucggcgacgacacggucaucgaggugcagggguacaagagcgugaacaucaccuucgagcuggacgagcgcaucgacaagguccucaacgagaagugcuccgccuacaccguggagcugggcaccgaggugaacgaguucgcgugcgucguggccgacgccgugaucaagacgcugcagccggucagcgagcuccugaccccccuggggaucgaccucgacgagugguccauggccaccuacuaccuguucgacgagagcggcgaguucaagcuggccucccacauguacugcagcuucuacccccccgacgaggacgaggaggagggggacugcgaggaggaggaguucgagccguccacccaguacgaguacggcacggaggacgacuaccagggcaagccccucgaguucggggcgaccagcgccgcccugcagcccgaggaggagcaggaggaggacuggcuggacgacgacucccagcagaccgugggccagcaggacgggagcgaggacaaccagaccacgaccauccagaccaucguggagguccagccccagcucgagauggagcugaccccgguggugcagacgaucgaggucaacuccuucagcggcuaccugaagcucaccgacaacguguacaucaagaacgccgacaucguggaggaggcgaagaaggucaagcccaccgugguggucaacgccgccaacguguaccugaagcacgggggcggcguggccggggcccugaacaaggcgaccaacaacgccaugcaggucgaguccgacgacuacaucgccacgaacggcccccucaagguggggggcagcugcguccuguccggccacaaccuggccaagcacugccuccacgugguggggcccaacgucaacaagggcgaggacauccagcugcugaagagcgccuacgagaacuucaaccagcacgaggugcuccuggcgccgcugcucuccgccgggaucuucggcgccgaccccauccacagccugcgggugugcgucgacaccgugcgcaccaacguguaccuggccgucuucgacaagaaccucuacgacaagcugguguccagcuuccuggagaugaagagcgagaagcagguggagcagaagaucgccgagauccccaaggaggaggucaagcccuucaucaccgaguccaagccgagcguggagcagcggaagcaggacgacaagaagaucaaggcgugcguggaggaggucacgaccacccucgaggagaccaaguuccugacggagaaccugcuccuguacaucgacaucaacgggaaccugcaccccgacuccgccacccucgugagcgacaucgacaucaccuuccugaagaaggacgcccccuacaucgugggcgacgucgugcaggagggcgugcugaccgccgucgugauccccacgaagaaggccgggggcaccaccgagaugcucgcgaaggcccugcgcaaggugccgaccgacaacuacaucacgaccuaccccgggcagggccugaacggguacaccgucgaggaggccaagaccgugcucaagaagugcaaguccgccuucuacauccugcccagcaucaucuccaacgagaagcaggagauccugggcaccgugagcuggaaccuccgggagaugcuggcgcacgccgaggagacgcgcaagcugaugcccgucugcguggagaccaaggccaucguguccaccauccagcggaaguacaagggcaucaagauccaggagggggucguggacuacggcgcccgcuucuacuucuacaccagcaagacgaccguggccucccugaucaacacccucaacgaccugaacgagacccuggucacgaugccgcucggguacgugacccacggccugaaccuggaggaggcggcccgguacaugcgcagccucaaggugcccgccaccgucuccgugagcucccccgacgccgugaccgccuacaacggguaccugacgagcuccagcaagacccccgaggagcacuucaucgagaccaucucccuggcgggcagcuacaaggacuggagcuacuccggccagagcacccagcucgggaucgaguuccugaagcggggcgacaaguccgucuacuacacgagcaacccgaccaccuuccaccuggacggggaggugaucaccuucgacaaccucaagacgcugcugucccuccgcgaggugcggaccaucaaggucuucaccaccguggacaacaucaaccugcacacgcagguggucgacaugagcaugaccuacggccagcaguucggccccaccuaccuggacggggccgacgugaccaagaucaagccccacaacucccacgagggcaagacguucuacgugcucccgaacgacgacacccugcgcgucgaggccuucgaguacuaccacaccaccgaccccagcuuccuggggcgguacauguccgcccucaaccacacgaagaaguggaaguacccccaggugaacggccugaccagcaucaagugggccgacaacaacugcuaccuggcgaccgcccuccugacccugcagcagaucgagcucaaguucaaccccccggcccugcaggacgccuacuaccgcgcgcgggccggggaggccgccaacuucugcgcccugauccucgcguacugcaacaagacggugggcgagcugggcgacguccgcgagaccauguccuaccuguuccagcacgccaaccucgacagcugcaagcgggugcugaacgucgugugcaagaccugcgggcagcagcagaccacccugaagggcguggaggccgucauguacauggggacgcucuccuacgagcaguucaagaagggcgugcagauccccugcaccugcgggaagcaggccaccaaguaccuggugcagcaggagagccccuucgucaugauguccgcccccccggcgcaguacgagcugaagcacggcaccuucacgugcgccagcgaguacaccggcaacuaccagugcgggcacuacaagcacaucaccuccaaggagacccucuacugcaucgacggcgcccugcugacgaagagcagcgaguacaaggggcccaucaccgacguguucuacaaggagaacuccuacaccaccacgaucaagcccgugaccuacaagcucgacggcgucgugugcaccgagaucgaccccaagcuggacaacuacuacaagaaggacaacagcuacuucaccgagcagccgaucgaccuggugcccaaccagcccuaccccaacgccuccuucgacaacuucaaguucgucugcgacaacaucaaguucgccgacgaccucaaccagcugacgggguacaagaagccggcgagccgcgagcugaaggugaccuucuuccccgaccucaacggcgacguggucgccaucgacuacaagcacuacacccccuccuucaagaagggcgccaagcugcugcacaagcccaucguguggcacgugaacaacgccaccaacaaggucacguacaagccgaacaccuggugcauccggugccucuggagcaccaagcccguggagaccuccaacagcuucgacgugcugaaguccgaggacgcgcaggggauggacaaccuggccugcgaggaccucaagcccgucagcgaggaggugguggagaaccccacgauccagaaggacguccuggagugcaacgugaagaccaccgagguggucggcgacaucauccugaagccggccaacaacucccucaagaucaccgaggagguggggcacacggaccugauggccgccuacguggacaacagcucccugaccaucaagaagcccaacgagcucagccgcguccugggccugaagacccucgcgacccacgggcuggccgccgugaacuccgugcccugggacacgaucgccaacuacgccaagccguuccugaacaaggucgugagcaccaccaccaacaucgugacgcgcugccucaaccgggucugcaccaacuacaugcccuacuucuucacccugcugcuccagcugugcaccuucacccgcuccacgaacagccggaucaaggcguccaugcccaccaccaucgccaagaacaccgugaagagcgugggcaaguucugccuggaggccagcuucaacuaccucaagucccccaacuucagcaagcugaucaacaucaucaucugguuccugcuccuguccgucugccugggcagccucaucuacuccacggccgcccugggggugcugaugagcaaccucggcaugccguccuacugcaccggguaccgcgagggcuaccugaacagcaccaacgugaccaucgcgacguacugcaccggcuccauccccugcagcgucugccuguccgggcucgacagccuggacaccuaccccucccuggagaccauccagaucacgaucagcuccuucaagugggaccucaccgccuucggccugguggccgagugguuccuggccuacauccucuucacccgguucuucuacgugcuggggcuggccgcgaucaugcagcucuucuucagcuacuucgccguccacuucaucuccaacagcuggcugauguggcugaucaucaaccuggugcagauggcccccaucuccgccauggugcgcauguacaucuucuucgcgagcuucuacuacgucuggaagagcuacgugcacguggucgacggcugcaacuccagcaccugcaugaugugcuacaagcggaaccgcgccacgcggguggagugcaccaccaucgucaacggggugcgccgguccuucuacguguacgccaacggcggcaagggguucugcaagcuccacaacuggaacugcgucaacugcgacaccuucugcgccggcagcacguucaucuccgacgagguggcccgcgaccugagccugcaguucaagcggccgaucaaccccaccgaccaguccagcuacaucguggacuccgucaccgugaagaacgggagcauccaccucuacuucgacaaggcgggccagaagaccuacgagcgccacucccugagccacuucgugaaccuggacaaccuccgggccaacaacacgaaggggucccugcccaucaacgucaucguguucgacggcaagagcaagugcgaggaguccagcgccaaguccgccagcguguacuacucccagcugaugugccagcccauccuccugcuggaccaggcccucgucagcgacgugggcgacagcgcggagguggccgucaagauguucgacgccuacgugaacaccuucuccagcaccuucaacgugccgauggagaagcugaagacccuggucgccacggccgaggcggagcucgccaagaacgugucccuggacaacgugcugagcaccuucaucuccgccgcccgccagggguucgucgacagcgacguggagaccaaggacguggucgagugccucaagcugucccaccagagcgacaucgaggugaccggcgacuccugcaacaacuacaugcugacguacaacaagguggagaacaugaccccccgggaccucggggcgugcaucgacugcagcgcccgccacaucaacgcccaggucgccaagucccacaacaucgcccugaucuggaacgugaaggacuucaugagccuguccgagcagcuccggaagcagauccgcagcgcggccaagaagaacaaccugcccuucaagcugaccugcgccaccacgcgccagguggucaacguggugaccaccaagaucgcccucaagggcgggugaggacuagucccuguucccagagcccacuuuuuuuucuuuuuuugaaauaaaauagccugucuuucagaucucaaaggcucuuuucagagccaccaaaaaaaaaaaaaaaaaaaaaaaaaaaaaaaaaaaaaaaaaaaaaaaaaaaaaaaaaaaaaaaaaaaaaaaaaaaaaaaaaaaaaaaaaaaaaaaaaaaaa

SEQ ID NO: 19689 - RNA, 6113 nt, Artificial Sequence
  SARS-CoV-2__MT827213.1__non-structural protein 3 (NSP3) mRNA gc
aggagagucccgcagucggcguccagcggcucugcuuguucgugugugugucguugcaggccuuauucaagcuuaccauggcccccaccaaggugaccuucggcgacgacacggucaucgaggugcagggguacaagagcgugaacaucaccuucgagcuggacgagcgcaucgacaagguccucaacgagaagugcuccgccuacaccguggagcugggcaccgaggugaacgaguucgcgugcgucguggccgacgccgugaucaagacgcugcagccggucagcgagcuccugaccccccuggggaucgaccucgacgagugguccauggccaccuacuaccuguucgacgagagcggcgaguucaagcuggccucccacauguacugcagcuucuacccccccgacgaggacgaggaggagggggacugcgaggaggaggaguucgagccguccacccaguacgaguacggcacggaggacgacuaccagggcaagccccucgaguucggggcgaccagcgccgcccugcagcccgaggaggagcaggaggaggacuggcuggacgacgacucccagcagaccgugggccagcaggacgggagcgaggacaaccagaccacgaccauccagaccaucguggagguccagccccagcucgagauggagcugaccccgguggugcagacgaucgaggucaacuccuucagcggcuaccugaagcucaccgacaacguguacaucaagaacgccgacaucguggaggaggcgaagaaggucaagcccaccgugguggucaacgccgccaacguguaccugaagcacgggggcggcguggccggggcccugaacaaggcgaccaacaacgccaugcaggucgaguccgacgacuacaucgccacgaacggcccccucaagguggggggcagcugcguccuguccggccacaaccuggccaagcacugccuccacgugguggggcccaacgucaacaagggcgaggacauccagcugcugaagagcgccuacgagaacuucaaccagcacgaggugcuccuggcgccgcugcucuccgccgggaucuucggcgccgaccccauccacagccugcgggugugcgucgacaccgugcgcaccaacguguaccuggccgucuucgacaagaaccucuacgacaagcugguguccagcuuccuggagaugaagagcgagaagcagguggagcagaagaucgccgagauccccaaggaggaggucaagcccuucaucaccgaguccaagccgagcguggagcagcggaagcaggacgacaagaagaucaaggcgugcguggaggaggucacgaccacccucgaggagaccaaguuccugacggagaaccugcuccuguacaucgacaucaacgggaaccugcaccccgacuccgccacccucgugagcgacaucgacaucaccuuccugaagaaggacgcccccuacaucgugggcgacgucgugcaggagggcgugcugaccgccgucgugauccccacgaagaaggccgggggcaccaccgagaugcucgcgaaggcccugcgcaaggugccgaccgacaacuacaucacgaccuaccccgggcagggccugaacggguacaccgucgaggaggccaagaccgugcucaagaagugcaaguccgccuucuacauccugcccagcaucaucuccaacgagaagcaggagauccugggcaccgugagcuggaaccuccgggagaugcuggcgcacgccgaggagacgcgcaagcugaugcccgucugcguggagaccaaggccaucguguccaccauccagcggaaguacaagggcaucaagauccaggagggggucguggacuacggcgcccgcuucuacuucuacaccagcaagacgaccguggccucccugaucaacacccucaacgaccugaacgagacccuggucacgaugccgcucggguacgugacccacggccugaaccuggaggaggcggcccgguacaugcgcagccucaaggugcccgccaccgucuccgugagcucccccgacgccgugaccgccuacaacggguaccugacgagcuccagcaagacccccgaggagcacuucaucgagaccaucucccuggcgggcagcuacaaggacuggagcuacuccggccagagcacccagcucgggaucgaguuccugaagcggggcgacaaguccgucuacuacacgagcaacccgaccaccuuccaccuggacggggaggugaucaccuucgacaaccucaagacgcugcugucccuccgcgaggugcggaccaucaaggucuucaccaccguggacaacaucaaccugcacacgcagguggucgacaugagcaugaccuacggccagcaguucggccccaccuaccuggacggggccgacgugaccaagaucaagccccacaacucccacgagggcaagacguucuacgugcucccgaacgacgacacccugcgcgucgaggccuucgaguacuaccacaccaccgaccccagcuuccuggggcgguacauguccgcccucaaccacacgaagaaguggaaguacccccaggugaacggccugaccagcaucaagugggccgacaacaacugcuaccuggcgaccgcccuccugacccugcagcagaucgagcucaaguucaaccccccggcccugcaggacgccuacuaccgcgcgcgggccggggaggccgccaacuucugcgcccugauccucgcguacugcaacaagacggugggcgagcugggcgacguccgcgagaccauguccuaccuguuccagcacgccaaccucgacagcugcaagcgggugcugaacgucgugugcaagaccugcgggcagcagcagaccacccugaagggcguggaggccgucauguacauggggacgcucuccuacgagcaguucaagaagggcgugcagauccccugcaccugcgggaagcaggccaccaaguaccuggugcagcaggagagccccuucgucaugauguccgcccccccggcgcaguacgagcugaagcacggcaccuucacgugcgccagcgaguacaccggcaacuaccagugcgggcacuacaagcacaucaccuccaaggagacccucuacugcaucgacggcgcccugcugacgaagagcagcgaguacaaggggcccaucaccgacguguucuacaaggagaacuccuacaccaccacgaucaagcccgugaccuacaagcucgacggcgucgugugcaccgagaucgaccccaagcuggacaacuacuacaagaaggacaacagcuacuucaccgagcagccgaucgaccuggugcccaaccagcccuaccccaacgccuccuucgacaacuucaaguucgucugcgacaacaucaaguucgccgacgaccucaaccagcugacgggguacaagaagccggcgagccgcgagcugaaggugaccuucuuccccgaccucaacggcgacguggucgccaucgacuacaagcacuacacccccuccuucaagaagggcgccaagcugcugcacaagcccaucguguggcacgugaacaacgccaccaacaaggcgacguacaagccgaacaccuggugcauccggugccucuggagcaccaagcccgucgagaccuccaacagcuucgacgugcugaaguccgaggacgcccaggggauggacaaccuggccugcgaggaccucaagcccgugagcgaggaggucguggagaaccccacgauccagaaggacgugcuggagugcaacgucaagaccaccgagguggugggcgacaucauccugaagccggccaacaacucccucaagaucaccgaggaggucgggcacacggaccugauggccgcguacguggacaacagcucccugaccaucaagaagcccaacgagcucagccgcgugcugggccugaagacccucgccacccacgggcuggccgccgucaacuccgugcccugggacacgaucgccaacuacgcgaagccguuccugaacaagguggucagcaccaccaccaacaucgugacgcgcugccucaaccgggugugcaccaacuacaugcccuacuucuucacccugcugcuccagcugugcaccuucacccgcuccacgaacagccggaucaaggccuccaugcccaccaccaucgccaagaacaccgucaagagcgugggcaaguucugccuggaggccagcuucaacuaccucaagucccccaacuucagcaagcugaucaacaucaucaucugguuccugcuccuguccgugugccugggcagccucaucuacuccacggccgcgcuggggguccugaugagcaaccucggcaugccguccuacugcaccggguaccgcgagggcuaccugaacagcaccaacgugaccaucgccacguacugcaccggcuccauccccugcagcgugugccuguccgggcucgacagccuggacaccuaccccucccuggagaccauccagaucacgaucagcuccuucaagugggaccucaccgccuucggccuggucgccgagugguuccuggccuacauccucuucacccgguucuucuacgugcuggggcuggcggccaucaugcagcucuucuucagcuacuucgccgugcacuucaucuccaacagcuggcugauguggcugaucaucaaccugguccagauggcccccaucuccgcgauggugcgcauguacaucuucuucgccagcuucuacuacguguggaagagcuacguccacgugguggacggcugcaacuccagcaccugcaugaugugcuacaagcggaaccgcgccacgcgggucgagugcaccaccaucgugaacgggguccgccgguccuucuacguguacgccaacggcggcaagggguucugcaagcuccacaacuggaacugcgugaacugcgacaccuucugcgccggcagcacguucaucuccgacgaggucgcgcgcgaccugagccugcaguucaagcggccgaucaaccccaccgaccaguccagcuacaucguggacuccgugaccgucaagaacgggagcauccaccucuacuucgacaaggccggccagaagaccuacgagcgccacucccugagccacuucgugaaccuggacaaccuccgggccaacaacacgaaggggucccugcccaucaacgugaucgucuucgacggcaagagcaagugcgaggaguccagcgccaaguccgccagcguguacuacucccagcugaugugccagcccauccuccugcuggaccaggcgcucgugagcgacgucggcgacagcguggagguggccgucaagauguucgacgccuacgugaacaccuucuccagcaccuucaacgugccgauggagaagcugaagacccuggucgccacggccgaggcggagcucgccaagaacgugucccuggacaacgugcugagcaccuucaucuccgccgcccgccagggguucgucgacagcgacguggagaccaaggacguggucgagugccucaagcugucccaccagagcgacaucgaggugaccggcgacuccugcaacaacuacaugcugacguacaacaagguggagaacaugaccccccgggaccucggggcgugcaucgacugcagcgcccgccacaucaacgcccaggucgccaagucccacaacaucgcccugaucuggaacgugaaggacuucaugagccuguccgagcagcuccggaagcagauccgcagcgcggccaagaagaacaaccugcccuucaagcugaccugcgccaccacgcgccagguggucaacguggugaccaccaagaucgcccucaagggcgggugaggacuagucccuguucccagagcccacuuuuuuuucuuuuuuugaaauaaaauagccugucuuucagaucucaaaggcucuuuucagagccaccaaaaaaaaaaaaaaaaaaaaaaaaaaaaaaaaaaaaaaaaaaaaaaaaaaaaaaaaaaaaaaaaaaaaaaaaaaaaaaaaaaaaaaaaaaaaaaaaaaaaa

SEQ ID NO: 19690 - RNA, 6113 nt, Artificial Sequence
  SARS-CoV-2__MT827229.1__non-structural protein 3 (NSP3) mRNA gc
aggagagucccgcagucggcguccagcggcucugcuuguucgugugugugucguugcaggccuuauucaagcuuaccauggcccccaccaaggugaccuucggcgacgacacggucaucgaggugcagggguacaagagcgugaacaucaccuucgagcuggacgagcgcaucgacaagguccucaacgagaagugcuccgccuacaccguggagcugggcaccgaggugaacgaguucgcgugcgucguggccgacgccgugaucaagacgcugcagccggucagcgagcuccugaccccccuggggaucgaccucgacgagugguccauggccaccuacuaccuguucgacgagagcggcgaguucaagcuggccucccacauguacugcagcuucuacccccccgacgaggacgaggaggagggggacugcgaggaggaggaguucgagccguccacccaguacgaguacggcacggaggacgacuaccagggcaagccccucgaguucggggcgaccagcgccgcccugcagcccgaggaggagcaggaggaggacuggcuggacgacgacucccagcagaccgugggccagcaggacgggagcgaggacaaccagaccacgaccauccagaccaucguggagguccagccccagcucgagauggagcugaccccgguggugcagacgaucgaggucaacuccuucagcggcuaccugaagcucaccgacaacguguacaucaagaacgccgacaucguggaggaggcgaagaaggucaagcccaccgugguggucaacgccgccaacguguaccugaagcacgggggcggcguggccggggcccugaacaaggcgaccaacaacgccaugcaggucgaguccgacgacuacaucgccacgaacggcccccucaagguggggggcagcugcguccuguccggccacaaccuggccaagcacugccuccacgugguggggcccaacgucaacaagggcgaggacauccagcugcugaagagcgccuacgagaacuucaaccagcacgaggugcuccuggcgccgcugcucuccgccgggaucuucggcgccgaccccauccacagccugcgggugugcgucgacaccgugcgcaccaacguguaccuggccgucuucgacaagaaccucuacgacaagcugguguccagcuuccuggagaugaagagcgagaagcagguggagcagaagaucgccgagauccccaaggaggaggucaagcccuucaucaccgaguccaagccgagcguggagcagcggaagcaggacgacaagaagaucaaggcgugcguggaggaggucacgaccacccucgaggagaccaaguuccugacggagaaccugcuccuguacaucgacaucaacgggaaccugcaccccgacuccgccacccucgugagcgacaucgacaucaccuuccugaagaaggacgcccccuacaucgugggcgacgucgugcaggagggcgugcugaccgccgucgugauccccacgaagaaggccgggggcaccaccgagaugcucgcgaaggcccugcgcaaggugccgaccgacaacuacaucacgaccuaccccgggcagggccugaacggguacaccgucgaggaggccaagaccgugcucaagaagugcaaguccgccuucuacauccugcccagcaucaucuccaacgagaagcaggagauccugggcaccgugagcuggaaccuccgggagaugcuggcgcacgccgaggagacgcgcaagcugaugcccgucugcguggagaccaaggccaucguguccaccauccagcggaaguacaagggcaucaagauccaggagggggucguggacuacggcgcccgcuucuacuucuacaccagcaagacgaccguggccucccugaucaacacccucaacgaccugaacgagacccuggucacgaugccgcucggguacgugacccacggccugaaccuggaggaggcggcccgguacaugcgcagccucaaggugcccgccaccgucuccgugagcucccccgacgccgugaccgccuacaacggguaccugacgagcuccagcaagacccccgaggagcacuucaucgagaccaucucccuggcgggcagcuacaaggacuggagcuacuccggccagagcacccagcucgggaucgaguuccugaagcggggcgacaaguccgucuacuacacgagcaacccgaccaccuuccaccuggacggggaggugaucaccuucgacaaccucaagacgcugcugucccuccgcgaggugcggaccaucaaggucuucaccaccguggacaacaucaaccugcacacgcagguggucgacaugagcaugaccuacggccagcaguucggccccaccuaccuggacggggccgacgugaccaagaucaagccccacaacucccacgagggcaagacguucuacgugcucccgaacgacgacacccugcgcgucgaggccuucgaguacuaccacaccaccgaccccagcuuccuggggcgguacauguccgcccucaaccacacgaagaaguggaaguacccccaggugaacggccugaccagcaucaagugggccgacaacaacugcuaccuggcgaccgcccuccugacccugcagcagaucgagcucaaguucaaccccccggcccugcaggacgccuacuaccgcgcgcgggccggggaggccgccaacuucugcgcccugauccucgcguacugcaacaagacggugggcgagcugggcgacguccgcgagaccauguccuaccuguuccagcacgccaaccucgacagcugcaagcgggugcugaacgucgugugcaagaccugcgggcagcagcagaccacccugaagggcguggaggccgucauguacauggggacgcucuccuacgagcaguucaagaagggcgugcagauccccugcaccugcgggaagcaggccaccaaguaccuggugcagcaggagagccccuucgucaugauguccgcccccccggcgcaguacgagcugaagcacggcaccuucacgugcgccagcgaguacaccggcaacuaccagugcgggcacuacaagcacaucaccuccaaggagacccucuacugcaucgacggcgcccugcugacgaagagcagcgaguacaaggggcccaucaccgacguguucuacaaggagaacuccuacaccaccacgaucaagcccgugaccuacaagcucgacggcgucgugugcaccgagaucgaccccaagcuggacaacuacuacaagaaggacaacagcuacuucaccgagcagccgaucgaccuggugcccaaccagcccuaccccaacgccuccuucgacaacuucaaguucgucugcgacaacaucaaguucgccgacgaccucaaccagcugacgggguacaagaagccggcgagccgcgagcugaaggugaccuucuuccccgaccucaacggcgacguggucgccaucgacuacaagcacuacacccccuccuucaagaagggcgccaagcugcugcacaagcccaucguguggcacgugaacaacgccaccaacaaggcgacguacaagccgaacaccuggugcauccggugccucuggagcaccaagcccgucgagaccuccaacagcuucgacgugcugaaguccgaggacgcccaggggauggacaaccuggccugcgaggaccucaagcccgugagcgaggaggucguggagaaccccacgauccagaaggacgugcuggagugcaacgucaagaccaccgagguggugggcgacaucauccugaagccggccaacaacucccucaagaucaccgaggaggucgggcacacggaccugauggccgcguacguggacaacagcucccugaccaucaagaagcccaacgagcucagccgcgugcugggccugaagacccucgccacccacgggcuggccgccgucaacuccgugcccugggacacgaucgccaacuacgcgaagccguuccugaacaagguggucagcaucaccaccaacaucgugacccgcugccucaaccgggugugcacgaacuacaugcccuacuucuucacccugcugcuccagcugugcaccuucacccgcuccaccaacagccggaucaaggccuccaugcccacgaccaucgccaagaacaccgucaagagcgugggcaaguucugccuggaggccagcuucaacuaccucaagucccccaacuucagcaagcugaucaacaucaucaucugguuccugcuccuguccgugugccugggcagccucaucuacuccaccgccgcgcuggggguccugaugagcaaccucggcaugccguccuacugcacgggguaccgcgagggcuaccugaacagcaccaacgugaccaucgccaccuacugcacgggcuccauccccugcagcgugugccuguccgggcucgacagccuggacaccuaccccucccuggagaccauccagaucaccaucagcuccuucaagugggaccucacggccuucggccuggucgccgagugguuccuggccuacauccucuucacccgguucuucuacgugcuggggcuggcggccaucaugcagcucuucuucagcuacuucgccgugcacuucaucuccaacagcuggcugauguggcugaucaucaaccugguccagauggcccccaucuccgcgauggugcgcauguacaucuucuucgccagcuucuacuacguguggaagagcuacguccacgugguggacggcugcaacuccagcaccugcaugaugugcuacaagcggaaccgcgccacccgggucgagugcacgaccaucgugaacgggguccgccgguccuucuacguguacgccaacggcggcaagggguucugcaagcuccacaacuggaacugcgugaacugcgacaccuucugcgccggcagcaccuucaucuccgacgaggucgcgcgcgaccugagccugcaguucaagcggccgaucaaccccacggaccaguccagcuacaucguggacuccgugaccgucaagaacgggagcauccaccucuacuucgacaaggccggccagaagaccuacgagcgccacucccugagccacuucgugaaccuggacaaccuccgggccaacaacaccaaggggucccugcccaucaacgugaucgucuucgacggcaagagcaagugcgaggaguccagcgccaaguccgccagcguguacuacucccagcugaugugccagcccauccuccugcuggaccaggcgcucgugagcgacgucggcgacagcgccgagguggccgugaagauguucgacgccuacgucaacacguucuccagcaccuucaacgugccgauggagaagcugaagacccugguggccaccgcggaggccgagcucgccaagaacgucucccuggacaacgugcugagcacguucaucuccgccgcgcgccagggguucguggacagcgacgucgagaccaaggacgugguggagugccucaagcugucccaccagagcgacaucgaggucaccggcgacuccugcaacaacuacaugcugaccuacaacaagguggagaacaugacgccccgggaccucggggccugcaucgacugcagcgcccgccacaucaacgcccagguggccaagucccacaacaucgcgcugaucuggaacgucaaggacuucaugagccuguccgagcagcuccggaagcagauccgcagcgccgccaagaagaacaaccugcccuucaagcugaccugcgccaccacccgccagguggugaacgucgugacgaccaagaucgcccucaagggcgggugaggacuagucccuguucccagagcccacuuuuuuuucuuuuuuugaaauaaaauagccugucuuucagaucucaaaggcucuuuucagagccaccaaaaaaaaaaaaaaaaaaaaaaaaaaaaaaaaaaaaaaaaaaaaaaaaaaaaaaaaaaaaaaaaaaaaaaaaaaaaaaaaaaaaaaaaaaaaaaaaaaaaa

SEQ ID NO: 19691 - RNA, 6113 nt, Artificial Sequence
  SARS-CoV-2__MT827234.1__non-structural protein 3 (NSP3) mRNA gc
aggagagucccgcagucggcguccagcggcucugcuuguucgugugugugucguugcaggccuuauucaagcuuaccauggcccccaccaaggugaccuucggcgacgacacggucaucgaggugcagggguacaagagcgugaacaucaccuucgagcuggacgagcgcaucgacaagguccucaacgagaagugcuccgccuacaccguggagcugggcaccgaggugaacgaguucgcgugcgucguggccgacgccgugaucaagacgcugcagccggucagcgagcuccugaccccccuggggaucgaccucgacgagugguccauggccaccuacuaccuguucgacgagagcggcgaguucaagcuggccucccacauguacugcagcuucuacccccccgacgaggacgaggaggagggggacugcgaggaggaggaguucgagccguccacccaguacgaguacggcacggaggacgacuaccagggcaagccccucgaguucggggcgaccagcgccgcccugcagcccgaggaggagcaggaggaggacuggcuggacgacgacucccagcagaccgugggccagcaggacgggagcgaggacaaccagaccacgaccauccagaccaucguggagguccagccccagcucgagauggagcugaccccgguggugcagacgaucgaggucaacuccuucagcggcuaccugaagcucaccgacaacguguacaucaagaacgccgacaucguggaggaggcgaagaaggucaagcccaccgugguggucaacgccgccaacguguaccugaagcacgggggcggcguggccggggcccugaacaaggcgaccaacaacgccaugcaggucgaguccgacgacuacaucgccacgaacggcccccucaagguggggggcagcugcguccuguccggccacaaccuggccaagcacugccuccacgugguggggcccaacgucaacaagggcgaggacauccagcugcugaagagcgccuacgagaacuucaaccagcacgaggugcuccuggcgccgcugcucuccgccgggaucuucggcgccgaccccaucuacagccugcgggugugcgucgacaccgugcgcaccaacguguaccuggccgucuucgacaagaaccucuacgacaagcugguguccagcuuccuggagaugaagagcgagaagcagguggagcagaagaucgccgagauccccaaggaggaggucaagcccuucaucaccgaguccaagccgagcguggagcagcggaagcaggacgacaagaagaucaaggcgugcguggaggaggucacgaccacccucgaggagaccaaguuccugacggagaaccugcuccuguacaucgacaucaacgggaaccugcaccccgacuccgccacccucgugagcgacaucgacaucaccuuccugaagaaggacgcccccuacaucgugggcgacgucgugcaggagggcgugcugaccgccgucgugauccccacgaagaaggccgggggcaccaccgagaugcucgcgaaggcccugcgcaaggugccgaccgacaacuacaucacgaccuaccccgggcagggccugaacggguacaccgucgaggaggccaagaccgugcucaagaagugcaaguccgccuucuacauccugcccagcaucaucuccaacgagaagcaggagauccugggcaccgugagcuggaaccuccgggagaugcuggcgcacgccgaggagacgcgcaagcugaugcccgucugcguggagaccaaggccaucguguccaccauccagcggaaguacaagggcaucaagauccaggagggggucguggacuacggcgcccgcuucuacuucuacaccagcaagacgaccguggccucccugaucaacacccucaacgaccugaacgagacccuggucacgaugccgcucggguacgugacccacggccugaaccuggaggaggcggcccgguacaugcgcagccucaaggugcccgccaccgucuccgugagcucccccgacgccgugaccgccuacaacggguaccugacgagcuccagcaagacccccgaggagcacuucaucgagaccaucucccuggcgggcagcuacaaggacuggagcuacuccggccagagcacccagcucgggaucgaguuccugaagcggggcgacaaguccgucuacuacacgagcaacccgaccaccuuccaccuggacggggaggugaucaccuucgacaaccucaagacgcugcugucccuccgcgaggugcggaccaucaaggucuucaccaccguggacaacaucaaccugcacacgcagguggucgacaugagcaugaccuacggccagcaguucggccccaccuaccuggacggggccgacgugaccaagaucaagccccacaacucccacgagggcaagacguucuacgugcucccgaacgacgacacccugcgcgucgaggccuucgaguacuaccacaccaccgaccccagcuuccuggggcgguacauguccgcccucaaccacacgaagaaguggaaguacccccaggugaacggccugaccagcaucaagugggccgacaacaacugcuaccuggcgaccgcccuccugacccugcagcagaucgagcucaaguucaaccccccggcccugcaggacgccuacuaccgcgcgcgggccggggaggccgccaacuucugcgcccugauccucgcguacugcaacaagacggugggcgagcugggcgacguccgcgagaccauguccuaccuguuccagcacgccaaccucgacagcugcaagcgggugcugaacgucgugugcaagaccugcgggcagcagcagaccacccugaagggcguggaggccgucauguacauggggacgcucuccuacgagcaguucaagaagggcgugcagauccccugcaccugcgggaagcaggccaccaaguaccuggugcagcaggagagccccuucgucaugauguccgcccccccggcgcaguacgagcugaagcacggcaccuucacgugcgccagcgaguacaccggcaacuaccagugcgggcacuacaagcacaucaccuccaaggagacccucuacugcaucgacggcgcccugcugacgaagagcagcgaguacaaggggcccaucaccgacguguucuacaaggagaacuccuacaccaccacgaucaagcccgugaccuacaagcucgacggcgucgugugcaccgagaucgaccccaagcuggacaacuacuacaagaaggacaacagcuacuucaccgagcagccgaucgaccuggugcccaaccagcccuaccccaacgccuccuucgacaacuucaaguucgucugcgacaacaucaaguucgccgacgaccucaaccagcugacgggguacaagaagccggcgagccgcgagcugaaggugaccuucuuccccgaccucaacggcgacguggucgccaucgacuacaagcacuacacccccuccuucaagaagggcgccaagcugcugcacaagcccaucguguggcacgugaacaacgccaccaacaaggcgacguacaagccgaacaccuggugcauccggugccucuggagcaccaagcccgucgagaccuccaacagcuucgacgugcugaaguccgaggacgcccaggggauggacaaccuggccugcgaggaccucaagcccgugagcgaggaggucguggagaaccccacgauccagaaggacgugcuggagugcaacgucaagaccaccgagguggugggcgacaucauccugaagccggccaacaacucccucaagaucaccgaggaggucgggcacacggaccugauggccgcguacguggacaacagcucccugaccaucaagaagcccaacgagcucagccgcgugcugggccugaagacccucgccacccacgggcuggccgccgucaacuccgugcccugggacacgaucgccaacuacgcgaagccguuccugaacaagguggucagcaccaccaccaacaucgugacgcgcugccucaaccgggugugcaccaacuacaugcccuacuucuucacccugcugcuccagcugugcaccuucacccgcuccacgaacagccggaucaaggccuccaugcccaccaccaucgccaagaacaccgucaagagcgugggcaaguucugccuggaggccagcuucaacuaccucaagucccccaacuucagcaagcugaucaacaucaucaucugguuccugcuccuguccgugugccugggcagccucaucuacuccacggccgcgcuggggguccugaugagcaaccucggcaugccguccuacugcaccggguaccgcgagggcuaccugaacagcaccaacgugaccaucgccacguacugcaccggcuccauccccugcagcgugugccuguccgggcucgacagccuggacaccuaccccucccuggagaccauccagaucacgaucagcuccuucaagugggaccucaccgccuucggccuggucgccgagugguuccuggccuacauccucuucacccgguucuucuacgugcuggggcuggcggccaucaugcagcucuucuucagcuacuucgccgugcacuucaucuccaacagcuggcugauguggcugaucaucaaccugguccagauggcccccaucuccgcgauggugcgcauguacaucuucuucgccagcuucuacuacguguggaagagcuacguccacgugguggacggcugcaacuccagcaccugcaugaugugcuacaagcggaaccgcgccacgcgggucgagugcaccaccaucgugaacgggguccgccgguccuucuacguguacgccaacggcggcaagggguucugcaagcuccacaacuggaacugcgugaacugcgacaccuucugcgccggcagcacguucaucuccgacgaggucgcgcgcgaccugagccugcaguucaagcggccgaucaaccccaccgaccaguccagcuacaucguggacuccgugaccgucaagaacgggagcauccaccucuacuucgacaaggccggccagaagaccuacgagcgccacucccugagccacuucgugaaccuggacaaccuccgggccaacaacacgaaggggucccugcccaucaacgugaucgucuucgacggcaagagcaagugcgaggaguccagcgccaaguccgccagcguguacuacucccagcugaugugccagcccauccuccugcuggaccaggcgcucgugagcgacgucggcgacagcgccgagguggccgugaagauguucgacgccuacgucaacaccuucuccagcaccuucaacgugccgauggagaagcugaagacccugguggccacggcggaggccgagcucgccaagaacgucucccuggacaacgugcugagcaccuucaucuccgccgcgcgccagggguucguggacagcgacgucgagaccaaggacgugguggagugccucaagcugucccaccagagcgacaucgaggucaccggcgacuccugcaacaacuacaugcugacguacaacaagguggagaacaugaccccccgggaccucggggccugcaucgacugcagcgcccgccacaucaacgcccagguggccaagucccacaacaucgcgcugaucuggaacgucaaggacuucaugagccuguccgagcagcuccggaagcagauccgcagcgccgccaagaagaacaaccugcccuucaagcugaccugcgccaccacgcgccagguggugaacgucgugaccaccaagaucgcccucaagggcgggugaggacuagucccuguucccagagcccacuuuuuuuucuuuuuuugaaauaaaauagccugucuuucagaucucaaaggcucuuuucagagccaccaaaaaaaaaaaaaaaaaaaaaaaaaaaaaaaaaaaaaaaaaaaaaaaaaaaaaaaaaaaaaaaaaaaaaaaaaaaaaaaaaaaaaaaaaaaaaaaaaaaaa

SEQ ID NO: 19692 - RNA, 6113 nt, Artificial Sequence
  SARS-CoV-2__MT827253.1__non-structural protein 3 (NSP3) mRNA gc
aggagagucccgcagucggcguccagcggcucugcuuguucgugugugugucguugcaggccuuauucaagcuuaccauggcccccaccaaggugaccuucggcgacgacacggucaucgaggugcagggguacaagagcgugaacaucaccuucgagcuggacgagcgcaucgacaagguccucaacgagaagugcuccgccuacaccguggagcugggcaccgaggugaacgaguucgcgugcgucguggccgacgccgugaucaagacgcugcagccggucagcgagcuccugaccccccuggggaucgaccucgacgagugguccauggccaccuacuaccuguucgacgagagcggcgaguucaagcuggccucccacauguacugcagcuucuacccccccgacgaggacgaggaggagggggacugcgaggaggaggaguucgagccguccacccaguacgaguacggcacggaggacgacuaccagggcaagccccucgaguucggggcgaccagcgccgcccugcagcccgaggaggagcaggaggaggacuggcuggacgacgacucccagcagaccgugggccagcaggacgggagcgaggacaaccagaccacgaccauccagaccaucguggagguccagccccagcucgagauggagcugaccccgguggugcagacgaucgaggucaacuccuucagcggcuaccugaagcucaccgacaacguguacaucaagaacgccgacaucguggaggaggcgaagaaggucaagcccaccgugguggucaacgccgccaacguguaccugaagcacgggggcggcguggccggggcccugaacaaggcgaccaacaacgccaugcaggucgaguccgacgacuacaucgccacgaacggcccccucaagguggggggcagcugcguccuguccggccacaaccuggccaagcacugccuccacgugguggggcccaacgucaacaagggcgaggacauccagcugcugaagagcgccuacgagaacuucaaccagcacgaggugcuccuggcgccgcugcucuccgccgggaucuucggcgccgaccccauccacagccugcgggugugcgucgacaccgugcgcaccaacguguaccuggccgucuucgacaagaaccucuacgacaagcugguguccagcuuccuggagaugaagagcgagaagcagguggagcagaagaucgccgagauccccaaggaggaggucaagcccuucaucaccgaguccaagccgagcguggagcagcggaagcaggacgacaagaagaucaaggcgugcguggaggaggucacgaccacccucgaggagaccaaguuccugacggagaaccugcuccuguacaucgacaucaacgggaaccugcaccccgacuccgccacccucgugagcgacaucgacaucaccuuccugaagaaggacgcccccuacaucgugggcgacgucgugcaggagggcgugcugaccgccgucgugauccccacgaagaaggccgggggcaccaccgagaugcucgcgaaggcccugcgcaaggugccgaccgacaacuacaucacgaccuaccccgggcagggccugaacggguacaccgucgaggaggccaagaccgugcucaagaagugcaaguccgccuucuacauccugcccagcaucaucuccaacgagaagcaggagauccugggcaccgugagcuggaaccuccgggagaugcuggcgcacgccgaggagacgcgcaagcugaugcccgucugcguggagaccaaggccaucguguccaccauccagcggaaguacaagggcaucaagauccaggagggggucguggacuacggcgcccgcuucuacuucuacaccagcaagacgaccguggccucccugaucaacacccucaacgaccugaacgagacccuggucacgaugccgcucggguacgugacccacggccugaaccuggaggaggcggcccgguacaugcgcagccucaaggugcccgccaccgucuccgugagcucccccgacgccgugaccgccuacaacggguaccugacgagcuccagcaagacccccgaggagcacuucaucgagaccaucucccuggcgggcagcuacaaggacuggagcuacuccggccagagcacccagcucgggaucgaguuccugaagcggggcgacaaguccgucuacuacacgagcaacccgaccaccuuccaccuggacggggaggugaucaccuucgacaaccucaagacgcugcugucccuccgcgaggugcggaccaucaaggucuucaccaccguggacaacaucaaccugcacacgcagguggucgacaugagcaugaccuacggccagcaguucggccccaccuaccuggacggggccgacgugaccaagaucaagccccacaacucccacgagggcaagacguucuacgugcucccgaacgacgacacccugcgcgucgaggccuucgaguacuaccacaccaccgaccccagcuuccuggggcgguacauguccgcccucaaccacacgaagaaguggaaguacccccaggugaacggccugaccagcaucaagugggccgacaacaacugcuaccuggcgaccgcccuccugacccugcagcagaucgagcucaaguucaaccccccggcccugcaggacgccuacuaccgcgcgcgggccggggaggccgccaacuucugcgcccugauccucgcguacugcaacaagacggugggcgagcugggcgacguccgcgagaccauguccuaccuguuccagcacgccaaccucgacagcugcaagcgggugcugaacgucgugugcaagaccugcgggcagcagcagaccacccugaagggcguggaggccgucauguacauggggacgcucuccuacgagcaguucaagaagggcgugcagauccccugcaccugcgggaagcaggccaccaaguaccuggugcagcaggagagccccuucgucaugauguccgcccccccggcgcaguacgagcugaagcacggcaccuucacgugcgccagcgaguacaccggcaacuaccagugcgggcacuacaagcacaucaccuccaaggagacccucuacugcaucgacggcgcccugcugacgaagagcagcgaguacaaggggcccaucaccgacguguucuacaaggagaacuccuacaccaccacgaucaagcccgugaccuacaagcucgacggcgucgugugcaccgagaucgaccccaagcuggacaacuacuacaagaaggacaacagcuacuucaccgagcagccgaucgaccuggugcccaaccagcccuaccccaacgccuccuucgacaacuucaaguucgucugcgacaacaucaaguucgccgacgaccucaaccagcugacgggguacaagaagccggcgagccgcgagcugaaggugaccuucuuccccgaccucaacggcgacguggucgccaucgacuacaagcacuacacccccuccuucaagaagggcgccaagcugcugcacaagcccaucguguggcacgugaacaacgccaccaacaaggcgacguacaagccgaacaccuggugcauccggugccucuggagcaccaagcccgucgagaccuccaacagcuucgacgugcugaaguccgaggacgcccaggggauggacaaccuggccugcgaggaccucaagcccgugagcgaggaggucguggagaaccccacgauccagaaggacgugcuggagugcaacgucaagaccaccgagguggugggcgacaucauccugaagccggccaacaacucccucaagaucaccgaggaggucgggcacacggaccugauggccgcguacguggacaacagcucccugaccaucaagaagcccaacgagcucagccgcgugcugggccugaagacccucgccacccacgggcuggccgccgucaacuccgugcccugggacacgaucgccaacuacgcgaagccguuccugaacaagguggucagcaccaccaccaacaucgugacgcgcugccucaaccgggugugcaccaacuacaugcccuacuucuucacccugcugcuccagcugugcaccuucacccgcuccacgaacagccggaucaaggccuccaugcccaccaccaucgccaacaacaccgucaagagcgugggcaaguucugccuggaggccagcuucaacuaccucaagucccccaacuucagcaagcugaucaacaucaucaucugguuccugcuccuguccgugugccugggcagccucaucuacuccacggccgcgcuggggguccugaugagcaaccucggcaugccguccuacugcaccggguaccgcgagggcuaccugaacagcaccaacgugaccaucgccacguacugcaccggcuccauccccugcagcgugugccuguccgggcucgacagccuggacaccuaccccucccuggagaccauccagaucacgaucagcuccuucaagugggaccucaccgccuucggccuggucgccgagugguuccuggccuacauccucuucacccgguucuucuacgugcuggggcuggcggccaucaugcagcucuucuucagcuacuucgccgugcacuucaucuccaacagcuggcugauguggcugaucaucaaccugguccagauggcccccaucuccgcgauggugcgcauguacaucuucuucgccagcuucuacuacguguggaagagcuacguccacgugguggacggcugcaacuccagcaccugcaugaugugcuacaagcggaaccgcgccacgcgggucgagugcaccaccaucgugaacgggguccgccgguccuucuacguguacgccaacggcggcaagggguucugcaagcuccacaacuggaacugcgugaacugcgacaccuucugcgccggcagcacguucaucuccgacgaggucgcgcgcgaccugagccugcaguucaagcggccgaucaaccccaccgaccaguccagcuacaucguggacuccgugaccgucaagaacgggagcauccaccucuacuucgacaaggccggccagaagaccuacgagcgccacucccugagccacuucgugaaccuggacaaccuccgggccaacaacacgaaggggucccugcccaucaacgugaucgucuucgacggcaagagcaagugcgaggaguccagcgccaaguccgccagcguguacuacucccagcugaugugccagcccauccuccugcuggaccaggcgcucgugagcgacgucggcgacagcgccgagguggccgugaagauguucgacgccuacgucaacaccuucuccagcaccuucaacgugccgauggagaagcugaagacccugguggccacggcggaggccgagcucgccaagaacgucucccuggacaacgugcugagcaccuucaucuccgccgcgcgccagggguucguggacagcgacgucgagaccaaggacgugguggagugccucaagcugucccaccagagcgacaucgaggucaccggcgacuccugcaacaacuacaugcugacguacaacaagguggagaacaugaccccccgggaccucggggccugcaucgacugcagcgcccgccacaucaacgcccagguggccaagucccacaacaucgcgcugaucuggaacgucaaggacuucaugagccuguccgagcagcuccggaagcagauccgcagcgccgccaagaagaacaaccugcccuucaagcugaccugcgccaccacgcgccagguggugaacgucgugaccaccaagaucgcccucaagggcgggugaggacuagucccuguucccagagcccacuuuuuuuucuuuuuuugaaauaaaauagccugucuuucagaucucaaaggcucuuuucagagccaccaaaaaaaaaaaaaaaaaaaaaaaaaaaaaaaaaaaaaaaaaaaaaaaaaaaaaaaaaaaaaaaaaaaaaaaaaaaaaaaaaaaaaaaaaaaaaaaaaaaaa

SEQ ID NO: 19693 - RNA, 6113 nt, Artificial Sequence
  SARS-CoV-2__MT827840.1__non-structural protein 3 (NSP3) mRNA gc
aggagagucccgcagucggcguccagcggcucugcuuguucgugugugugucguugcaggccuuauucaagcuuaccauggcccccaccaaggugaccuucggcgacgacacggucaucgaggugcagggguacaagagcgugaacaucaccuucgagcuggacgagcgcaucgacaagguccucaacgagaagugcuccgccuacaccguggagcugggcaccgaggugaacgaguucgcgugcgucguggccgacgccgugaucaagacgcugcagccggucagcgagcuccugaccccccuggggaucgaccucgacgagugguccauggccaccuacuaccuguucgacgagagcggcgaguucaagcuggccucccacauguacugcagcuucuacccccccgacgaggacgaggaggagggggacugcgaggaggaggaguucgagccguccacccaguacgaguacggcacggaggacgacuaccagggcaagccccucgaguucggggcgaccagcgccgcccugcagcccgaggaggagcaggaggaggacuggcuggacgacgacucccagcagaccgugggccagcaggacgggagcgaggacaaccagaccacgaccauccagaccaucguggagguccagccccagcucgagauggagcugaccccgguggugcagacgaucgaggucaacuccuucagcggcuaccugaagcucaccgacaacguguacaucaagaacgccgacaucguggaggaggcgaagaaggucaagcccaccgugguggucaacgccgccaacguguaccugaagcacgggggcggcguggccggggcccugaacaaggcgaccaacaacgccaugcaggucgaguccgacgacuacaucgccacgaacggcccccucaagguggggggcagcugcguccuguccggccacaaccuggccaagcacugccuccacgugguggggcccaacgucaacaagggcgaggacauccagcugcugaagagcgccuacgagaacuucaaccagcacgaggugcuccuggcgccgcugcucuccgccgggaucuucggcgccgaccccauccacagccugcgggugugcgucgacaccgugcgcaccaacguguaccuggccgucuucgacaagaaccucuacgacaagcugguguccagcuuccuggagaugaagagcgagaagcagguggagcagaagaucgccgagauccccaaggaggaggucaagcccuucaucaccgaguccaagccgagcguggagcagcggaagcaggacgacaagaagaucaaggcgugcguggaggaggucacgaccacccucgaggagaccaaguuccugacggagaaccugcuccuguacaucgacaucaacgggaaccugcaccccgacuccgccacccucgugagcgacaucgacaucaccuuccugaagaaggacgcccccuacaucgugggcgacgucgugcaggagggcgugcugaccgccgucgugauccccacgaagaaggccgggggcaccaccgagaugcucgcgaaggcccugcgcaaggugccgaccgacaacuacaucacgaccuaccccgggcagggccugaacggguacaccgucgaggaggccaagaccgugcucaagaagugcaaguccgccuucuacauccugcccagcaucaucuccaacgagaagcaggagauccugggcaccgugagcuggaaccuccgggagaugcuggcgcacgccgaggagacgcgcaagcugaugcccgucugcguggagaccaaggccaucguguccaccauccagcggaaguacaagggcaucaagauccaggagggggucguggacuacggcgcccgcuucuacuucuacaccagcaagacgaccguggccucccugaucaacacccucaacgaccugaacgagacccuggucacgaugccgcucggguacgugacccacggccugaaccuggaggaggcggcccgguacaugcgcagccucaaggugcccgccaccgucuccgugagcucccccgacgccgugaccgccuacaacggguaccugacgagcuccagcaagacccccgaggagcacuucaucgagaccaucucccuggcgggcagcuacaaggacuggagcuacuccggccagagcacccagcucgggaucgaguuccugaagcggggcgacaaguccgucuacuacacgaacccgaccaccuuccaccuggacggggaggugaucaccuucgacaaccucaagacgcugcugagccuccgcgaggugcggaccaucaaggucuucaccaccguggacaacaucaaccugcacacgcagguggucgacauguccaugaccuacggccagcaguucggccccaccuaccuggacggggccgacgugaccaagaucaagccccacaacagccacgagggcaagacguucuacgugcucccgaacgacgacacccugcgcgucgaggccuucgaguacuaccacaccaccgaccccuccuuccuggggcgguacaugagcgcccucaaccacacgaagaaguggaaguacccccaggugaacggccugaccuccaucaagugggccgacaacaacugcuaccuggcgaccgcccuccugacccugcagcagaucgagcucaaguucaaccccccggcccugcaggacgccuacuaccgcgcgcgggccggggaggccgccaacuucugcgcccugauccucgcguacugcaacaagacggugggcgagcugggcgacguccgcgagaccaugagcuaccuguuccagcacgccaaccucgacuccugcaagcgggugcugaacgucgugugcaagaccugcgggcagcagcagaccacccugaagggcguggaggccgucauguacauggggacgcucagcuacgagcaguucaagaagggcgugcagauccccugcaccugcgggaagcaggccaccaaguaccuggugcagcaggagucccccuucgucaugaugagcgcccccccggcgcaguacgagcugaagcacggcaccuucacgugcgccuccgaguacaccggcaacuaccagugcgggcacuacaagcacaucaccagcaaggagacccucuacugcaucgacggcgcccugcugacgaaguccagcgaguacaaggggcccaucaccgacguguucuacaaggagaacagcuacaccaccacgaucaagcccgugaccuacaagcucgacggcgucgugugcaccgagaucgaccccaagcuggacaacuacuacaagaaggacaacuccuacuucaccgagcagccgaucgaccuggugcccaaccagcccuaccccaacgccagcuucgacaacuucaaguucgucugcgacaacaucaaguucgccgacgaccucaaccagcugacgggguacaagaagccggcgucccgcgagcugaaggugaccuucuuccccgaccucaacggcgacguggucgccaucgacuacaagcacuacacccccagcuucaagaagggcgccaagcugcugcacaagcccaucguguggcacgugaacaacgccaccaacaaggcgacguacaagccgaacaccuggugcauccggugccucugguccaccaagcccgucgagaccagcaacuccuucgacgugcugaagagcgaggacgcccaggggauggacaaccuggccugcgaggaccucaagcccguguccgaggaggucguggagaaccccacgauccagaaggacgugcuggagugcaacgucaagaccaccgagguggugggcgacaucauccugaagccggccaacaacagccucaagaucaccgaggaggucgggcacacggaccugauggccgcguacguggacaacuccagccugaccaucaagaagcccaacgagcucucccgcgugcugggccugaagacccucgccacccacgggcuggccgccgucaacagcgugcccugggacacgaucgccaacuacgcgaagccguuccugaacaagguggucuccaccaccaccaacaucgugacgcgcugccucaaccgggugugcaccaacuacaugcccuacuucuucacccugcugcuccagcugugcaccuucacccgcagcacgaacucccggaucaaggccagcaugcccaccaccaucgccaagaacaccgucaaguccgugggcaaguucugccuggaggccagcuucaacuaccucaagagccccaacuucuccaagcugaucaacaucaucaucugguuccugcuccugagcgugugccugggcucccucaucuacagcacggccgcgcuggggguccugauguccaaccucggcaugccgagcuacugcaccggguaccgcgagggcuaccugaacuccaccaacgugaccaucgccacguacugcaccggcagcauccccugcuccgugugccugagcgggcucgacucccuggacaccuaccccagccuggagaccauccagaucacgaucuccagcuucaagugggaccucaccgccuucggccuggucgccgagugguuccuggccuacauccucuucacccgguucuucuacgugcuggggcuggcggccaucaugcagcucuucuucuccuacuucgccgugcacuucaucagcaacuccuggcugauguggcugaucaucaaccugguccagauggcccccaucagcgcgauggugcgcauguacaucuucuucgccuccuucuacuacguguggaagagcuacguccacgugguggacggcugcaacagcuccaccugcaugaugugcuacaagcggaaccgcgccacgcgggucgagugcaccaccaucgugaacgggguccgccggagcuucuacguguacgccaacggcggcaagggguucugcaagcuccacaacuggaacugcgugaacugcgacaccuucugcgccggcuccacguucaucagcgacgaggucgcgcgcgaccugucccugcaguucaagcggccgaucaaccccaccgaccagagcuccuacaucguggacagcgugaccgucaagaacggguccauccaccucuacuucgacaaggccggccagaagaccuacgagcgccacagccugucccacuucgugaaccuggacaaccuccgggccaacaacacgaaggggagccugcccaucaacgugaucgucuucgacggcaaguccaagugcgaggagagcuccgccaagagcgccuccguguacuacagccagcugaugugccagcccauccuccugcuggaccaggcgcucguguccgacgucggcgacagcgccgagguggccgugaagauguucgacgccuacgucaacaccuucagcuccaccuucaacgugccgauggagaagcugaagacccugguggccacggcggaggccgagcucgccaagaacgucagccuggacaacgugcuguccaccuucaucagcgccgcgcgccagggguucguggacuccgacgucgagaccaaggacgugguggagugccucaagcugagccaccaguccgacaucgaggucaccggcgacagcugcaacaacuacaugcugacguacaacaagguggagaacaugaccccccgggaccucggggccugcaucgacugcuccgcccgccacaucaacgcccagguggccaagagccacaacaucgcgcugaucuggaacgucaaggacuucaugucccugagcgagcagcuccggaagcagauccgcuccgccgccaagaagaacaaccugcccuucaagcugaccugcgccaccacgcgccagguggugaacgucgugaccaccaagaucgcccucaagggcgggaagugaggacuagucccuguucccagagcccacuuuuuuuucuuuuuuugaaauaaaauagccugucuuucagaucucaaaggcucuuuucagagccaccaaaaaaaaaaaaaaaaaaaaaaaaaaaaaaaaaaaaaaaaaaaaaaaaaaaaaaaaaaaaaaaaaaaaaaaaaaaaaaaaaaaaaaaaaaaaaaaaaaaaa

SEQ ID NO: 19694 - RNA, 6113 nt, Artificial Sequence
  SARS-CoV-2__MT825091.1__non-structural protein 3 (NSP3) mRNA gc
aggagagucccgcagucggcguccagcggcucugcuuguucgugugugugucguugcaggccuuauucaagcuuaccauggcccccaccaaggugaccuucggcgacgacacggucaucgaggugcagggguacaagagcgugaacaucaccuucgagcuggacgagcgcaucgacaagguccucaacgagaagugcuccgccuacaccguggagcugggcaccgaggugaacgaguucgcgugcgucguggccgacgccgugaucaagacgcugcagccggucagcgagcuccugaccccccuggggaucgaccucgacgagugguccauggccaccuacuaccuguucgacgagagcggcgaguucaagcuggccucccacauguacugcagcuucuacccccccgacgaggacgaggaggagggggacugcgaggaggaggaguucgagccguccacccaguacgaguacggcacggaggacgacuaccagggccagccccucgaguucggggcgaccagcgccgcccugcagcccgaggaggagcaggaggaggacuggcuggacgacgacucccagcagaccgugggccagcaggacgggagcgaggacaaccagaccacgaccauccagaccaucguggagguccagccccagcucgagauggagcugaccccgguggugcagacgaucgaggucaacuccuucagcggcuaccugaagcucaccgacaacguguacaucaagaacgccgacaucguggaggaggcgaagaaggucaagcccaccgugguggucaacgccgccaacguguaccugaagcacgggggcggcguggccggggcccugaacaaggcgaccaacaacgccaugcaggucgaguccgacgacuacaucgccacgaacggcccccucaagguggggggcagcugcguccuguccggccacaaccuggccaagcaccggcuccacgugguggggcccaacgucaacaagggcgaggacauccagcugcugaagagcgccuacgagaacuucaaccagcacgaggugcuccuggcgccgcugcucuccgccgggaucuucggcgccgaccccauccacagccugcgcgugugcgucgacaccgugcggaccaacguguaccuggccgucuucgacaagaaccucuacgacaagcugguguccagcuuccuggagaugaagagcgugaagcaggucgagcagaagaucgccgagauccccaaggaggaggugaagcccuucaucaccgaguccaagccgagcguggagcagcgcaagcaggacgacaagaagaucaaggcgugcgucgaggaggugacgaccacccucgaggagaccaaguuccugacggagaaccugcuccuguacaucgacaucaacgggaaccugcaccccgacuccgccacccucgugagcgacaucgacaucaccuuccugaagaaggacgcccccuacaccgucggcgacguggugcaggagggcguccugacggccguggugauccccaccaagaaggccgggggcaccaccgagaugcucgcgaaggcccugcggaaggucccgacggacaacuacaucaccaccuaccccgggcagggccugaacggguacaccguggaggaggccaagaccgugcucaagaagugcaaguccgccuucuacauccugcccagcaucaucuccaacgagaagcaggagauccugggcacggucagcuggaaccuccccgagaugcuggcgcacgccgaggagacccgcaagcugaugccggugugcguggagaccaaggccaucgucuccaccauccagcggaaguacaagggcaucaagauccaggagggggugguggacuacggcgcccgcuucuacuucuacacgagcaagaccaccgucgccucccugaucaacacccucaacgaccugaacgagacgcuggugaccaugccccucggguacgugacccacggccugaaccuggaggaggcggcccgguacaugcgcagccucaagguccccgccaccguguccgugagcucccccgacgccgucacggccuacaacggguaccugaccuacagcuccaagaccccggaggagcacuucaucgagaccaucagccuggcgggcuccuacaaggacuggagcuacagcggccaguccacgcagcucgggaucgaguuccugaagcggggcgacaagagcguguacuacaccaacaaccccaccaccuuccaccuggacggggaggugaucacguucgacaaccucaagacccugcugucccuccgcgagguccggaccaucaagguguucaccacgguggacaacaucaaccugcacacccaggucguggacaugagcaugaccuacggccagcaguucggccccaccuacuccgacggggccgacgugacgaagaucaagccgcacaacagccacgagggcaagaccuucuacguccugcccaacgacgacacccuccgcguggaggccuucgaguacuaccacaccacggaccccuccuuccuggggcgguacaugagcgcccugaaccacaccaagaaguggaaguacccccaggugaacggccucaccuccaucaagugggccgacaacaacugcuaccuggcgaccgcccugcucacgcugcagcagaucgagcugaaguucaacccgcccgcccuccaggacgccuacuaccgcgcgcgggacggggaggccgccaacuucugcgcccugauccuggccuacugcaacaagaccgucggcgagcucggcgacgugcgcgagaccaugagcuaccuguuccagcacgcgaaccuggacuccugcaagcggguccucaacguggugugcaagaccugcgggcagcagcagaccacgcugaagggcgucgaggccgugauguacauggggacccugagcuacgagcaguucaagaagggcgugcagauccccugcaccugcgggaagcaggccaccaaguaccucguccagcaggagucccccuucgugaugaugagcgccccgcccgcccaguacgagcugaagcacggcacguucaccugcgcguccgaguacaccggcaacuaccagugcgggcacuacaagcacaucaccagcaaggagacgcuguacugcaucgacggcgcccuccugaccaaguccagcgaguacaaggggcccaucaccgacguguucuacaaggagaacagcuacaccacgaccaucaagcccgucaccuacaagcuggacggcguggugugcaccgagaucgacccgaagcucgacaacuacuacaagaaggacaacuccuacuucacggagcagcccaucgaccugguccccaaccagcccuacccgaacgggagcuucgacaacuucaaguucgugugcgacaacaucaaguucgccgacgaccugaaccagcucaccggcuacaagaagcccgccucccgcgagcugaaggugaccuucuuccccgaccugaacggcgacgucguggccaucgacuacaagcacuacacccccagcuucaagaagggggcgaagcuccugcacaagccgaucguguggcacgucaacaacgccacgaacaaggccaccuacaagcccaacaccuggugcauccggugccugugguccaccaagcccguggagacgagcaacuccuucgacgugcucaagagcgaggacgcccagggcauggacaaccuggcgugcgaggaccugaagcccgucuccgaggaggugguggagaacccgaccauccagaaggacguccucgagugcaacgugaagaccaccgagguggucggggacaucauccugaagcccgccaacaacagccugaagaucacggaggaggugggccacaccgaccucauggacgccuacguggacaacuccagccugaccaucaagaagcccaacgagcugucccgcguccucgggcugaagacccuggccacgcacggccucgccgcggugaacagcgugccgugggacaccaucgccaacuacgccaagcccuuccugaacaaggucguguccaccaccacgaacaucgugacccugugccucaaccuggucugcaccaacuacaugcccuacuucuucacccugcuccugcagcugugcaccuucacgcgcagcaccaacucccggaucaaggccagcaugcccaccaccaucgccaagaacacggugaaguccguggacaaguucugccucgaggcgagcuucaacuaccugaagagcccgaacuucuccaagcugaucaacaucaucaucugguuccuccugcugagcgucugccucggcucccugaucuacagcaccgccgcccugggggugcucauguccaaccugggcaugcccagcuacugcaccggguaccgcgagggcuaccugaacuccaccaacgugacgaucgccaccuacugcaccggcagcauccccugcuccgucugccucagcgggcuggacucccuggacaucuaccccagccucgagaccauccagaucacgaucuccagcuucaagugggaccugaccgccuucggccugguggcggagugguuccucgccuacauccuguucacccgguucuucuacgugcacgggcuggccgccaucaugcagcucuucuucuccuacuucgccguccacuucaucagcaacuccuggcugauguggcugaucaucaaccuggugcagauggcgccgaucagcgccauggugcgcauguacaucuucuucgccuccuucuacuacgucuggaagagcuacgugcacguggucgacggcugcaacagcuccaccugcaugaugugcuaccggcgcaaccgggccacgcgcguggagugcaccaccaucgucaacggggugcggcgcagcuucuacguguacgcgaacggcggcaagggguucugcaagcuccacaacuggaacugcgucaacugcgacaccuucugcgccggcuccacguucaucagcgacgagguggcccgggaccugucccugcaguucaagcgccccaucaaccccaccgaccagagcuccuacaucgacgacagcgugaccgucaagaacggguccauccaccucuacuucgacaaggccggccagaagaccuacgagcggcacagccugucccacuucgugaaccuggacaaccuccgcgccaacaacacgcgggggagccugcccaucaacgugaucgucuucgacggcaaguccaagugcgaggagagcuccgcgaagagcgccuccguguacuacagccagcugaugugccagccgauccuccugcuggaccaggcccucguguccgacgucggcgacagcgccgagguggccgugaagauguucgacgcguacgucagcaccuucuccagcaccuucaacgugcccauggagaagcugaagacccugguggccacggccgaggccgagcucgccaagaacgucucccuggacaacgugcugagcaccuucaucuccgcggcccgccagggguucguggacagcgacgucgagaccaaggacgugguggagugccuccggcugucccaccagagcgacaucgaggucaccggcgacuccugcaacaacuacaugcugacguacaacaagguggagaacaccaccccccgcgaccucggggccugcaucgacugcagcgcccggcacaucaacgcgcagguggccaagucccacaacaucgcccugaucuggaacgucaaggacuucaugagccuguccgagcagcuccgcaagcagauccgcagcgccgccaagaagaacaaccugcccuucaagcugaccugcgcgacgacccggcagguggugaacgucgugaccaccaagaucgcccucaaggugggcugaggacuagucccuguucccagagcccacuuuuuuuucuuuuuuugaaauaaaauagccugucuuucagaucucaaaggcucuuuucagagccaccaaaaaaaaaaaaaaaaaaaaaaaaaaaaaaaaaaaaaaaaaaaaaaaaaaaaaaaaaaaaaaaaaaaaaaaaaaaaaaaaaaaaaaaaaaaaaaaaaaaaa

SEQ ID NO: 19695 - RNA, 6113 nt, Artificial Sequence
  SARS-CoV-2__MT821531.1__non-structural protein 3 (NSP3) mRNA gc
aggagagucccgcagucggcguccagcggcucugcuuguucgugugugugucguugcaggccuuauucaagcuuaccauggcccccaccaaggugaccuucggcgacgacacggucaucgaggugcagggguacaagagcgugaacaucaccuucgagcuggacgagcgcaucgacaagguccucaacgagaagugcuccgccuacaccguggagcugggcaccgaggugaacgaguucgcgugcgucguggccgacgccgugaucaagacgcugcagccggucagcgagcuccugaccccccuggggaucgaccucgacgagugguccauggccaccuacuaccuguucgacgagagcggcgaguucaagcuggccucccacauguacugcagcuucuacccccccgacgaggacgaggaggagggggacugcgaggaggaggaguucgagccguccacccaguacgaguacggcacggaggacgacuaccagggcaagccccucgaguucggggcgaccagcgccgcccugcagcccgaggaggagcaggaggaggacuggcuggacgacgacucccagcagaccgugggccagcaggacgggagcgaggacaaccagaccacgaccauccagaccaucguggagguccagccccagcucgagauggagcugaccccgguggugcagacgaucgaggucaacuccuucagcggcuaccugaagcucaccgacaacguguacaucaagaacgccgacaucguggaggaggcgaagaaggucaagcccaccgugguggucaacgccgccaacguguaccugaagcacgggggcggcguggccggggcccugaacaaggcgaccaacaacgccaugcaggucgaguccgacgacuacaucgccacgaacggcccccucaagguggggggcagcugcguccuguccggccacaaccuggccaagcacugccuccacgugguggggcccaacgucaacaagggcgaggacauccagcugcugaagagcgccuacgagaacuucaaccagcacgaggugcuccuggcgccgcugcucuccgccgggaucuucggcgccgaccccauccacagccugcgggugugcgucgacaccgugcgcaccaacguguaccuggccgucuucgacaagaaccucuacgacaagcugguguccagcuuccuggagaugaagagcgagaagcagguggagcagaagaucgccgagauccccaaggaggaggucaagcccuucaucaccgaguccaagccgagcguggagcagcggaagcaggacgacaagaagaucaaggcgugcguggaggaggucacgaccacccucgaggagaccaaguuccugacggagaaccugcuccuguacaucgacaucaacgggaaccugcaccccgacuccgccacccucgugagcgacaucgacaucaccuuccugaagaaggacgcccccuacaucgugggcgacgucgugcaggagggcgugcugaccgccgucgugauccccacgaagaaggccgggggcaccaccgagaugcucgcgaaggcccugcgcaaggugccgaccgacaacuacaucacgaccuaccccgggcagggccugaacggguacaccgucgaggaggccaagaccgugcucaagaagugcaaguccgccuucuacauccugcccagcaucaucuccaacgagaagcaggagauccugggcaccgugagcuggaaccuccgggagaugcuggcgcacgccgaggagacgcgcaagcugaugcccgucugcguggagaccaaggccaucguguccaccauccagcggaaguacaagggcaucaagauccaggagggggucguggacuacggcgugcgcuucuacuucuacaccagcaagacgaccgucgccucccugaucaacacccucaacgaccugaacgagacccuggugacgaugccgcucggguacgugacccacggccugaaccuggaggaggccgcgcgguacaugcgcagccucaagguccccgccaccguguccgugagcucccccgacgccgucaccgccuacaacggguaccugacgagcuccagcaagacccccgaggagcacuucaucgagaccaucucccuggccggcagcuacaaggacuggagcuacuccggccagagcacccagcucgggaucgaguuccugaagcggggcgacaaguccguguacuacacgagcaacccgaccaccuuccaccuggacggggaggugaucaccuucgacaaccucaagacgcugcugucccuccgcgagguccggaccaucaagguguucaccaccguggacaacaucaaccugcacacgcaggucguggacaugagcaugaccuacggccagcaguucggccccaccuaccuggacggggcggacgugaccaagaucaagccccacaacucccacgagggcaagacguucuacguccucccgaacgacgacacccugcgcguggaggccuucgaguacuaccacaccaccgaccccagcuuccuggggcgguacauguccgcccucaaccacacgaagaaguggaaguacccccaggugaacggccugaccagcaucaagugggccgacaacaacugcuaccuggccaccgcgcuccugacccugcagcagaucgagcucaaguucaaccccccggcccugcaggacgccuacuaccgcgcccgggcgggggaggccgccaacuucugcgcccugauccucgccuacugcaacaagacggucggcgagcugggcgacgugcgcgagaccauguccuaccuguuccagcacgcgaaccucgacagcugcaagcggguccugaacguggugugcaagaccugcgggcagcugcagaccacccucaagggcgucgaggccgugauguacauggggacgcuguccuacgagcaguucaagaagggcgugcagauccccugcaccugcgggaagcaggccaccaaguaccugguccagcaggagagccccuucgugaugauguccgcccccccggcccaguacgagcucaagcacggcaccuucacgugcgcgagcgaguacaccggcaacuaccagugcgggcacuacaagcacaucaccuccaaggagacccuguacugcaucgacggcgcccugcucacgaagagcagcgaguacaaggggcccaucaccgacguguucuacaaggagaacuccuacaccaccacgaucaagcccgucaccuacaagcuggacggcguggugugcaccgagaucgaccccaagcuggacaacuacuacaagaaggacaacagcuacuucaccgagcagccgaucgaccucguccccaaccagcccuaccccaacgccuccuucgacaacuucaaguucgugugcgacaacaucaaguucgccgacgaccugaaccagcugacgggguacaagaagccggccagccgcgagcucaaggugaccuucuuccccgaccugaacggcgacgucguggcgaucgacuacaagcacuacacccccuccuucaagaagggcgccaagcugcuccacaagcccaucguguggcacgucaacaacgccaccaacaaggccacguacaagccgaacaccuggugcauccggugccuguggagcaccaagcccguggagaccuccaacagcuucgacgugcugaaguccgaggacgcgcaggggauggacaaccucgccugcgaggaccugaagcccgucagcgaggaggugguggagaaccccacgauccagaaggacguccuggagugcaacgugaagaccaccgagguggucggcgacaucauccucaagccggccaacaacucccugaagaucaccgaggagguggggcacacggaccugauggccgccuacguggacaacagcucccucaccaucaagaagcccaacgagcugagccgcguccugggccucaagacccuggcgacccacgggcuggccgccgugaacuccgugcccugggacacgaucgccaacuacgccaagccguuccucaacaaggucgugagcaccaccaccaacaucgugacgcgcugccugaaccgggucugcaccaacuacaugcccuacuucuucacccugcuccugcagcugugcaccuucacccgcuccacgaacagccggaucaaggcguccaugcccaccaccaucgccaagaacaccgugaagagcgugggcaaguucugccucgaggccagcuucaacuaccugaagucccccaacuucagcaagcugaucaacaucaucaucugguuccuccugcuguccgucugccucggcagccugaucuacuccacggccgcccugggggugcucaugagcaaccugggcaugccguccuacugcaccggguaccgcgagggcuaccugaacagcaccaacgugaccaucgcgacguacugcaccggcuccauccccugcagcgucugccucuccgggcuggacagccuggacaccuaccccucccucgagaccauccagaucacgaucagcuccuucaagugggaccugaccgccuucggccugguggccgagugguuccucgccuacauccuguucacccgguucuucuacgugcuggggcucgccgcgaucaugcagcuguucuucagcuacuucgccguccacuucaucuccaacagcuggcugauguggcugaucaucaaccucgugcagauggcccccaucuccgccauggugcgcauguacaucuucuucgcgagcuucuacuacgucuggaagagcuacgugcacguggucgacggcugcaacuccagcaccugcaugaugugcuacaagcggaaccgcgccacgcggguggagugcaccaccaucgucaacggggugcgccgguccuucuacguguacgccaacggcggcaagggguucugcaagcugcacaacuggaacugcgucaacugcgacaccuucugcgccggcagcacguucaucuccgacgagguggcccgcgaccugagccuccaguucaagcggccgaucaaccccaccgaccaguccagcuacaucguggacuccgucaccgugaagaacgggagcauccaccuguacuucgacaaggcgggccagaagaccuacgagcgccacucccugagccacuucgugaaccucgacaaccugcgggccaacaacacgaaggggucccugcccaucaacgucaucguguucgacggcaagagcaagugcgaggaguccagcgccaaguccgccagcguguacuacucccagcucaugugccagcccauccugcugcucgaccaggcccuggucagcgacgugggcgacagcgcggagguggccgucaagauguucgacgccuacgugaacaccuucuccagcaccuucaacgugccgauggagaagcugaagacccucgucgccacggccgaggcggagcuggccaagaacgugucccuggacaacgugcucagcaccuucaucuccgccgcccgccagggguucgucgacagcgacguggagaccaaggacguggucgagugccugaagcugucccaccagagcgacaucgaggugaccggcgacuccugcaacaacuacaugcucacguacaacaagguggagaacaugaccccccgggaccugggggcgugcaucgacugcagcgcccgccacaucaacgcccaggucgccaagucccacaacaucgcccugaucuggaacgugaaggacuucaugagccucuccgagcagcugcggaagcagauccgcagcgcggccaagaagaacaaccugcccuucaagcucaccugcgccaccacgcgccagguggucaacguggugaccaccaagaucgcccugaagggcgggugaggacuagucccuguucccagagcccacuuuuuuuucuuuuuuugaaauaaaauagccugucuuucagaucucaaaggcucuuuucagagccaccaaaaaaaaaaaaaaaaaaaaaaaaaaaaaaaaaaaaaaaaaaaaaaaaaaaaaaaaaaaaaaaaaaaaaaaaaaaaaaaaaaaaaaaaaaaaaaaaaaaaa

SEQ ID NO: 19696 - RNA, 6113 nt, Artificial Sequence
  SARS-CoV-2__MT821535.1__non-structural protein 3 (NSP3) mRNA gc
aggagagucccgcagucggcguccagcggcucugcuuguucgugugugugucguugcaggccuuauucaagcuuaccauggcccccaccaaggugaccuucggcgacgacacggucaucgaggugcagggguacaagagcgugaacaucaccuucgagcuggacgagcgcaucgacaagguccucaacgagaagugcuccgccuacaccguggagcugggcaccgaggugaacgaguucgcgugcgucguggccgacgccgugaucaagacgcugcagccggucagcgagcuccugaccccccuggggaucgaccucgacgagugguccauggccaccuacuaccuguucgacgagagcggcgaguucaagcuggccucccacauguacugcagcuucuacccccccgacgaggacgaggaggagggggacugcgaggaggaggaguucgagccguccacccaguacgaguacggcacggaggacgacuaccagggcaagccccucgaguucggggcgaccagcgccgcccugcagcccgaggaggagcaggaggaggacuggcuggacgacgacucccagcagaccgugggccagcaggacgggagcgaggacaaccagaccacgaccauccagaccaucguggagguccagccccagcucgagauggagcugaccccgguggugcagacgaucgaggucaacuccuucagcggcuaccugaagcucaccgacaacguguacaucaagaacgccgacaucguggaggaggcgaagaaggucaagcccaccgugguggucaacgccgccaacguguaccugaagcacgggggcggcguggccggggcccugaacaaggcgaccaacaacgccaugcaggucgaguccgacgacuacaucgccacgaacggcccccucaagguggggggcagcugcguccuguccggccacaaccuggccaagcacugccuccacgugguggggcccaacgucaacaagggcgaggacauccagcugcugaagagcgccuacgagaacuucaaccagcacgaggugcuccuggcgccgcugcucuccgccgggaucuucggcgccgaccccauccacagccugcgggugugcgucgacaccgugcgcaccaacguguaccuggccgucuucgacaagaaccucuacgacaagcugguguccagcuuccuggagaugaagagcgagaagcagguggagcagaagaucgccgagauccccaaggaggaggucaagcccuucaucaccgaguccaagccgagcguggagcagcggaagcaggacgacaagaagaucaaggcgugcguggaggaggucacgaccacccucgaggagaccaaguuccugacggagaaccugcuccuguacaucgacaucaacgggaaccugcaccccgacuccgccacccucgugagcgacaucgacaucaccuuccugaagaaggacgcccccuacaucgugggcgacgucgugcaggagggcgugcugaccgccgucgugauccccacgaagaaggccgggggcaccaccgagaugcucgcgaaggcccugcgcaaggugccgaccgacaacuacaucacgaccuaccccgggcagggccugaacggguacaccgucgaggaggccaagaccgugcucaagaagugcaaguccgccuucuacauccugcccagcaucaucuccaacgagaagcaggagauccugggcaccgugagcuggaaccuccgggagaugcuggcgcacgccgaggagacgcgcaagcugaugcccgucugcguggagaccaaggccaucguguccaccauccagcggaaguacaagggcaucaagauccaggagggggucguggacuacggcgcccgcuucuacuucuacaccagcaagacgaccguggccucccugaucaacacccucaacgaccugaacgagacccuggucacgaugccgcucggguacgugacccacggccugaaccuggaggaggcggcccgguacaugcgcagccucaaggugcccgccaccgucuccgugagcucccccgacgccgugaccgccuacaacggguaccugacgagcuccagcaagacccccgaggagcacuucaucgagaccaucucccuggcgggcagcuacaaggacuggagcuacuccggccagagcacccagcucgggaucgaguuccugaagcggggcgacaaguccgucuacuacacgagcaacccgaccaccuuccaccuggacggggaggugaucaccuucgacaaccucaagacgcugcugucccuccgcgaggugcggaccaucaaggucuucaccaccguggacaacaucaaccugcacacgcagguggucgacaugagcaugaccuacggccagcaguucggccccaccuaccuggacggggccgacgugaccaagaucaagccccacaacucccacgagggcaagacguucuacgugcucccgaacgacgacacccugcgcgucgaggccuucgaguacuaccacaccaccgaccccagcuuccuggggcgguacauguccgcccucaaccacacgaagaaguggaaguacccccaggugaacggccugaccagcaucaagugggccgacaacaacugcuaccuggcgaccgcccuccugacccugcagcagaucgagcucaaguucaaccccccggcccugcaggacgccuacuaccgcgcgcgggccggggaggccgccaacuucugcgcccugauccucgcguacugcaacaagacggugggcgagcugggcgacguccgcgagaccauguccuaccuguuccagcacgccaaccucgacagcugcaagcgggugcugaacgucgugugcaagaccugcgggcagcugcagaccacccucaagggcguggaggccgucauguacauggggacgcuguccuacgagcaguucaagaagggcgugcagauccccugcaccugcgggaagcaggccaccaaguaccuggugcagcaggagagccccuucgucaugauguccgcccccccggcgcaguacgagcucaagcacggcaccuucacgugcgccagcgaguacaccggcaacuaccagugcgggcacuacaagcacaucaccuccaaggagacccuguacugcaucgacggcgcccugcucacgaagagcagcgaguacaaggggcccaucaccgacguguucuacaaggagaacuccuacaccaccacgaucaagcccgugaccuacaagcuggacggcgucgugugcaccgagaucgaccccaagcuggacaacuacuacaagaaggacaacagcuacuucaccgagcagccgaucgaccucgugcccaaccagcccuaccccaacgccuccuucgacaacuucaaguucgucugcgacaacaucaaguucgccgacgaccugaaccagcugacgggguacaagaagccggcgagccgcgagcucaaggugaccuucuuccccgaccugaacggcgacguggucgccaucgacuacaagcacuacacccccuccuucaagaagggcgccaagcugcuccacaagcccaucguguggcacgugaacaacgccaccaacaaggcgacguacaagccgaacaccuggugcauccggugccuguggagcaccaagcccgucgagaccuccaacagcuucgacgugcugaaguccgaggacgcccaggggauggacaaccucgccugcgaggaccugaagcccgugagcgaggaggucguggagaaccccacgauccagaaggacgugcuggagugcaacgucaagaccaccgagguggugggcgacaucauccucaagccggccaacaacucccugaagaucaccgaggaggucgggcacacggaccugauggccgcguacguggacaacagcucccucaccaucaagaagcccaacgagcugagccgcgugcugggccucaagacccuggccacccacgggcuggccgccgucaacuccgugcccugggacacgaucgccaacuacgcgaagccguuccucaacaagguggucagcaccaccaccaacaucgugacgcgcugccugaaccgggugugcaccaacuacaugcccuacuucuucacccugcuccugcagcugugcaccuucacccgcuccacgaacagccggaucaaggccuccaugcccaccaccaucgccaagaacaccgucaagagcgugggcaaguucugccucgaggccagcuucaacuaccugaagucccccaacuucagcaagcugaucaacaucaucaucugguuccuccugcuguccgugugccucggcagccugaucuacuccacggccgcgcuggggguccucaugagcaaccugggcaugccguccuacugcaccggguaccgcgagggcuaccugaacagcaccaacgugaccaucgccacguacugcaccggcuccauccccugcagcgugugccucuccgggcuggacagccuggacaccuaccccucccucgagaccauccagaucacgaucagcuccuucaagugggaccugaccgccuucggccuggucgccgagugguuccucgccuacauccuguucacccgguucuucuacgugcuggggcucgcggccaucaugcagcuguucuucagcuacuucgccgugcacuucaucuccaacagcuggcugauguggcugaucaucaaccucguccagauggcccccaucuccgcgauggugcgcauguacaucuucuucgccagcuucuacuacguguggaagagcuacguccacgugguggacggcugcaacuccagcaccugcaugaugugcuacaagcggaaccgcgccacgcgggucgagugcaccaccaucgugaacgggguccgccgguccuucuacguguacgccaacggcggcaagggguucugcaagcugcacaacuggaacugcgugaacugcgacaccuucugcgccggcagcacguucaucuccgacgaggucgcgcgcgaccugagccuccaguucaagcggccgaucaaccccaccgaccaguccagcuacaucguggacuccgugaccgucaagaacgggagcauccaccuguacuucgacaaggccggccagaagaccuacgagcgccacucccugagccacuucgugaaccucgacaaccugcgggccaacaacacgaaggggucccugcccaucaacgugaucgucuucgacggcaagagcaagugcgaggaguccagcgccaaguccgccagcguguacuacucccagcucaugugccagcccauccugcugcucgaccaggcgcuggugagcgacgucggcgacagcgccgagguggccgugaagauguucgacgccuacgucaacaccuucuccagcaccuucaacgugccgauggagaagcugaagacccucguggccacggcggaggccgagcuggccaagaacgucucccuggacaacgugcucagcaccuucaucuccgccgcgcgccagggguucguggacagcgacgucgagaccaaggacgugguggagugccugaagcugucccaccagagcgacaucgaggucaccggcgacuccugcaacaacuacaugcucacguacaacaagguggagaacaugaccccccgggaccugggggccugcaucgacugcagcgcccgccacaucaacgcccagguggccaagucccacaacaucgcgcugaucuggaacgucaaggacuucaugagccucuccgagcagcugcggaagcagauccgcagcgccgccaagaagaacaaccugcccuucaagcucaccugcgccaccacgcgccagguggugaacgucgugaccaccaagaucgcccugaagggcgggugaggacuagucccuguucccagagcccacuuuuuuuucuuuuuuugaaauaaaauagccugucuuucagaucucaaaggcucuuuucagagccaccaaaaaaaaaaaaaaaaaaaaaaaaaaaaaaaaaaaaaaaaaaaaaaaaaaaaaaaaaaaaaaaaaaaaaaaaaaaaaaaaaaaaaaaaaaaaaaaaaaaaa

SEQ ID NO: 19697 - RNA, 6113 nt, Artificial Sequence
  SARS-CoV-2__MT821537.1__non-structural protein 3 (NSP3) mRNA gc
aggagagucccgcagucggcguccagcggcucugcuuguucgugugugugucguugcaggccuuauucaagcuuaccauggcccccaccaaggugaccuucggcgacgacacggucaucgaggugcagggguacaagagcgugaacaucaccuucgagcuggacgagcgcaucgacaagguccucaacgagaagugcuccgccuacaccguggagcugggcaccgaggugaacgaguucgcgugcgucguggccgacgccgugaucaagacgcugcagccggucagcgagcuccugaccccccuggggaucgaccucgacgagugguccauggccaccuacuaccuguucgacgagagcggcgaguucaagcuggccucccacauguacugcagcuucuacccccccgacgaggacgaggaggagggggacugcgaggaggaggaguucgagccguccacccaguacgaguacggcacggaggacgacuaccagggcaagccccucgaguucggggcgaccagcgccgcccugcagcccgaggaggagcaggaggaggacuggcuggacgacgacucccagcagaccgugggccagcaggacgggagcgaggacaaccagaccacgaccauccagaccaucguggagguccagccccagcucgagauggagcugaccccgguggugcagacgaucgaggucaacuccuucagcggcuaccugaagcucaccgacaacguguacaucaagaacgccgacaucguggaggaggcgaagaaggucaagcccaccgugguggucaacgccgccaacguguaccugaagcacgggggcggcguggccggggcccugaacaaggcgaccaacaacgccaugcaggucgaguccgacgacuacaucgccacgaacggcccccucaagguggggggcagcugcguccuguccggccacaaccuggccaagcacugccuccacgugguggggcccaacgucaacaagggcgaggacauccagcugcugaagagcgccuacgagaacuucaaccagcacgaggugcuccuggcgccgcugcucuccgccgggaucuucggcgccgaccccauccacagccugcgggugugcgucgacaccgugcgcaccaacguguaccuggccgucuucgacaagaaccucuacgacaagcugguguccagcuuccuggagaugaagagcgagaagcagguggagcagaagaucgccgagauccccaaggaggaggucaagcccuucaucaccgaguccaagccgagcguggagcagcggaagcaggacgacaagaagaucaaggcgugcguggaggaggucacgaccacccucgaggagaccaaguuccugacggagaaccugcuccuguacaucgacaucaacgggaaccugcaccccgacuccgccacccucgugagcgacaucgacaucaccuuccugaagaaggacgcccccuacaucgugggcgacgucgugcaggagggcgugcugaccgccgucgugauccccacgaagaaggccgggggcaccaccgagaugcucgcgaaggcccugcgcaaggugccgaccgacaacuacaucacgaccuaccccgggcagggccugaacggguacaccgucgaggaggccaagaccgugcucaagaagugcaaguccgccuucuacauccugcccagcaucaucuccaacgagaagcaggagauccugggcaccgugagcuggaaccuccgggagaugcuggcgcacgccgaggagacgcgcaagcugaugcccgucugcguggagaccaaggccaucguguccaccauccagcggaaguacaagggcaucaagauccaggagggggucguggacuacggcgcccgcuucuacuucuacaccagcaagacgaccguggccucccugaucaacacccucaacgaccugaacgagacccuggucacgaugccgcucggguacgugacccacggccugaaccuggaggaggcggcccgguacaugcgcagccucaaggugcccgccaccgucuccgugagcucccccgacgccgugaccgccuacaacggguaccugacgagcuccagcaagacccccgaggagcacuucaucgagaccaucucccuggcgggcagcuacaaggacuggagcuacuccggccagagcacccagcucgggaucgaguuccugaagcggggcgacaaguccgucuacuacacgagcaacccgaccaccuuccaccuggacggggaggugaucaccuucgacaaccucaagacgcugcugucccuccgcgaggugcggaccaucaaggucuucaccaccguggacaacaucaaccugcacacgcagguggucgacaugagcaugaccuacggccagcaguucggccccaccuaccuggacggggccgacgugaccaagaucaagccccacaacucccacgagggcaagacguucuacgugcucccgaacgacgacacccugcgcgucgaggccuucgaguacuaccacaccaccgaccccagcuuccuggggcgguacauguccgcccucaaccacacgaagaaguggaaguacccccaggugaacggccugaccagcaucaagugggccgacaacaacugcuaccuggcgaccgcccuccugacccugcagcagaucgagcucaaguucaaccccccggcccugcaggacgccuacuaccgcgcgcgggccggggaggccgccaacuucugcgcccugauccucgcguacugcaacaagacggugggcgagcugggcgacguccgcgagaccauguccuaccuguuccagcacgccaaccucgacagcugcaagcgggugcugaacgucgugugcaagaccugcgggcagcagcagaccacccugaagggcguggaggccgucauguacauggggacgcucuccuacgagcaguucaagaagggcgugcagauccccugcaccugcgggaagcaggccaccaaguaccuggugcagcaggagagccccuucgucaugauguccgcccccccggcgcaguacgagcugaagcacggcaccuucacgugcgccagcgaguacaccggcaacuaccagugcgggcacuacaagcacaucaccuccaaggagacccucuacugcaucgacggcgugcugcugacgaagagcagcgaguacaaggggcccaucaccgacguguucuacaaggagaacuccuacaccaccacgaucaagcccgucaccuacaagcucgacggcguggugugcaccgagaucgaccccaagcuggacaacuacuacaagaaggacaacagcuacuucaccgagcagccgaucgaccugguccccaaccagcccuaccccaacgccuccuucgacaacuucaaguucgugugcgacaacaucaaguucgccgacgaccucaaccagcugacgggguacaagaagccggccagccgcgagcugaaggugaccuucuuccccgaccucaacggcgacgucguggcgaucgacuacaagcacuacacccccuccuucaagaagggcgccaagcugcugcacaagcccaucguguggcacgucaacaacgccaccaacaaggccacguacaagccgaacaccuggugcauccggugccucuggagcaccaagcccguggagaccuccaacagcuucgacgugcugaaguccgaggacgcgcaggggauggacaaccuggccugcgaggaccucaagcccgucagcgaggaggugguggagaaccccacgauccagaaggacguccuggagugcaacgugaagaccaccgagguggucggcgacaucauccugaagccggccaacaacucccucaagaucaccgaggagguggggcacacggaccugauggccgccuacguggacaacagcucccugaccaucaagaagcccaacgagcucagccgcguccugggccugaagacccucgcgacccacgggcuggccgccgugaacuccgugcccugggacacgaucgccaacuacgccaagccguuccugaacaaggucgugagcaccaccaccaacaucgugacgcgcugccucaaccgggucugcaccaacuacaugcccuacuucuucacccugcugcuccagcugugcaccuucacccgcuccacgaacagccggaucaaggcguccaugcccaccaccaucgccaagaacaccgugaagagcgugggcaaguucugccuggaggccagcuucaacuaccucaagucccccaacuucagcaagcugaucaacaucaucaucugguuccugcuccuguccgucugccugggcagccucaucuacuccacggccgcccugggggugcugaugagcaaccucggcaugccguccuacugcaccggguaccgcgagggcuaccugaacagcaccaacgugaccaucgcgacguacugcaccggcuccauccccugcagcgucugccuguccgggcucgacagccuggacaccuaccccucccuggagaccauccagaucacgaucagcuccuucaagugggaccucaccgccuucggccugguggccgagugguuccuggccuacauccucuucacccgguucuucuacgugcuggggcuggccgcgaucaugcagcucuucuucagcuacuucgccguccacuucaucuccaacagcuggcugauguggcugaucaucaaccuggugcagauggcccccaucuccgccauggugcgcauguacaucuucuucgcgagcuucuacuacgucuggaagagcuacgugcacguggucgacggcugcaacuccagcaccugcaugaugugcuacaagcggaaccgcgccacgcggguggagugcaccaccaucgucaacggggugcgccgguccuucuacguguacgccaacggcggcaagggguucugcaagcuccacaacuggaacugcgucaacugcgacaccuucugcgccggcagcacguucaucuccgacgagguggcccgcgaccugagccugcaguucaagcggccgaucaaccccaccgaccaguccagcuacaucguggacuccgucaccgugaagaacgggagcauccaccucuacuucgacaaggcgggccagaagaccuacgagcgccacucccugagccacuucgugaaccuggacaaccuccgggccaacaacacgaaggggucccugcccaucaacgucaucguguucgacggcaagagcaagugcgaggaguccagcgccaaguccgccagcguguacuacucccagcugaugugccagcccauccuccugcuggaccaggcccucgucagcgacgugggcgacagcgcggagguggccgucaagauguucgacgccuacgugaacaccuucuccagcaccuucaacgugccgauggagaagcugaagacccuggucgccacggccgaggcggagcucgccaagaacgugucccuggacaacgugcugagcaccuucaucuccgccgcccgccagggguucgucgacagcgacguggagaccaaggacguggucgagugccucaagcugucccaccagagcgacaucgaggugaccggcgacuccugcaacaacuacaugcugacguacaacaagguggagaacaugaccccccgggaccucggggcgugcaucgacugcagcgcccgccacaucaacgcccaggucgccaagucccacaacaucgcccugaucuggaacgugaaggacuucaugagccuguccgagcagcuccggaagcagauccgcagcgcggccaagaagaacaaccugcccuucaagcugaccugcgccaccacgcgccagguggucaacguggugaccaccaagaucgcccucaagggcgggugaggacuagucccuguucccagagcccacuuuuuuuucuuuuuuugaaauaaaauagccugucuuucagaucucaaaggcucuuuucagagccaccaaaaaaaaaaaaaaaaaaaaaaaaaaaaaaaaaaaaaaaaaaaaaaaaaaaaaaaaaaaaaaaaaaaaaaaaaaaaaaaaaaaaaaaaaaaaaaaaaaaaa

SEQ ID NO: 19698 - RNA, 6113 nt, Artificial Sequence
  SARS-CoV-2__MT821555.1__non-structural protein 3 (NSP3) mRNA gc
aggagagucccgcagucggcguccagcggcucugcuuguucgugugugugucguugcaggccuuauucaagcuuaccauggcccccaccaaggugaccuucggcgacgacacggucaucgaggugcagggguacaagagcgugaacaucaccuucgagcuggacgagcgcaucgacaagguccucaacgagaagugcuccgccuacaccguggagcugggcaccgaggugaacgaguucgcgugcgucguggccgacgccgugaucaagacgcugcagccggucagcgagcuccugaccccccuggggaucgaccucgacgagugguccauggccaccuacuaccuguucgacgagagcggcgaguucaagcuggccucccacauguacugcagcuucuacccccccgacgaggacgaggaggagggggacugcgaggaggaggaguucgagccguccacccaguacgaguacggcacggaggacgacuaccagggcaagccccucgaguucggggcgaccagcgccgcccugcagcccgaggaggagcaggaggaggacuggcuggacgacgacucccagcagaccgugggccagcaggacgggagcgaggacaaccagaccacgaccauccagaccaucguggagguccagccccagcucgagauggagcugaccccgguggugcagacgaucgaggucaacuccuucagcggcuaccugaagcucaccgacaacguguacaucaagaacgccgacaucguggaggaggcgaagaaggucaagcccaccgugguggucaacgccgccaacguguaccugaagcacgggggcggcguggccggggcccugaacaaggcgaccaacaacgccaugcaggucgaguccgacgacuacaucgccacgaacggcccccucaagguggggggcagcugcguccuguccggccacaaccuggccaagcacugccuccacgugguggggcccaacgucaacaagggcgaggacauccagcugcugaagagcgccuacgagaacuucaaccagcacgaggugcuccuggcgccgcugcucuccgccgggaucuucggcgccgaccccauccacagccugcgggugugcgucgacaccgugcgcaccaacguguaccuggccgucuucgacaagaaccucuacgacaagcugguguccagcuuccuggagaugaagagcgagaagcagguggagcagaagaucgccgagauccccaaggaggaggucaagcccuucaucaccgaguccaagccgagcguggagcagcggaagcaggacgacaagaagaucaaggcgugcguggaggaggucacgaccacccucgaggagaccaaguuccugacggagaaccugcuccuguacaucgacaucaacgggaaccugcaccccgacuccgccacccucgugagcgacaucgacaucaccuuccugaagaaggacgcccccuacaucgugggcgacgucgugcaggagggcgugcugaccgccgucgugauccccacgaagaaggccgggggcaccaccgagaugcucgcgaaggcccugcgcaaggugccgaccgacaacuacaucacgaccuaccccgggcagggccugaacggguacaccgucgaggaggccaagaccgugcucaagaagugcaaguccgccuucuacauccugcccagcaucaucuccaacgagaagcaggagauccugggcaccgugagcuggaaccuccgggagaugcuggcgcacgccgaggagacgcgcaagcugaugcccgucugcguggagaccaaggugaucgucuccaccauccagcggaaguacaagggcaucaagauccaggagggggugguggacuacggcgcccgcuucuacuucuacaccagcaagacgaccgucgccucccugaucaacacccucaacgaccugaacgagacccuggugacgaugccgcucggguacgugacccacggccugaaccuggaggaggccgcgcgguacaugcgcagccucaagguccccgccaccguguccgugagcucccccgacgccgucaccgccuacaacggguaccugacgagcuccagcaagacccccgaggagcacuucaucgagaccaucucccuggccggcagcuacaaggacuggagcuacuccggccagagcacccagcucgggaucgaguuccugaagcggggcgacaaguccguguacuacacgagcaacccgaccaccuuccaccuggacggggaggugaucaccuucgacaaccucaagacgcugcugucccuccgcgagguccggaccaucaagguguucaccaccguggacaacaucaaccugcacacgcaggucguggacaugagcaugaccuacggccagcaguucggccccaccuaccuggacggggcggacgugaccaagaucaagccccacaacucccacgagggcaagacguucuacguccucccgaacgacgacacccugcgcguggaggccuucgaguacuaccacaccaccgaccccagcuuccuggggcgguacauguccgcccucaaccacacgaagaaguggaaguacccccaggugaacggccugaccagcaucaagugggccgacaacaacugcuaccuggccaccgcgcuccugacccugcagcagaucgagcucaaguucaaccccccggcccugcaggacgccuacuaccgcgcccgggcgggggaggccgccaacuucugcgcccugauccucgccuacugcaacaagacggucggcgagcugggcgacgugcgcgagaccauguccuaccuguuccagcacgcgaaccucgacagcugcaagcggguccugaacguggugugcaagaccugcgggcagcagcagaccacccugaagggcgucgaggccgugauguacauggggacgcucuccuacgagcaguucaagaagggcgugcagauccccugcaccugcgggaagcaggccaccaaguaccugguccagcaggagagccccuucgugaugauguccgcccccccggcccaguacgagcugaagcacggcaccuucacgugcgcgagcgaguacaccggcaacuaccagugcgggcacuacaagcacaucaccuccaaggagacccucuacugcaucgacggcgcccugcugacgaagagcagcgaguacaaggggcccaucaccgacguguucuacaaggagaacuccuacaccaccacgaucaagcccgucaccuacaagcucgacggcguggugugcaccgagaucgaccccaagcuggacaacuacuacaagaaggacaacagcuacuucaccgagcagccgaucgaccugguccccaaccagcccuaccccaacgccuccuucgacaacuucaaguucgugugcgacaacaucaaguucgccgacgaccucaaccagcugacgggguacaagaagccggccagccgcgagcugaaggugaccuucuuccccgaccucaacggcgacgucguggcgaucgacuacaagcacuacacccccuccuucaagaagggcgccaagcugcugcacaagcccaucguguggcacgucaacaacgccaccaacaaggccacguacaagccgaacaccuggugcauccggugccucuggagcaccaagcccguggagaccuccaacagcuucgacgugcugaaguccgaggacgcgcaggggauggacaaccuggccugcgaggaccucaagcccgucagcgaggaggugguggagaaccccacgauccagaaggacguccuggagugcaacgugaagaccaccgagguggucggcgacaucauccugaagccggccaacaacucccucaagaucaccgaggagguggggcacacggaccugauggccgccuacguggacaacagcucccugaccaucaagaagcccaacgagcucagccgcguccugggccugaagacccucgcgacccacgggcuggccgccgugaacuccgugcccugggacacgaucgccaacuacgccaagccguuccugaacaaggucgugagcaccaccaccaacaucgugacgcgcugccucaaccgggucugcaccaacuacaugcccuacuucuucacccugcugcuccagcugugcaccuucacccgcuccacgaacagccggaucaaggcguccaugcccaccaccaucgccaagaacaccgugaagagcgugggcaaguucugccuggaggccagcuucaacuaccucaagucccccaacuucagcaagcugaucaacaucaucaucugguuccugcuccuguccgucugccugggcagccucaucuacuccacggccgcccugggggugcugaugagcaaccucggcaugccguccuacugcaccggguaccgcgagggcuaccugaacagcaccaacgugaccaucgcgacguacugcaccggcuccauccccugcagcgucugccuguccgggcucgacagccuggacaccuaccccucccuggagaccauccagaucacgaucagcuccuucaagugggaccucaccgccuucggccugguggccgagugguuccuggccuacauccucuucacccgguucuucuacgugcuggggcuggccgcgaucaugcagcucuucuucagcuacuucgccguccacuucaucuccaacagcuggcugauguggcugaucaucaaccuggugcagauggcccccaucuccgccauggugcgcauguacaucuucuucgcgagcuucuacuacgucuggaagagcuacgugcacguggucgacggcugcaacuccagcaccugcaugaugugcuacaagcggaaccgcgccacgcggguggagugcaccaccaucgucaacggggugcgccgguccuucuacguguacgccaacggcggcaagggguucugcaagcuccacaacuggaacugcgucaacugcgacaccuucugcgccggcagcacguucaucuccgacgagguggcccgcgaccugagccugcaguucaagcggccgaucaaccccaccgaccaguccagcuacaucguggacuccgucaccgugaagaacgggagcauccaccucuacuucgacaaggcgggccagaagaccuacgagcgccacucccugagccacuucgugaaccuggacaaccuccgggccaacaacacgaaggggucccugcccaucaacgucaucguguucgacggcaagagcaagugcgaggaguccagcgccaaguccgccagcguguacuacucccagcugaugugccagcccauccuccugcuggaccaggcccucgucagcgacgugggcgacagcgcggagguggccgucaagauguucgacgccuacgugaacaccuucuccagcaccuucaacgugccgauggagaagcugaagacccuggucgccacggccgaggcggagcucgccaagaacgugucccuggacaacgugcugagcaccuucaucuccgccgcccgccagggguucgucgacagcgacguggagaccaaggacguggucgagugccucaagcugucccaccagagcgacaucgaggugaccggcgacuccugcaacaacuacaugcugacguacaacaagguggagaacaugaccccccgggaccucggggcgugcaucgacugcagcgcccgccacaucaacgcccaggucgccaagucccacaacaucgcccugaucuggaacgugaaggacuucaugagccuguccgagcagcuccggaagcagauccgcagcgcggccaagaagaacaaccugcccuucaagcugaccugcgccaccacgcgccagguggucaacguggugaccaccaagaucgcccucaagggcgggugaggacuagucccuguucccagagcccacuuuuuuuucuuuuuuugaaauaaaauagccugucuuucagaucucaaaggcucuuuucagagccaccaaaaaaaaaaaaaaaaaaaaaaaaaaaaaaaaaaaaaaaaaaaaaaaaaaaaaaaaaaaaaaaaaaaaaaaaaaaaaaaaaaaaaaaaaaaaaaaaaaaaa

SEQ ID NO: 19699 - RNA, 6113 nt, Artificial Sequence
  SARS-CoV-2__MT821568.1__non-structural protein 3 (NSP3) mRNA gc
aggagagucccgcagucggcguccagcggcucugcuuguucgugugugugucguugcaggccuuauucaagcuuaccauggcccccaccaaggugaccuucggcgacgacacggucaucgaggugcagggguacaagagcgugaacaucaccuucgagcuggacgagcgcaucgacaagguccucaacgagaagugcuccgccuacaccguggagcugggcaccgaggugaacgaguucgcgugcgucguggccgacgccgugaucaagacgcugcagccggucagcgagcuccugaccccccuggggaucgaccucgacgagugguccauggccaccuacuaccuguucgacgagagcggcgaguucaagcuggccucccacauguacugcagcuucuacccccccgacgaggacgaggaggagggggacugcgaggaggaggaguucgagccguccacccaguacgaguacggcacggaggacgacuaccagggcaagccccucgaguucggggcgaccagcgccgcccugcagcccgaggaggagcaggaggaggacuggcuggacgacgacucccagcagaccgugggccagcaggacgggagcgaggacaaccagaccacgaccauccagaccaucguggagguccagccccagcucgagauggagcugaccccgguggugcagacgaucgaggucaacuccuucagcggcuaccugaagcucaccgacaacguguacaucaagaacgccgacaucguggaggaggcgaagaaggucaagcccaccgugguggucaacgccgccaacguguaccugaagcacgggggcggcguggccggggcccugaacaaggcgaccaacaacgccaugcaggucgaguccgacgacuacaucgccacgaacggcccccucaagguggggggcagcugcguccuguccggccacaaccuggccaagcacugccuccacgugguggggcccaacgucaacaagggcgaggacauccagcugcugaagagcgccuacgagaacuucaaccagcacgaggugcuccuggcgccgcugcucuccgccgggaucuucggcgccgaccccauccacagccugcgggugugcgucgacaccgugcgcaccaacguguaccuggccgucuucgacaagaaccucuacgacaagcugguguccagcuuccuggagaugaagagcgagaagcagguggagcagaagaucgccgagauccccaaggaggaggucaagcccuucaucaccgaguccaagccgagcguggagcagcggaagcaggacgacaagaagaucaaggcgugcguggaggaggucacgaccacccucgaggagaccaaguuccugacggagaaccugcuccuguacaucgacaucaacgggaaccugcaccccgacuccgccacccucgugagcgacaucgacaucaccuuccugaagaaggacgcccccuacaucgugggcgacgucgugcaggagggcgugcugaccgccgucgugauccccacgaagaaggccgggggcaccaccgagaugcucgcgaaggcccugcgcaaggugccgaccgacaacuacaucacgaccuaccccgggcagggccugaacggguacaccgucgaggaggccaagaccgugcucaagaagugcaaguccgccuucuacauccugcccagcaucaucuccaacgagaagcaggagauccugggcaccgugagcuggaaccuccgggagaugcuggcgcacgccgaggagacgcgcaagcugaugcccgucugcguggagaccaaggccaucguguccaccauccagcggaaguacaagggcaucaagauccaggagggggucguggacuacggcgcccgcuucuacuucuacaccagcaagacgaccguggccucccugaucaacacccucaacgaccugaacgagacccuggucacgaugccgcucggguacgugacccacggccugaaccuggaggaggcggcccgguacaugcgcagccucaaggugcccgccaccgucuccgugagcucccccgacgccgugaccgccuacaacggguaccugacgagcuccagcaagacccccgaggagcacuucaucgagaccaucucccuggcgggcagcuacaaggacuggagcuacuccggccagagcacccagcucgggaucgaguuccugaagcggggcgacaaguccgucuacuacacgagcaacccgaccaccuuccaccuggacggggaggugaucaccuucgacaaccucaagacgcugcugucccuccgcgaggugcggaccaucaaggucuucaccaccguggacaacaucaaccugcacacgcagguggucgacaugagcaugaccuacggccagcaguucggccccaccuaccuggacggggccgacgugaccaagaucaagccccacaacucccacgagggcaagacguucuacgugcucccgaacgacgacacccugcgcgucgaggccuucgaguacuaccacaccaccgaccccagcuuccuggggcgguacauguccgcccucaaccacacgaagaaguggaaguacccccaggugaacggccugaccagcaucaagugggccgacaacaacugcuaccuggcgaccgcccuccugacccugcagcagaucgagcucaaguucaaccccccggcccugcaggacgccuacuaccgcgcgcgggccggggaggccgccaacuucugcgcccugauccucgcguacugcaacaagacggugggcgagcugggcgacguccgcgagaccauguccuaccuguuccagcacgccaaccucgacagcugcaagcgggugcugaacgucgugugcaagaccugcgggcagcagcagaccacccugaagggcguggaggccgucauguacauggggacgcucuccuacgagcaguucaagaagggcgugcagauccccugcaccugcgggaagcaggccaccaaguaccuggugcagcaggagagccccuucgucaugauguccgcccccccggcgcaguacgagcugaagcacggcaccuucacgugcgccagcgaguacaccggcaacuaccagugcgggcacuacaagcacaucaccuccaaggagacccucuacugcaucgacggcgcccugcugacgaagagcagcgaguacaaggggcccaucaccgacguguucuacaaggagaacuccuacaccaccacgaucaagcccgugaccuacaagcucgacggcgucgugugcaccgagaucgaccccaagcuggacaacuacuacaagaaggacaacagcuacuucaccgagcagccgaucgaccuggugcccaaccagccccaccccaacgccuccuucgacaacuucaaguucgucugcgacaacaucaaguucgccgacgaccucaaccagcugacgggguacaagaagccggcgagccgcgagcugaaggugaccuucuuccccgaccucaacggcgacguggucgccaucgacuacaagcacuacacccccuccuucaagaagggcgccaagcugcugcacaagcccaucguguggcacgugaacaacgccaccaacaaggcgacguacaagccgaacaccuggugcauccggugccucuggagcaccaagcccgucgagaccuccaacagcuucgacgugcugaaguccgaggacgcccaggggauggacaaccuggccugcgaggaccucaagcccgugagcgaggaggucguggagaaccccacgauccagaaggacgugcuggagugcaacgucaagaccaccgagguggugggcgacaucauccugaagccggccaacaacucccucaagaucaccgaggaggucgggcacacggaccugauggccgcguacguggacaacagcucccugaccaucaagaagcccaacgagcucagccgcgugcugggccugaagacccucgccacccacgggcuggccgccgucaacuccgugcccugggacacgaucgccaacuacgcgaagccguuccugaacaagguggucagcaccaccaccaacaucgugacgcgcugccucaaccgggugugcaccaacuacaugcccuacuucuucacccugcugcuccagcugugcaccuucacccgcuccacgaacagccggaucaaggccuccaugcccaccaccaucgccaagaacaccgucaagagcgugggcaaguucugccuggaggccagcuucaacuaccucaagucccccaacuucagcaagcugaucaacaucaucaucugguuccugcuccuguccgugugccugggcagccucaucuacuccacggccgcgcuggggguccugaugagcaaccucggcaugccguccuacugcaccggguaccgcgagggcuaccugaacagcaccaacgugaccaucgccacguacugcaccggcuccauccccugcagcgugugccuguccgggcucgacagccuggacaccuaccccucccuggagaccauccagaucacgaucagcuccuucaagugggaccucaccgccuucggccuggucgccgagugguuccuggccuacauccucuucacccgguucuucuacgugcuggggcuggcggccaucaugcagcucuucuucagcuacuucgccgugcacuucaucuccaacagcuggcugauguggcugaucaucaaccugguccagauggcccccaucuccgcgauggugcgcauguacaucuucuucgccagcuucuacuacguguggaagagcuacguccacgugguggacggcugcaacuccagcaccugcaugaugugcuacaagcggaaccgcgccacgcgggucgagugcaccaccaucgugaacgggguccgccgguccuucuacguguacgccaacggcggcaagggguucugcaagcuccacaacuggaacugcgugaacugcgacaccuucugcgccggcagcacguucaucuccgacgaggucgcgcgcgaccugagccugcaguucaagcggccgaucaaccccaccgaccaguccagcuacaucguggacuccgugaccgucaagaacgggagcauccaccucuacuucgacaaggccggccagaagaccuacgagcgccacucccugagccacuucgugaaccuggacaaccuccgggccaacaacacgaaggggucccugcccaucaacgugaucgucuucgacggcaagagcaagugcgaggaguccagcgccaaguccgccagcguguacuacucccagcugaugugccagcccauccuccugcuggaccaggcgcucgugagcgacgucggcgacagcgccgagguggccgugaagauguucgacgccuacgucaacaccuucuccagcaccuucaacgugccgauggagaagcugaagacccugguggccacggcggaggccgagcucgccaagaacgucucccuggacaacgugcugagcaccuucaucuccgccgcgcgccagggguucguggacagcgacgucgagaccaaggacgugguggagugccucaagcugucccaccagagcgacaucgaggucaccggcgacuccugcaacaacuacaugcugacguacaacaagguggagaacaugaccccccgggaccucggggccugcaucgacugcagcgcccgccacaucaacgcccagguggccaagucccacaacaucgcgcugaucuggaacgucaaggacuucaugagccuguccgagcagcuccggaagcagauccgcagcgccgccaagaagaacaaccugcccuucaagcugaccugcgccaccacgcgccagguggugaacgucgugaccaccaagaucgcccucaagggcgggugaggacuagucccuguucccagagcccacuuuuuuuucuuuuuuugaaauaaaauagccugucuuucagaucucaaaggcucuuuucagagccaccaaaaaaaaaaaaaaaaaaaaaaaaaaaaaaaaaaaaaaaaaaaaaaaaaaaaaaaaaaaaaaaaaaaaaaaaaaaaaaaaaaaaaaaaaaaaaaaaaaaaa

SEQ ID NO: 19700 - RNA, 6113 nt, Artificial Sequence
  SARS-CoV-2__MT821572.1__non-structural protein 3 (NSP3) mRNA gc
aggagagucccgcagucggcguccagcggcucugcuuguucgugugugugucguugcaggccuuauucaagcuuaccauggcccccaccaaggugaccuucggcgacgacacggucaucgaggugcagggguacaagagcgugaacaucaccuucgagcuggacgagcgcaucgacaagguccucaacgagaagugcuccgccuacaccguggagcugggcaccgaggugaacgaguucgcgugcgucguggccgacgccgugaucaagacgcugcagccggucagcgagcuccugaccccccuggggaucgaccucgacgagugguccauggccaccuacuaccuguucgacgagagcggcgaguucaagcuggccucccacauguacugcagcuucuacccccccgacgaggacgaggaggagggggacugcgaggaggaggaguucgagccguccacccaguacgaguacggcacggaggacgacuaccagggcaagccccucgaguucggggcgaccagcgccgcccugcagcccgaggaggagcaggaggaggacuggcuggacgacgacucccagcagaccgugggccagcaggacgggagcgaggacaaccagaccacgaccauccagaccaucguggagguccagccccagcucgagauggagcugaccccgguggugcagacgaucgaggucaacuccuucagcggcuaccugaagcucaccgacaacguguacaucaagaacgccgacaucguggaggaggcgaagaaggucaagcccaccgugguggucaacgccgccaacguguaccugaagcacgggggcggcguggccggggcccugaacaaggcgaccaacaacgccaugcaggucgaguccgacgacuacaucgccacgaacggcccccucaagguggggggcagcugcguccuguccggccacaaccuggccaagcacugccuccacgugguggggcccaacgucaacaagggcgaggacauccagcugcugaagagcgccuacgagaacuucaaccagcacgaggugcuccuggcgccgcugcucuccgccgggaucuucggcgccgaccccauccacagccugcgggugugcgucgacaccgugcgcaccaacguguaccuggccgucuucgacaagaaccucuacgacaagcugguguccagcuuccuggagaugaagagcgagaagcagguggagcagaagaucgccgagauccccaaggaggaggucaagcccuucaucaccgaguccaagccgagcguggagcagcggaagcaggacgacaagaagaucaaggcgugcguggaggaggucacgaccacccucgaggagaccaaguuccugacggagaaccugcuccuguacaucgacaucaacgggaaccugcaccccgacuccgccacccucgugagcgacaucgacaucaccuuccugaagaaggacgcccccuacaucgugggcgacgucgugcaggagggcgugcugaccgccgucgugauccccacgaagaaggccgggggcaccaccgagaugcucgcgaaggcccugcgcaaggugccgaccgacaacuacaucacgaccuaccccgggcagggccugaacggguacaccgucgaggaggccaagaccgugcucaagaagugcaaguccgccuucuacauccugcccagcaucaucuccaacgagaagcaggagauccugggcaccgugagcuggaaccuccgggagauccuggcgcacgccgaggagacgcgcaagcugaugcccgucugcguggagaccaaggccaucguguccaccauccagcggaaguacaagggcaucaagauccaggagggggucguggacuacggcgcccgcuucuacuucuacaccagcaagacgaccguggccucccugaucaacacccucaacgaccugaacgagacccuggucacgaugccgcucggguacgugacccacggccugaaccuggaggaggcggcccgguacaugcgcagccucaaggugcccgccaccgucuccgugagcucccccgacgccgugaccgccuacaacggguaccugacgagcuccagcaagacccccgaggagcacuucaucgagaccaucucccuggcgggcagcuacaaggacuggagcuacuccggccagagcacccagcucgggaucgaguuccugaagcggggcgacaaguccgucuacuacacgagcaacccgaccaccuuccaccuggacggggaggugaucaccuucgacaaccucaagacgcugcugucccuccgcgaggugcggaccaucaaggucuucaccaccguggacaacaucaaccugcacacgcagguggucgacaugagcaugaccuacggccagcaguucggccccaccuaccuggacggggccgacgugaccaagaucaagccccacaacucccacgagggcaagacguucuacgugcucccgaacgacgacacccugcgcgucgaggccuucgaguacuaccacaccaccgaccccagcuuccuggggcgguacauguccgcccucaaccacacgaagaaguggaaguacccccaggugaacggccugaccagcaucaagugggccgacaacaacugcuaccuggcgaccgcccuccugacccugcagcagaucgagcucaaguucaaccccccggcccugcaggacgccuacuaccgcgcgcgggccggggaggccgccaacuucugcgcccugauccucgcguacugcaacaagacggugggcgagcugggcgacguccgcgagaccauguccuaccuguuccagcacgccaaccucgacagcugcaagcgggugcugaacgucgugugcaagaccugcgggcagcagcagaccacccugaagggcguggaggccgucauguacauggggacgcucuccuacgagcaguucaagaagggcgugcagauccccugcaccugcgggaagcaggccaccaaguaccuggugcagcaggagagccccuucgucaugauguccgcccccccggcgcaguacgagcugaagcacggcaccuucacgugcgccagcgaguacaccggcaacuaccagugcgggcacuacaagcacaucaccuccaaggagacccucuacugcaucgacggcgcccugcugacgaagagcagcgaguacaaggggcccaucaccgacguguucuacaaggagaacuccuacaccaccacgaucaagcccgugaccuacaagcucgacggcgucgugugcaccgagaucgaccccaagcuggacaacuacuacaagaaggacaacagcuacuucaccgagcagccgaucgaccuggugcccaaccagcccuaccccaacgccuccuucgacaacuucaaguucgucugcgacaacaucaaguucgccgacgaccucaaccagcugacgggguacaagaagccggcgagccgcgagcugaaggugaccuucuuccccgaccucaacggcgacguggucgccaucgacuacaagcacuacacccccuccuucaagaagggcgccaagcugcugcacaagcccaucguguggcacgugaacaacgccaccaacaaggcgacguacaagccgaacaccuggugcauccggugccucuggagcaccaagcccgucgagaccuccaacagcuucgacgugcugaaguccgaggacgcccaggggauggacaaccuggccugcgaggaccucaagcccgugagcgaggaggucguggagaaccccacgauccagaaggacgugcuggagugcaacgucaagaccaccgagguggugggcgacaucauccugaagccggccaacaacucccucaagaucaccgaggaggucgggcacacggaccugauggccgcguacguggacaacagcucccugaccaucaagaagcccaacgagcucagccgcgugcugggccugaagacccucgccacccacgggcuggccgccgucaacuccgugcccugggacacgaucgccaacuacgcgaagccguuccugaacaagguggucagcaccaccaccaacaucgugacgcgcugccucaaccgggugugcaccaacuacaugcccuacuucuucacccugcugcuccagcugugcaccuucacccgcuccacgaacagccggaucaaggccuccaugcccaccaccaucgccaagaacaccgucaagagcgugggcaaguucugccuggaggccagcuucaacuaccucaagucccccaacuucagcaagcugaucaacaucaucaucugguuccugcuccuguccgugugccugggcagccucaucuacuccacggccgcgcuggggguccugaugagcaaccucggcaugccguccuacugcaccggguaccgcgagggcuaccugaacagcaccaacgugaccaucgccacguacugcaccggcuccauccccugcagcgugugccuguccgggcucgacagccuggacaccuaccccucccuggagaccauccagaucacgaucagcuccuucaagugggaccucaccgccuucggccuggucgccgagugguuccuggccuacauccucuucacccgguucuucuacgugcuggggcuggcggccaucaugcagcucuucuucagcuacuucgccgugcacuucaucuccaacagcuggcugauguggcugaucaucaaccugguccagauggcccccaucuccgcgauggugcgcauguacaucuucuucgccagcuucuacuacguguggaagagcuacguccacgugguggacggcugcaacuccagcaccugcaugaugugcuacaagcggaaccgcgccacgcgggucgagugcaccaccaucgugaacgggguccgccgguccuucuacguguacgccaacggcggcaagggguucugcaagcuccacaacuggaacugcgugaacugcgacaccuucugcgccggcagcacguucaucuccgacgaggucgcgcgcgaccugagccugcaguucaagcggccgaucaaccccaccgaccaguccagcuacaucguggacuccgugaccgucaagaacgggagcauccaccucuacuucgacaaggccggccagaagaccuacgagcgccacucccugagccacuucgugaaccuggacaaccuccgggccaacaacacgaaggggucccugcccaucaacgugaucgucuucgacggcaagagcaagugcgaggaguccagcgccaaguccgccagcguguacuacucccagcugaugugccagcccauccuccugcuggaccaggcgcucgugagcgacgucggcgacagcgccgagguggccgugaagauguucgacgccuacgucaacaccuucuccagcaccuucaacgugccgauggagaagcugaagacccugguggccacggcggaggccgagcucgccaagaacgucucccuggacaacgugcugagcaccuucaucuccgccgcgcgccagggguucguggacagcgacgucgagaccaaggacgugguggagugccucaagcugucccaccagagcgacaucgaggucaccggcgacuccugcaacaacuacaugcugacguacaacaagguggagaacaugaccccccgggaccucggggccugcaucgacugcagcgcccgccacaucaacgcccagguggccaagucccacaacaucgcgcugaucuggaacgucaaggacuucaugagccuguccgagcagcuccggaagcagauccgcagcgccgccaagaagaacaaccugcccuucaagcugaccugcgccaccacgcgccagguggugaacgucgugaccaccaagaucgcccucaagggcgggugaggacuagucccuguucccagagcccacuuuuuuuucuuuuuuugaaauaaaauagccugucuuucagaucucaaaggcucuuuucagagccaccaaaaaaaaaaaaaaaaaaaaaaaaaaaaaaaaaaaaaaaaaaaaaaaaaaaaaaaaaaaaaaaaaaaaaaaaaaaaaaaaaaaaaaaaaaaaaaaaaaaaa

SEQ ID NO: 19701 - RNA, 6113 nt, Artificial Sequence
  SARS-CoV-2__MT821610.1__non-structural protein 3 (NSP3) mRNA gc
aggagagucccgcagucggcguccagcggcucugcuuguucgugugugugucguugcaggccuuauucaagcuuaccauggcccccaccaaggugaccuucggcgacgacacggucaucgaggugcagggguacaagagcgugaacaucaccuucgagcuggacgagcgcaucgacaagguccucaacgagaagugcuccgccuacaccguggagcugggcaccgaggugaacgaguucgcgugcgucguggccgacgccgugaucaagacgcugcagccggucagcgagcuccugaccccccuggggaucgaccucgacgagugguccauggccaccuacuaccuguucgacgagagcggcgaguucaagcuggccucccacauguacugcagcuucuacccccccgacgaggacgaggaggagggggacugcgaggaggaggaguucgagccguccacccaguacgaguacggcacggaggacgacuaccagggcaagccccucgaguucggggcgaccagcgccgcccugcagcccgaggaggagcaggaggaggacuggcuggacgacgacucccagcagaccgugggccagcaggacgggagcgaggacaaccagaccacgaccauccagaccaucguggagguccagccccagcucgagauggagcugaccccgguggugcacacgaucgaggucaacuccuucagcggcuaccugaagcucaccgacaacguguacaucaagaacgccgacaucguggaggaggcgaagaaggucaagcccaccgugguggucaacgccgccaacguguaccugaagcacgggggcggcguggccggggcccugaacaaggcgaccaacaacgccaugcaggucgaguccgacgacuacaucgccacgaacggcccccucaagguggggggcagcugcguccuguccggccacaaccuggccaagcacugccuccacgugguggggcccaacgucaacaagggcgaggacauccagcugcugaagagcgccuacgagaacuucaaccagcacgaggugcuccuggcgccgcugcucuccgccgggaucuucggcgccgaccccauccacagccugcgggugugcgucgacaccgugcgcaccaacguguaccuggccgucuucgacaagaaccucuacgacaagcugguguccagcuuccuggagaugaagagcgagaagcagguggagcagaagaucgccgagauccccaaggaggaggucaagcccuucaucaccgaguccaagccgagcguggagcagcggaagcaggacgacaagaagaucaaggcgugcguggaggaggucacgaccacccucgaggagaccaaguuccugacggagaaccugcuccuguacaucgacaucaacgggaaccugcaccccgacuccgccacccucgugagcgacaucgacaucaccuuccugaagaaggacgcccccuacaucgugggcgacgucgugcaggagggcgugcugaccgccgucgugauccccacgaagaaggccgggggcaccaccgagaugcucgcgaaggcccugcgcaaggugccgaccgacaacuacaucacgaccuaccccgggcagggccugaacggguacaccgucgaggaggccaagaccgugcucaagaagugcaaguccgccuucuacauccugcccagcaucaucuccaacgagaagcaggagauccugggcaccgugagcuggaaccuccgggagaugcuggcgcacgccgaggagacgcgcaagcugaugcccgucugcguggagaccaaggccaucguguccaccauccagcggaaguacaagggcaucaagauccaggagggggucguggacuacggcgcccgcuucuacuucuacaccagcaagacgaccguggccucccugaucaacacccucaacgaccugaacgagacccuggucacgaugccgcucggguacgugacccacggccugaaccuggaggaggcggcccgguacaugcgcagccucaaggugcccgccaccgucuccgugagcucccccgacgccgugaccgccuacaacggguaccugacgagcuccagcaagacccccgaggagcacuucaucgagaccaucucccuggcgggcagcuacaaggacuggagcuacuccggccagagcacccagcucgggaucgaguuccugaagcggggcgacaaguccgucuacuacacgagcaacccgaccaccuuccaccuggacggggaggugaucaccuucgacaaccucaagacgcugcugucccuccgcgaggugcggaccaucaaggucuucaccaccguggacaacaucaaccugcacacgcagguggucgacaugagcaugaccuacggccagcaguucggccccaccuaccuggacggggccgacgugaccaagaucaagccccacaacucccacgagggcaagacguucuacgugcucccgaacgacgacacccugcgcgucgaggccuucgaguacuaccacaccaccgaccccagcuuccuggggcgguacauguccgcccucaaccacacgaagaaguggaaguacccccaggugaacggccugaccagcaucaagugggccgacaacaacugcuaccuggcgaccgcccuccugacccugcagcagaucgagcucaaguucaaccccccggcccugcaggacgccuacuaccgcgcgcgggccggggaggccgccaacuucugcgcccugauccucgcguacugcaacaagacggugggcgagcugggcgacguccgcgagaccauguccuaccuguuccagcacgccaaccucgacagcugcaagcgggugcugaacgucgugugcaagaccugcgggcagcagcagaccacccugaagggcguggaggccgucauguacauggggacgcucuccuacgagcaguucaagaagggcgugcagauccccugcaccugcgggaagcaggccaccaaguaccuggugcagcaggagagccccuucgucaugauguccgcccccccggcgcaguacgagcugaagcacggcaccuucacgugcgccagcgaguacaccggcaacuaccagugcgggcacuacaagcacaucaccuccaaggagacccucuacugcaucgacggcgcccugcugacgaagagcagcgaguacaaggggcccaucaccgacguguucuacaaggagaacuccuacaccaccacgaucaagcccgugaccuacaagcucgacggcgucgugugcaccgagaucgaccccaagcuggacaacuacuacaagaaggacaacagcuacuucaccgagcagccgaucgaccuggugcccaaccagcccuaccccaacgccuccuucgacaacuucaaguucgucugcgacaacaucaaguucgccgacgaccucaaccagcugacgggguacaagaagccggcgagccgcgagcugaaggugaccuucuuccccgaccucaacggcgacguggucgccaucgacuacaagcacuacacccccuccuucaagaagggcgccaagcugcugcacaagcccaucguguggcacgugaacaacgccaccaacaaggcgacguacaagccgaacaccuggugcauccggugccucuggagcaccaagcccgucgagaccuccaacagcuucgacgugcugaaguccgaggacgcccaggggauggacaaccuggccugcgaggaccucaagcccgugagcgaggaggucguggagaaccccacgauccagaaggacgugcuggagugcaacgucaagaccaccgagguggugggcgacaucauccugaagccggccaacaacucccucaagaucaccgaggaggucgggcacacggaccugauggccgcguacguggacaacagcucccugaccaucaagaagcccaacgagcucagccgcgugcugggccugaagacccucgccacccacgggcuggccgccgucaacuccgugcccugggacacgaucgccaacuacgcgaagccguuccugaacaagguggucagcaccaccaccaacaucgugacgcgcugccucaaccgggugugcaccaacuacaugcccuacuucuucacccugcugcuccagcugugcaccuucacccgcuccacgaacagccggaucaaggccuccaugcccaccaccaucgccaagaacaccgucaagagcgugggcaaguucugccuggaggccagcuucaacuaccucaagucccccaacuucagcaagcugaucaacaucaucaucugguuccugcuccuguccgugugccugggcagccucaucuacuccacggccgcgcuggggguccugaugagcaaccucggcaugccguccuacugcaccggguaccgcgagggcuaccugaacagcaccaacgugaccaucgccacguacugcaccggcuccauccccugcagcgugugccuguccgggcucgacagccuggacaccuaccccucccuggagaccauccagaucacgaucagcuccuucaagugggaccucaccgccuucggccuggucgccgagugguuccuggccuacauccucuucacccgguucuucuacgugcuggggcuggcggccaucaugcagcucuucuucagcuacuucgccgugcacuucaucuccaacagcuggcugauguggcugaucaucaaccugguccagauggcccccaucuccgcgauggugcgcauguacaucuucuucgccagcuucuacuacguguggaagagcuacguccacgugguggacggcugcaacuccagcaccugcaugaugugcuacaagcggaaccgcgccacgcgggucgagugcaccaccaucgugaacgggguccgccgguccuucuacguguacgccaacggcggcaagggguucugcaagcuccacaacuggaacugcgugaacugcgacaccuucugcgccggcagcacguucaucuccgacgaggucgcgcgcgaccugagccugcaguucaagcggccgaucaaccccaccgaccaguccagcuacaucguggacuccgugaccgucaagaacgggagcauccaccucuacuucgacaaggccggccagaagaccuacgagcgccacucccugagccacuucgugaaccuggacaaccuccgggccaacaacacgaaggggucccugcccaucaacgugaucgucuucgacggcaagagcaagugcgaggaguccagcgccaaguccgccagcguguacuacucccagcugaugugccagcccauccuccugcuggaccaggcgcucgugagcgacgucggcgacagcgccgagguggccgugaagauguucgacgccuacgucaacaccuucuccagcaccuucaacgugccgauggagaagcugaagacccugguggccacggcggaggccgagcucgccaagaacgucucccuggacaacgugcugagcaccuucaucuccgccgcgcgccagggguucguggacagcgacgucgagaccaaggacgugguggagugccucaagcugucccaccagagcgacaucgaggucaccggcgacuccugcaacaacuacaugcugacguacaacaagguggagaacaugaccccccgggaccucggggccugcaucgacugcagcgcccgccacaucaacgcccagguggccaagucccacaacaucgcgcugaucuggaacgucaaggacuucaugagccuguccgagcagcuccggaagcagauccgcagcgccgccaagaagaacaaccugcccuucaagcugaccugcgccaccacgcgccagguggugaacgucgugaccaccaagaucgcccucaagggcgggugaggacuagucccuguucccagagcccacuuuuuuuucuuuuuuugaaauaaaauagccugucuuucagaucucaaaggcucuuuucagagccaccaaaaaaaaaaaaaaaaaaaaaaaaaaaaaaaaaaaaaaaaaaaaaaaaaaaaaaaaaaaaaaaaaaaaaaaaaaaaaaaaaaaaaaaaaaaaaaaaaaaaa

SEQ ID NO: 19702 - RNA, 6113 nt, Artificial Sequence
  SARS-CoV-2__MT821676.1__non-structural protein 3 (NSP3) mRNA gc
aggagagucccgcagucggcguccagcggcucugcuuguucgugugugugucguugcaggccuuauucaagcuuaccauggcccccaccaaggugaccuucggcgacgacacggucaucgaggugcagggguacaagagcgugaacaucaccuucgagcuggacgagcgcaucgacaagguccucaacgagaagugcuccgccuacaccguggagcugggcaccgaggugaacgaguucgcgugcgucguggccgacgccgugaucaagacgcugcagccggucagcgagcuccugaccccccuggggaucgaccucgacgagugguccauggccaccuacuaccuguucgacgagagcggcgaguucaagcuggccucccacauguacugcagcuucuacccccccgacgaggacgaggaggagggggacugcgaggaggaggaguucgagccguccacccaguacgaguacggcacggaggacgacuaccagggcaagccccucgaguucggggcgaccagcgccgcccugcagcccgaggaggagcaggaggaggacuggcuggacgacgacucccagcagaccgugggccagcaggacgggagcgaggacaaccagaccacgaccauccagaccaucguggagguccagccccagcucgagauggagcugaccccgguggugcagacgaucgaggucaacuccuucagcggcuaccugaagcucaccgacaacguguacaucaagaacgccgacaucguggaggaggcgaagaaggucaagcccaccgugguggucaacgccgccaacguguaccugaagcacgggggcggcguggccggggcccugaacaaggcgaccaacaacgccaugcaggucgaguccgacgacuacaucgccacgaacggcccccucaagguggggggcagcugcguccuguccggccacaaccuggccaagcacugccuccacgugguggggcccaacgucaacaagggcgaggacauccagcugcugaagagcgccuacgagaacuucaaccagcacgaggugcuccuggcgccgcugcucuccgccgggaucuucggcgccgaccccauccacagccugcgggugugcgucgacaccgugcgcaccaacguguaccuggccgucuucgacaagaaccucuacgacaagcugguguccagcuuccuggagaugaagagcgagaagcagguggagcagaagaucgccgagauccccaaggaggaggucaagcccuucaucaccgaguccaagccgagcguggagcagcggaagcaggacgacaagaagaucaaggcgugcguggaggaggucacgaccacccucgaggagaccaaguuccugacggagaaccugcuccuguacaucgacaucaacgggaaccugcaccccgacuccgccacccucgugagcgacaucgacaucaccuuccugaagaaggacgcccccuacaucgugggcgacgucgugcaggagggcgugcugaccgccgucgugauccccacgaagaaggccgggggcaccaccgagaugcucgcgaaggcccugcgcaaggugccgaccgacaacuacaucacgaccuaccccgggcagggccugaacggguacaccgucgaggaggccaagaccgugcucaagaagugcaaguccgccuucuacauccugcccagcaucaucuccaacgagaagcaggagauccugggcaccgugagcuggaaccuccgggagaugcuggcgcacgccgaggagacgcgcaagcugaugcccgucugcguggagaccaaggccaucguguccaccauccagcggaaguacaagggcaucaagauccaggagggggucguggacuacggcgcccgcuucuacuucuacaccagcaagacgaccguggccucccugaucaacacccucaacgaccugaacgagacccuggucacgaugccgcucggguacgugacccacggccugaaccuggaggaggcggcccgguacaugcgcagccucaaggugcccgccaccgucuccgugagcucccccgacgccgugaccgccuacaacggguaccugacgagcuccagcaagacccccgaggagcacuucaucgagaccaucucccuggcgggcagcuacaaggacuggagcuacuccggccagagcacccagcucgggaucgaguuccugaagcggggcgacaaguccgucuacuacacgagcaacccgaccaccuuccaccuggacggggaggugaucaccuucgacaaccucaagacgcugcugucccuccgcgaggugcggaccaucaaggucuucaccaccguggacaacaucaaccugcacacgcagguggucgacaugagcaugaccuacggccagcaguucggccccaccuaccuggacggggccgacgugaccaagaucaagccccacaacucccacgagggcaagacguucuacgugcucccgaacgacgacacccugcgcgucgaggccuucgaguacuaccacaccaccgaccccagcuuccuggggcgguacauguccgcccucaaccacacgaagaaguggaaguacccccaggugaacggccugaccagcaucaagugggccgacaacaacugcuaccuggcgaccgcccuccugacccugcagcagaucgagcucaaguucaaccccccggcccugcaggacgccuacuaccgcgcgcgggccggggaggccgccaacuucugcgcccugauccucgcguacugcaacaagacggugggcgagcugggcgacguccgcgagaccauguccuaccuguuccagcacgccaaccucgacagcugcaagcgggugcugaacgucgugugcaagaccugcgggcagcagcagaccacccugaagggcguggaggccgucauguacauggggacgcucuccuacgagcaguucaagaagggcgugcagauccccugcaccugcgggaagcaggccaccaaguaccuggugcagcaggagagccccuucgucaugauguccgcccccccggcgcaguacgagcugaagcacggcaccuucacgugcgccagcgaguacaccggcaacuaccagugcgggcacuacaagcacaucaccuccaaggagacccucuacugcaucgacggcgcccugcugacgaagagcagcgaguacaaggggcccaucaccgacguguucuacaaggagaacuccuacaccaccacgaucaagcccgugaccuacaagcucgacggcgucgugugcaccgagaucgaccccaagcuggacaacuacuacaagaaggacaacagcuacuucaccgagcagccgaucgaccuggugcccaaccagcccuaccccaacgccuccuucgacaacuucaaguucgucugcgacaacaucaaguucgccgacgaccucaaccagcugacgggguacaagaagccggcgagccgcaagcugaaggugaccuucuuccccgaccucaacggcgacguggucgccaucgacuacaagcacuacacccccuccuucaagaagggcgccaagcugcugcacaagcccaucguguggcacgugaacaacgccaccaacaaggcgacguacaagccgaacaccuggugcauccggugccucuggagcaccaagcccgucgagaccuccaacagcuucgacgugcugaaguccgaggacgcccaggggauggacaaccuggccugcgaggaccucaagcccgugagcgaggaggucguggagaaccccacgauccagaaggacgugcuggagugcaacgucaagaccaccgagguggugggcgacaucauccugaagccggccaacaacucccucaagaucaccgaggaggucgggcacacggaccugauggccgcguacguggacaacagcucccugaccaucaagaagcccaacgagcucagccgcgugcugggccugaagacccucgccacccacgggcuggccgccgucaacuccgugcccugggacacgaucgccaacuacgcgaagccguuccugaacaagguggucagcaccaccaccaacaucgugacgcgcugccucaaccgggugugcaccaacuacaugcccuacuucuucacccugcugcuccagcugugcaccuucacccgcuccacgaacagccggaucaaggccuccaugcccaccaccaucgccaagaacaccgucaagagcgugggcaaguucugccuggaggccagcuucaacuaccucaagucccccaacuucagcaagcugaucaacaucaucaucugguuccugcuccuguccgugugccugggcagccucaucuacuccacggccgcgcuggggguccugaugagcaaccucggcaugccguccuacugcaccggguaccgcgagggcuaccugaacagcaccaacgugaccaucgccacguacugcaccggcuccauccccugcagcgugugccuguccgggcucgacagccuggacaccuaccccucccuggagaccauccagaucacgaucagcuccuucaagugggaccucaccgccuucggccuggucgccgagugguuccuggccuacauccucuucacccgguucuucuacgugcuggggcuggcggccaucaugcagcucuucuucagcuacuucgccgugcacuucaucuccaacagcuggcugauguggcugaucaucaaccugguccagauggcccccaucuccgcgauggugcgcauguacaucuucuucgccagcuucuacuacguguggaagagcuacguccacgugguggacggcugcaacuccagcaccugcaugaugugcuacaagcggaaccgcgccacgcgggucgagugcaccaccaucgugaacgggguccgccgguccuucuacguguacgccaacggcggcaagggguucugcaagcuccacaacuggaacugcgugaacugcgacaccuucugcgccggcagcacguucaucuccgacgaggucgcgcgcgaccugagccugcaguucaagcggccgaucaaccccaccgaccaguccagcuacaucguggacuccgugaccgucaagaacgggagcauccaccucuacuucgacaaggccggccagaagaccuacgagcgccacucccugagccacuucgugaaccuggacaaccuccgggccaacaacacgaaggggucccugcccaucaacgugaucgucuucgacggcaagagcaagugcgaggaguccagcgccaaguccgccagcguguacuacucccagcugaugugccagcccauccuccugcuggaccaggcgcucgugagcgacgucggcgacagcgccgagguggccgugaagauguucgacgccuacgucaacaccuucuccagcaccuucaacgugccgauggagaagcugaagacccugguggccacggcggaggccgagcucgccaagaacgucucccuggacaacgugcugagcaccuucaucuccgccgcgcgccagggguucguggacagcgacgucgagaccaaggacgugguggagugccucaagcugucccaccagagcgacaucgaggucaccggcgacuccugcaacaacuacaugcugacguacaacaagguggagaacaugaccccccgggaccucggggccugcaucgacugcagcgcccgccacaucaacgcccagguggccaagucccacaacaucgcgcugaucuggaacgucaaggacuucaugagccuguccgagcagcuccggaagcagauccgcagcgccgccaagaagaacaaccugcccuucaagcugaccugcgccaccacgcgccagguggugaacgucgugaccaccaagaucgcccucaagggcgggugaggacuagucccuguucccagagcccacuuuuuuuucuuuuuuugaaauaaaauagccugucuuucagaucucaaaggcucuuuucagagccaccaaaaaaaaaaaaaaaaaaaaaaaaaaaaaaaaaaaaaaaaaaaaaaaaaaaaaaaaaaaaaaaaaaaaaaaaaaaaaaaaaaaaaaaaaaaaaaaaaaaaa

SEQ ID NO: 19703 - RNA, 6113 nt, Artificial Sequence
  SARS-CoV-2__MT821773.1__non-structural protein 3 (NSP3) mRNA gc
aggagagucccgcagucggcguccagcggcucugcuuguucgugugugugucguugcaggccuuauucaagcuuaccauggcccccaccaaggugaccuucggcgacgacacggucaucgaggugcagggguacaagagcgugaacaucaccuucgagcuggacgagcgcaucgacaagguccucaacgagaagugcuccgccuacaccguggagcugggcaccgaggugaacgaguucgcgugcgucguggccgacgccgugaucaagacgcugcagccggucagcgagcuccugaccccccuggggaucgaccucgacgagugguccauggccaccuacuaccuguucgacgagagcggcgaguucaagcuggccucccacauguacugcagcuucuacccccccgacgaggacgaggaggagggggacugcgaggaggaggaguucgagccguccacccaguacgaguacggcacggaggacgacuaccagggcaagccccucgaguucggggcgaccagcgccgcccugcagcccgaggaggagcaggaggaggacuggcuggacgacgacucccagcagaccgugggccagcaggacgggagcgaggacaaccagaccacgaccauccagaccaucguggagguccagccccagcucgagauggagcugaccccgguggugcagacgaucgaggucaacuccuucagcggcuaccugaagcucaccgacaacguguacaucaagaacgccgacaucguggaggaggcgaagaaggucaagcccaccgugguggucaacgccgccaacguguaccugaagcacgggggcggcguggccggggcccugaacaaggcgaccaacaacgccaugcaggucgaguccgacgacuacaucgccacgaacggcccccucaagguggggggcagcugcguccuguccggccacaaccuggccaagcacugccuccacgugguggggcccaacgucaacaagggcgaggacauccagcugcugaagagcgccuacgagaacuucaaccagcacgaggugcuccuggcgccgcugcucuccgccgggaucuucggcgccgaccccauccacagccugcgggugugcgucgacaccgugcgcaccaacguguaccuggccgucuucgacaagaaccucuacgacaagcugguguccagcuuccuggagaugaagagcgagaagcagguggagcagaagaucgccgagauccccaaggaggaggucaagcccuucaucaccgaguccaagccgagcguggagcagcggaagcaggacgacaagaagaucaaggcgugcguggaggaggucacgaccacccucgaggagaccaaguuccugacggagaaccugcuccuguacaucgacaucaacgggaaccugcaccccgacuccgccacccucgugagcgacaucgacaucaccuuccugaagaaggacgcccccuacaucgugggcgacgucgugcaggagggcgugcugaccgccgucgugauccccacgaagaaggccgggggcaccaccgagaugcucgcgaaggcccugcgcaaggugccgaccgacaacuacaucacgaccuaccccgggcagggccugaacggguacaccgucgaggaggccaagaccgugcucaagaagugcaaguccgccuucuacauccugcccagcaucaucuccaacgagaagcaggagauccugggcaccgugagcuggaaccuccgggagaugcuggcgcacgccgaggagacgcgcaagcugaugcccgucugcguggagaccaaggccaucguguccaccauccagcggaaguacaagggcaucaagauccaggagggggucguggacuacggcgcccgcuucuacuucuacaccagcaagacgaccguggccucccugaucaacacccucaacgaccugaacgagacccuggucacgaugccgcucggguacgugacccacggccugaaccuggaggaggcggcccgguacaugcgcagccucaaggugcccgccaccgucuccgugagcucccccgacgccgugaccgccuacaacggguaccugacgagcuccagcaagacccccgaggagcacuucaucgagaccaucucccuggcgggcagcuacaaggacuggagcuacuccggccagagcacccagcucgggaucgaguuccugaagcggggcgacaaguccgucuacuacacgagcaacccgaccaccuuccaccuggacggggaggugaucaccuucgacaaccucaagacgcugcugucccuccgcgaggugcggaccaucaaggucuucaccaccguggacaacaucaaccugcacacgcagguggucgacaugagcaugaccuacggccagcaguucggccccaccuaccuggacggggccgacgugaccaagaucaagccccacaacucccacgagggcaagacguucuacgugcucccgaacgacgacacccugcgcgucgaggccuucgaguacuaccacaccaccgaccccagcuuccuggggcgguacauguccgcccucaaccacacgaagaaguggaaguacccccaggugaacggccugaccagcaucaagugggccgacaacaacugcuaccuggcgaccgcccuccugacccugcagcagaucgagcucaaguucaaccccccggcccugcaggacgccuacuaccgcgcgcgggccggggaggccgccaacuucugcgcccugauccucgcguacugcaacaagacggugggcgagcugggcgacguccgcgagaccauguccuaccuguuccagcacgccaaccucgacagcugcaagcgggugcugaacgucgugugcaagaccugcgggcagcagcagaccacccugaagggcguggaggccgucauguacauggggacgcucuccuacgagcaguucaagaagggcgugcagauccccugcaccugcgggaagcaggccaccaaguaccuggugcagcaggagagccccuucgucaugauguccgcccccccggcgcaguacgagcugaagcacggcaccuucacgugcgccagcgaguacaccggcaacuaccagugcgggcacuacaagcacaucaucuccaaggagacccucuacugcaucgacggcgcccugcugaccaagagcagcgaguacaaggggcccaucacggacguguucuacaaggagaacuccuacaccaccaccaucaagcccgugacguacaagcucgacggcgucgugugcaccgagaucgaccccaagcuggacaacuacuacaagaaggacaacagcuacuucaccgagcagccgaucgaccuggugcccaaccagcccuaccccaacgccuccuucgacaacuucaaguucgucugcgacaacaucaaguucgccgacgaccucaaccagcugaccggguacaagaagccggcgagccgcgagcugaaggugacguucuuccccgaccucaacggcgacguggucgccaucgacuacaagcacuacacccccuccuucaagaagggcgccaagcugcugcacaagcccaucguguggcacgugaacaacgccaccaacaaggcgaccuacaagccgaacacguggugcauccggugccucuggagcaccaagcccgucgagaccuccaacagcuucgacgugcugaaguccgaggacgcccaggggauggacaaccuggccugcgaggaccucaagcccgugagcgaggaggucguggagaaccccaccauccagaaggacgugcuggagugcaacgucaagacgaccgagguggugggcgacaucauccugaagccggccaacaacucccucaagaucaccgaggaggucgggcacaccgaccugauggccgcguacguggacaacagcucccugacgaucaagaagcccaacgagcucagccgcgugcugggccugaagacccucgccacccacgggcuggccgccgucaacuccgugcccugggacaccaucgccaacuacgcgaagccguuccugaacaagguggucagcacgaccaccaacaucgugacccgcugccucaaccgggugugcacgaacuacaugcccuacuucuucacccugcugcuccagcugugcaccuucacccgcuccaccaacagccggaucaaggccuccaugcccacgaccaucgccaagaacaccgucaagagcgugggcaaguucugccuggaggccagcuucaacuaccucaagucccccaacuucagcaagcugaucaacaucaucaucugguuccugcuccuguccgugugccugggcagccucaucuacuccaccgccgcgcuggggguccugaugagcaaccucggcaugccguccuacugcacgggguaccgcgagggcuaccugaacagcaccaacgugaccaucgccaccuacugcacgggcuccauccccugcagcgugugccuguccgggcucgacagccuggacaccuaccccucccuggagaccauccagaucaccaucagcuccuucaagugggaccucacggccuucggccuggucgccgagugguuccuggccuacauccucuucacccgguucuucuacgugcuggggcuggcggccaucaugcagcucuucuucagcuacuucgccgugcacuucaucuccaacagcuggcugauguggcugaucaucaaccugguccagauggcccccaucuccgcgauggugcgcauguacaucuucuucgccagcuucuacuacguguggaagagcuacguccacgugguggacggcugcaacuccagcaccugcaugaugugcuacaagcggaaccgcgccacccgggucgagugcacgaccaucgugaacgggguccgccgguccuucuacguguacgccaacggcggcaagggguucugcaagcuccacaacuggaacugcgugaacugcgacaccuucugcgccggcagcaccuucaucuccgacgaggucgcgcgcgaccugagccugcaguucaagcggccgaucaaccccacggaccaguccagcuacaucguggacuccgugaccgucaagaacgggagcauccaccucuacuucgacaaggccggccagaagaccuacgagcgccacucccugagccacuucgugaaccuggacaaccuccgggccaacaacaccaaggggucccugcccaucaacgugaucgucuucgacggcaagagcaagugcgaggaguccagcgccaaguccgccagcguguacuacucccagcugaugugccagcccauccuccugcuggaccaggcgcucgugagcgacgucggcgacagcgccgagguggccgugaagauguucgacgccuacgucaacacguucuccagcaccuucaacgugccgauggagaagcugaagacccugguggccaccgcggaggccgagcucgccaagaacgucucccuggacaacgugcugagcacguucaucuccgccgcgcgccagggguucguggacagcgacgucgagaccaaggacgugguggagugccucaagcugucccaccagagcgacaucgaggucaccggcgacuccugcaacaacuacaugcugaccuacaacaagguggagaacaugacgccccgggaccucggggccugcaucgacugcagcgcccgccacaucaacgcccagguggccaagucccacaacaucgcgcugaucuggaacgucaaggacuucaugagccuguccgagcagcuccggaagcagauccgcagcgccgccaagaagaacaaccugcccuucaagcugaccugcgccaccacccgccagguggugaacgucgugacgaccaagaucgcccucaagggcgggugaggacuagucccuguucccagagcccacuuuuuuuucuuuuuuugaaauaaaauagccugucuuucagaucucaaaggcucuuuucagagccaccaaaaaaaaaaaaaaaaaaaaaaaaaaaaaaaaaaaaaaaaaaaaaaaaaaaaaaaaaaaaaaaaaaaaaaaaaaaaaaaaaaaaaaaaaaaaaaaaaaaaa

SEQ ID NO: 19704 - RNA, 6113 nt, Artificial Sequence
  SARS-CoV-2__MT821778.1__non-structural protein 3 (NSP3) mRNA gc
aggagagucccgcagucggcguccagcggcucugcuuguucgugugugugucguugcaggccuuauucaagcuuaccauggcccccaccaaggugaccuucggcgacgacacggucaucgaggugcagggguacaagagcgugaacaucaccuucgagcuggacgagcgcaucgacaagguccucaacgagaagugcuccgccuacaccguggagcugggcaccgaggugaacgaguucgcgugcgucguggccgacgccgugaucaagacgcugcagccggucagcgagcuccugaccccccuggggaucgaccucgacgagugguccauggccaccuacuaccuguucgacgagagcggcgaguucaagcuggccucccacauguacugcagcuucuacccccccgacgaggacgaggaggagggggacugcgaggaggaggaguucgagccguccacccaguacgaguacggcacggaggacgacuaccagggcaagccccucgaguucggggcgaccagcgccgcccugcagcccgaggaggagcaggaggaggacuggcuggacgacgacucccagcagaccgugggccagcaggacgggagcgaggacaaccagaccacgaccauccagaccaucguggagguccagccccagcucgagauggagcugaccccgguggugcagacgaucgaggucaacuccuucagcggcuaccugaagcucaccgacaacguguacaucaagaacgccgacaucguggaggaggcgaagaaggucaagcccaccgugguggucaacgccgccaacguguaccugaagcacgggggcggcguggccggggcccugaacaaggcgaccaacaacgccaugcaggucgaguccgacgacuacaucgccacgaacggcccccucaagguggggggcagcugcguccuguccggccacaaccuggccaagcacugccuccacgugguggggcccaacgucaacaagggcgaggacauccagcugcugaagagcgccuacgagaacuucaaccagcacgaggugcuccuggcgccgcugcucuccgccgggaucuucggcgccgaccccauccacagccugcgggugugcgucgacaccgugcgcaccaacguguaccuggccgucuucgacaagaaccucuacgacaagcugguguccagcuuccuggagaugaagagcgagaagcagguggagcagaagaucgccgagauccccaaggaggaggucaagcccuucaucaccgaguccaagccgagcguggagcagcggaagcaggacgacaagaagaucaaggcgugcguggaggaggucacgaccacccucgaggagaccaaguuccugacggagaaccugcuccuguacaucgacaucaacgggaaccugcaccccgacuccgccacccucgugagcgacaucgacaucaccuuccugaagaaggacgcccccuacaucgugggcgacgucgugcaggagggcgugcugaccgccgucgugauccccacgaagaaggccgggggcaccaccgagaugcucgcgaaggcccugcgcaaggugccgaccgacaacuacaucacgaccuaccccgggcagggccugaacggguacaccgucgaggaggccaagaccgugcucaagaagugcaaguccgccuucuacauccugcccagcaucaucuccaacgagaagcaggagauccugggcaccgugagcuggaaccuccgggagaugcuggcgcacgccgaggagacgcgcaagcugaugcccgucugcguggagaccaaggccaucguguccaccauccagcggaaguacaagggcaucaagauccaggagggggucguggacuacggcgcccgcuucuacuucuacaccagcaagacgaccguggccucccugaucaacacccucaacgaccugaacgagacccuggucacgaugccgcucggguacgugacccacggccugaaccuggaggaggcggcccgguacaugcgcagccucaaggugcccgccaccgucuccgugagcucccccgacgccgugaccgccuacaacggguaccugacgagcuccagcaagacccccgaggagcacuucaucgagaccaucucccuggcgggcagcuacaaggacuggagcuacuccggccagagcacccagcucgggaucgaguuccugaagcggggcgacaaguccgucuacuacacgagcaacccgaccaccuuccaccuggacggggaggugaucaccuucgacaaccucaagacgcugcugucccuccgcgaggugcggaccaucaaggucuucaccaccguggacaacaucaaccugcacacgcagguggucgacaugagcaugaccuacggccagcaguucggccccaccuaccuggacggggccgacgugaccaagaucaagccccacaacucccacgagggcaagacguucuacgugcucccgaacgacgacacccugcgcgucgaggccuucgaguacuaccacaccaccgaccccagcuuccuggggcgguacauguccgcccucaaccacacgaagaaguggaaguacccccaggugaacggccugaccagcaucaagugggccgacaacaacugcuaccuggcgaccgcccuccugacccugcagcagaucgagcucaaguucaaccccccggcccugcaggacgccuacuaccgcgcgcgggccggggaggccgccaacuucugcgcccugauccucgcguacugcaacaagacggugggcgagcugggcgacguccgcgagaccauguccuaccuguuccagcacgccaaccucgacagcugcaagcgggugcugaacgucgugugcaagaccugcgggcagcagcagaccacccugaagggcguggaggccgucauguacauggggacgcucuccuacgagcaguucaagaagggcgugcagauccccugcaccugcgggaagcaggccaccaaguaccuggugcagcaggagagccccuucgucaugauguccgcccccccggcgcaguacgagcugaagcacggcaccuucacgugcgccagcgaguacaccggcaacuaccagugcgggcacuacaagcacaucaccuccaaggagacccucuacugcaucgacggcgcccugcugacgaagagcagcgaguacaaggggcccaucaccgacguguucuacaaggagaacuccuacaccaccacgaucaagcccgugaccuacaagcucgacggcgucgugugcaccgagaucgaccccaagcuggacaacuacuacaagaaggacaacagcuacuucaccgagcagccgaucgaccuggugcccaaccagcccuaccccaacgccuccuucgacaacuucaaguucgucugcgacaacaucaaguucgccgacgaccucaaccagcugacgggguacaagaagccggcgagccgcgagcugaaggugaccuucuuccccgaccucaacggcgacguggucgccaucgacuacaagcacuacacccccuccuucaagaagggcgccaagcugcugcacaagcccaucguguggcacgugaacaacgccaccaacaaggcgacguacaagccgaacaccuggugcauccggugccucuggagcaccaagcccgucgagacccccaacuccuucgacgugcugaagagcgaggacgcccaggggauggacaaccuggccugcgaggaccucaagcccguguccgaggaggucguggagaacccgacgauccagaaggacgugcuggagugcaacgucaagaccaccgagguggugggcgacaucauccugaagcccgccaacaacagccucaagaucaccgaggaggucgggcacacggaccugauggccgcguacguggacaacuccagccugaccaucaagaagcccaacgagcucucccgcgugcugggccugaagacccucgccacccacgggcuggccgccgucaacagcgugccgugggacacgaucgccaacuacgcgaagcccuuccugaacaagguggucuccaccaccaccaacaucgugacgcgcugccucaaccgggugugcaccaacuacaugcccuacuucuucacccugcugcuccagcugugcaccuucacccgcagcacgaacucccggaucaaggccagcaugcccaccaccaucgccaagaacaccgucaaguccgugggcaaguucugccuggaggccagcuucaacuaccucaagagcccgaacuucuccaagcugaucaacaucaucaucugguuccugcuccugagcgugugccugggcucccucaucuacagcacggccgcgcuggggguccugauguccaaccucggcaugcccagcuacugcaccggguaccgcgagggcuaccugaacuccaccaacgugaccaucgccacguacugcaccggcagcauccccugcuccgugugccugagcgggcucgacucccuggacaccuaccccagccuggagaccauccagaucacgaucuccagcuucaagugggaccucaccgccuucggccuggucgccgagugguuccuggccuacauccucuucacccgguucuucuacgugcuggggcuggcggccaucaugcagcucuucuucuccuacuucgccgugcacuucaucagcaacuccuggcugauguggcugaucaucaaccugguccagauggccccgaucagcgcgauggugcgcauguacaucuucuucgccuccuucuacuacguguggaagagcuacguccacgugguggacggcugcaacagcuccaccugcaugaugugcuacaagcggaaccgcgccacgcgggucgagugcaccaccaucgugaacgggguccgccggagcuucuacguguacgccaacggcggcaagggguucugcaagcuccacaacuggaacugcgugaacugcgacaccuucugcgccggcuccacguucaucagcgacgaggucgcgcgcgaccugucccugcaguucaagcggcccaucaaccccaccgaccagagcuccuacaucguggacagcgugaccgucaagaacggguccauccaccucuacuucgacaaggccggccagaagaccuacgagcgccacagccugucccacuucgugaaccuggacaaccuccgggccaacaacacgaaggggagccugcccaucaacgugaucgucuucgacggcaaguccaagugcgaggagagcuccgccaagagcgccuccguguacuacagccagcugaugugccagccgauccuccugcuggaccaggcgcucguguccgacgucggcgacagcgccgagguggccgugaagauguucgacgccuacgucaacaccuucagcuccaccuucaacgugcccauggagaagcugaagacccugguggccacggcggaggccgagcucgccaagaacgucagccuggacaacgugcuguccaccuucaucagcgccgcgcgccagggguucguggacuccgacgucgagaccaaggacgugguggagugccucaagcugagccaccaguccgacaucgaggucaccggcgacagcugcaacaacuacaugcugacguacaacaagguggagaacaugaucccccgggaccucggggccugcaucgacugcuccgcccgccacaucaacgcccagguggccaagagccacaacaucgcgcugaucuggaacgucaaggacuucaugucccugagcgagcagcuccggaagcagauccgcuccgccgccaagaagaacaaccugcccuucaagcugaccugcgccaccacccgccagguggugaacgucgugacgaccaagaucgcccucaagggcgggugaggacuagucccuguucccagagcccacuuuuuuuucuuuuuuugaaauaaaauagccugucuuucagaucucaaaggcucuuuucagagccaccaaaaaaaaaaaaaaaaaaaaaaaaaaaaaaaaaaaaaaaaaaaaaaaaaaaaaaaaaaaaaaaaaaaaaaaaaaaaaaaaaaaaaaaaaaaaaaaaaaaaa

SEQ ID NO: 19705 - RNA, 6113 nt, Artificial Sequence
  SARS-CoV-2__MT821787.1__non-structural protein 3 (NSP3) mRNA gc
aggagagucccgcagucggcguccagcggcucugcuuguucgugugugugucguugcaggccuuauucaagcuuaccauggcccccaccaaggugaccuucggcgacgacacggucaucgaggugcagggguacaagagcgugaacaucaccuucgagcuggacgagcgcaucgacaagguccucaacgagaagugcuccgccuacaccguggagcugggcaccgaggugaacgaguucgcgugcgucguggccgacgccgugaucaagacgcugcagccggucagcgagcuccugaccccccuggggaucgaccucgacgagugguccauggccaccuacuaccuguucgacgagagcggcgaguucaagcuggccucccacauguacugcagcuucuacccccccgacgaggacgaggaggagggggacugcgaggaggaggaguucgagccguccacccaguacgaguacggcacggaggacgacuaccagggcaagccccucgaguucggggcgaccagcgccgcccugcagcccgaggaggagcaggaggaggacuggcuggacgacgacucccagcagaccgugggccagcaggacgggagcgaggacaaccagaccacgaccauccagaccaucguggagguccagccccagcucgagauggagcugaccccgguggugcagacgaucgaggucaacuccuucagcggcuaccugaagcucaccgacaacguguacaucaagaacgccgacaucguggaggaggcgaagaaggucaagcccaccgugguggucaacgccgccaacguguaccugaagcacgggggcggcguggccggggcccugaacaaggcgaccaacaacgccaugcaggucgaguccgacgacuacaucgccacgaacggcccccucaagguggggggcagcugcguccuguccggccacaaccuggccaagcacugccuccacgugguggggcccaacgucaacaagggcgaggacauccagcugcugaagagcgccuacgagaacuucaaccagcacgaggugcuccuggcgccgcugcucuccgccgggaucuucggcgccgaccccauccacagccugcgggugugcgucgacaccgugcgcaccaacguguaccuggccgucuucgacaagaaccucuacgacaagcugguguccagcuuccuggagaugaagagcgagaagcagguggagcagaagaucgccgagauccccaaggaggaggucaagcccuucaucaccgaguccaagccgagcguggagcagcggaagcaggacgacaagaagaucaaggcgugcguggaggaggucacgaccacccucgaggagaccaaguuccugacggagaaccugcuccuguacaucgacaucaacgggaaccugcaccccgacuccgccacccucgugagcgacaucgacaucaccuuccugaagaaggacgcccccuacaucgugggcgacgucgugcaggagggcgugcugaccgccgucgugauccccacgaagaaggccgggggcaccaccgagaugcucgcgaaggcccugcgcaaggugccgaccgacaacuacaucacgaccuaccccgggcagggccugaacggguacaccgucgaggaggccaagaccgugcucaagaagugcaaguccgccuucuacauccugcccagcaucaucuccaacgagaagcaggagauccugggcaccgugagcuggaaccuccgggagaugcuggcgcacgccgaggagacgcgcaagcugaugcccgucugcguggagaccaaggccaucguguccaccauccagcggaaguacaagggcaucaagauccaggagggggucguggacuacggcgcccgcuucuacuucuacaccagcaagacgaccguggccucccugaucaacacccucaacgaccugaacgagacccuggucacgaugccgcucggguacgugacccacggccugaaccuggaggaggcggcccgguacaugcgcagccucaaggugcccgccaccgucuccgugagcucccccgacgccgugaccgccuacaacggguaccugacgagcuccagcaagacccccgaggagcacuucaucgagaccaucucccuggcgggcagcuacaaggacuggagcuacuccggccagagcacccagcucgggaucgaguuccugaagcggggcgacaaguccgucuacuacacgagcaacccgaccaccuuccaccuggacggggaggugaucaccuucgacaaccucaagacgcugcugucccuccgcgaggugcggaccaucaaggucuucaccaccguggacaacaucaaccugcacacgcagguggucgacaugagcaugaccuacggccagcaguucggccccaccuaccuggacggggccgacgugaccaagaucaagccccacaacucccacgagggcaagacguucuacgugcucccgaacgacgacacccugcgcgucgaggccuucgaguacuaccacaccaccgaccccagcuuccuggggcgguacauguccgcccucaaccacacgaagaaguggaaguacccccaggugaacggccugaccagcaucaagugggccgacaacaacugcuaccuggcgaccgcccuccugacccugcagcagaucgagcucaaguucaaccccccggcccugcaggacgccuacuaccgcgcgcgggccggggaggccgccaacuucugcgcccugauccucgcguacugcaacaagacggugggcgagcugggcgacguccgcgagaccauguccuaccuguuccagcacgccaaccucgacagcugcaagcgggugcugaacgucgugugcaagaccugcgggcagcagcagaccacccugaagggcguggaggccgucauguacauggggacgcucuccuacgagcaguucaagaagggcgugcagauccccugcaccugcgggaagcaggccaccaaguaccuggugcagcaggagagccccuucgucaugauguccgcccccccggcgcaguacgagcugaagcacggcaccuucacgugcgccagcgaguacaccggcaacuaccagugcgggcacuacaagcacaucaccuccaaggagacccucuacugcaucgacggcgcccugcugacgaagagcagcgaguacaaggggcccaucaccgacguguucuacaaggagaacuccuacaccaccacgaucaagcccgugaccuacaagcucgacggcgucgugugcaccgagaucgaccccaagcuggacaacuacuacaagaaggacaacagcuacuucaccgagcagccgaucgaccuggugcccaaccagcccuaccccaacgccaacuucgacaacuucaaguucgucugcgacaacaucaaguucgccgacgaccucaaccagcugacgggguacaagaagccggcgucccgcgagcugaaggugaccuucuuccccgaccucaacggcgacguggucgccaucgacuacaagcacuacacccccagcuucaagaagggcgccaagcugcugcacaagcccaucguguggcacgugaacaacgccaccaacaaggcgacguacaagccgaacaccuggugcauccggugccucugguccaccaagcccgucgagaccagcaacuccuucgacgugcugaagagcgaggacgcccaggggauggacaaccuggccugcgaggaccucaagcccguguccgaggaggucguggagaaccccacgauccagaaggacgugcuggagugcaacgucaagaccaccgagguggugggcgacaucauccugaagccggccaacaacagccucaagaucaccgaggaggucgggcacacggaccugauggccgcguacguggacaacuccagccugaccaucaagaagcccaacgagcucucccgcgugcugggccugaagacccucgccacccacgggcuggccgccgucaacagcgugcccugggacacgaucgccaacuacgcgaagccguuccugaacaagguggucuccaccaccaccaacaucgugacgcgcugccucaaccgggugugcaccaacuacaugcccuacuucuucacccugcugcuccagcugugcaccuucacccgcagcacgaacucccggaucaaggccagcaugcccaccaccaucgccaagaacaccgucaaguccgugggcaaguucugccuggaggccagcuucaacuaccucaagagccccaacuucuccaagcugaucaacaucaucaucugguuccugcuccugagcgugugccugggcucccucaucuacagcacggccgcgcuggggguccugauguccaaccucggcaugccgagcuacugcaccggguaccgcgagggcuaccugaacuccaccaacgugaccaucgccacguacugcaccggcagcauccccugcuccgugugccugagcgggcucgacucccuggacaccuaccccagccuggagaccauccagaucacgaucuccagcuucaagugggaccucaccgccuucggccuggucgccgagugguuccuggccuacauccucuucacccgguucuucuacgugcuggggcuggcggccaucaugcagcucuucuucuccuacuucgccgugcacuucaucagcaacuccuggcugauguggcugaucaucaaccugguccagauggcccccaucagcgcgauggugcgcauguacaucuucuucgccuccuucuacuacguguggaagagcuacguccacgugguggacggcugcaacagcuccaccugcaugaugugcuacaagcggaaccgcgccacgcgggucgagugcaccaccaucgugaacgggguccgccggagcuucuacguguacgccaacggcggcaagggguucugcaagcuccacaacuggaacugcgugaacugcgacaccuucugcgccggcuccacguucaucagcgacgaggucgcgcgcgaccugucccugcaguucaagcggccgaucaaccccaccgaccagagcuccuacaucguggacagcgugaccgucaagaacggguccauccaccucuacuucgacaaggccggccagaagaccuacgagcgccacagccugucccacuucgugaaccuggacaaccuccgggccaacaacacgaaggggagccugcccaucaacgugaucgucuucgacggcaaguccaagugcgaggagagcuccgccaagagcgccuccguguacuacagccagcugaugugccagcccauccuccugcuggaccaggcgcucguguccgacgucggcgacagcgccgagguggccgugaagauguucgacgccuacgucaacaccuucagcuccaccuucaacgugccgauggagaagcugaagacccugguggccacggcggaggccgagcucgccaagaacgucagccuggacaacgugcuguccaccuucaucagcgccgcgcgccagggguucguggacuccgacgucgagaccaaggacgugguggagugccucaagcugagccaccaguccgacaucgaggucaccggcgacagcugcaacaacuacaugcugacguacaacaagguggagaacaugaccccccgggaccucggggccugcaucgacugcuccgcccgccacaucaacgcccagguggccaagagccacaacaucgcgcugaucuggaacgucaaggacuucaugucccugagcgagcagcuccggaagcagauccgcuccgccgccaagaagaacaaccugcccuucaagcugaccugcgccaccacgcgccagguggugaacgucgugaccaccaagaucgcccucaagggcgggugaggacuagucccuguucccagagcccacuuuuuuuucuuuuuuugaaauaaaauagccugucuuucagaucucaaaggcucuuuucagagccaccaaaaaaaaaaaaaaaaaaaaaaaaaaaaaaaaaaaaaaaaaaaaaaaaaaaaaaaaaaaaaaaaaaaaaaaaaaaaaaaaaaaaaaaaaaaaaaaaaaaaa

SEQ ID NO: 19706 - RNA, 6113 nt, Artificial Sequence
  SARS-CoV-2__MT810483.1__non-structural protein 3 (NSP3) mRNA gc
aggagagucccgcagucggcguccagcggcucugcuuguucgugugugugucguugcaggccuuauucaagcuuaccauggcccccaccaaggugaccuucggcgacgacacggucaucgaggugcagggguacaagagcgugaacaucaccuucgagcuggacgagcgcaucgacaagguccucaacgagaagugcuccgccuacaccguggagcugggcaccgaggugaacgaguucgcgugcgucguggccgacgccgugaucaagacgcugcagccggucagcgagcuccugaccccccuggggaucgaccucgacgagugguccauggccaccuacuaccuguucgacgagagcggcgaguucaagcuggccucccacauguacugcagcuucuacccccccgacgaggacgaggaggagggggacugcgaggaggaggaguucgagccguccacccaguacgaguacggcacggaggacgacuaccagggcaagccccucgaguucggggcgaccagcgccgcccugcagcccgaggaggagcaggaggaggacuggcuggacgacgacucccagcagaccgugggccagcaggacgggagcgaggacaaccagaccacgaccauccagaccaucguggagguccagccccagcucgagauggagcugaccccgguggugcagacgaucgaggucaacuccuucagcggcuaccugaagcucaccgacaacguguacaucaagaacgccgacaucguggaggaggcgaagaaggucaagcccaccgugguggucaacgccgccaacguguaccugaagcacgggggcggcguggccggggcccugaacaaggcgaccaacaacgccaugcaggucgaguccgacgacuacaucgccacgaacggcccccucaagguggggggcagcugcguccuguccggccacaaccuggccaagcacugccuccacgugguggggcccaacgucaacaagggcgaggacauccagcugcugaagagcgccuacgagaacuucaaccagcacgaggugcuccuggcgccgcugcucuccgccgggaucuucggcgccgaccccauccacagccugcgggugugcgucgacaccgugcgcaccaacguguaccuggccgucuucgacaagaaccucuacgacaagcugguguccagcuuccuggagaugaagagcgagaagcagguggagcagaagaucgccgagauccccaaggaggaggucaagcccuucaucaccgaguccaagccgagcguggagcagcggaagcaggacgacaagaagaucaaggcgugcguggaggaggucacgaccacccucgaggagaccaaguuccugacggagaaccugcuccuguacaucgacaucaacgggaaccugcaccccgacuccgccacccucgugagcgacaucgacaucaccuuccugaagaaggacgcccccuacaucgugggcgacgucgugcaggagggcgugcugaccgccgucgugauccccacgaagaaggccgggggcaccaccgagaugcucgcgaaggcccugcgcaaggugccgaccgacaacuacaucacgaccuaccccgggcagggccugaacggguacaccgucgaggaggccaagaccgugcucaagaagugcaaguccgccuucuacauccugcccagcaucaucuccaacgagaagcaggagauccugggcaccgugagcuggaaccuccgggagaugcuggcgcacgccgaggagacgcgcaagcugaugcccgucugcguggagaccaaggccaucguguccaccauccagcggaaguacaagggcaucaagauccaggagggggucguggacuacggcgcccgcuucuacuucuacaccagcaagacgaccguggccucccugaucaacacccucaacgaccugaacgagacccuggucacgaugccgcucggguacgugacccacggccugaaccuggaggaggcggcccgguacaugcgcagccucaaggugcccgccaccgucuccgugagcucccccgacgccgugaccgccuacaacggguaccugacgagcuccagcaagacccccgaggagcacuucaucgagaccaucucccuggcgggcagcuacaaggacuggagcuacuccggccagagcacccagcucgggaucgaguuccugaagcggggcgacaaguccgucuacuacacgagcaacccgaccaccuuccaccuggacggggaggugaucaccuucgacaaccucaagacgcugcugucccuccgcgaggugcggaccaucaaggucuucaccaccguggacaacaucaaccugcacacgcagguggucgacaugagcaugaccuacggccagcaguucggccccaccuaccuggacggggccgacgugaccaagaucaagccccacaacucccacgagggcaagacguucuacgugcucccgaacgacgacacccugcgcgucgaggccuucgaguacuaccacaccaccgaccccagcuuccuggggcgguacauguccgcccucaaccacacgaagaaguggaaguacccccaggugaacggccugaccagcaucaagugggccgacaacaacugcuaccuggcgaccgcccuccugacccugcagcagaucgagcucaaguucaaccccccggcccugcaggacgccuacuaccgcgcgcgggccggggaggccgccaacuucugcgcccugauccucgcguacugcaacaagacggugggcgagcugggcgacguccgcgagaccauguccuaccuguuccagcacgccaaccucgacagcugcaagcgggugcugaacgucgugugcaagaccugcgggcagcagcagaccacccugaagggcguggaggccgucauguacauggggacgcucuccuacgagcaguucaagaagggcgugcagauccccugcaccugcgggaagcaggccaccaaguaccuggugcagcaggagagccccuucgucaugauguccgcccccccggcgcaguacgagcugaagcacggcaccuucacgugcgccagcguguacaccggcaacuaccagugcgggcacuacaagcacaucaccuccaaggagacccucuacugcaucgacggcgcccugcugacgaagagcagcgaguacaaggggcccaucaccgacguguucuacaaggagaacuccuacaccaccacgaucaagcccgucaccuacaagcucgacggcguggugugcaccgagaucgaccccaagcuggacaacuacuacaagaaggacaacagcuacuucaccgagcagccgaucgaccugguccccaaccagcccuaccccaacgccuccuucgacaacuucaaguucgugugcgacaacaucaaguucgccgacgaccucaaccagcugacgggguacaagaagccggcgagccgcgagcugaaggugaccuucuuccccgaccucaacggcgacgucguggccaucgacuacaagcacuacacccccuccuucaagaagggcgccaagcugcugcacaagcccaucguguggcacgucaacaacgccaccaacaaggcgacguacaagccgaacaccuggugcauccggugccucuggagcaccaagcccguggagaccuccaacagcuucgacgugcugaaguccgaggacgcccaggggauggacaaccuggccugcgaggaccucaagcccgucagcgaggaggugguggagaaccccacgauccagaaggacguccuggagugcaacgugaagaccaccgagguggucggcgacaucauccugaagccggccaacaacucccucaagaucaccgaggagguggggcacacggaccugauggccgcguacguggacaacagcucccugaccaucaagaagcccaacgagcucagccgcguccugggccugaagacccucgccacccacgggcuggccgccgugaacuccgugcccugggacacgaucgccaacuacgcgaagccguuccugaacaaggucgugagcaccaccaccaacaucgugacgcgcugccucaaccgggucugcaccaacuacaugcccuacuucuucacccugcugcuccagcugugcaccuucacccgcuccacgaacagccggaucaaggccuccaugcccaccaccaucgccaagaacaccgugaagagcgugggcaaguucugccuggaggccagcuucaacuaccucaagucccccaacuucagcaagcugaucaacaucaucaucugguuccugcuccuguccgucugccugggcagccucaucuacuccacggccgcgcugggggugcugaugagcaaccucggcaugccguccuacugcaccggguaccgcgagggcuaccugaacagcaccaacgugaccaucgccacguacugcaccggcuccauccccugcagcgucugccuguccgggcucgacagccuggacaccuaccccucccuggagaccauccagaucacgaucagcuccuucaagugggaccucaccgccuucggccugguggccgagugguuccuggccuacauccucuucacccgguucuucuacgugcuggggcuggcggccaucaugcagcucuucuucagcuacuucgccguccacuucaucuccaacagcuggcugauguggcugaucaucaaccuggugcagauggcccccaucuccgcgauggugcgcauguacaucuucuucgccagcuucuacuacgucuggaagagcuacgugcacguggucgacggcugcaacuccagcaccugcaugaugugcuacaagcggaaccgcgccacgcggguggagugcaccaccaucgucaacggggugcgccgguccuucuacguguacgccaacggcggcaagggguucugcaagcuccacaacuggaacugcgucaacugcgacaccuucugcgccggcagcacguucaucuccgacgagguggcgcgcgaccugagccugcaguucaagcggccgaucaaccccaccgaccaguccagcuacaucguggacuccgucaccgugaagaacgggagcauccaccucuacuucgacaaggccggccagaagaccuacgagcgccacucccugagccacuucgugaaccuggacaaccuccgggccaacaacacgaaggggucccugcccaucaacgucaucguguucgacggcaagagcaagugcgaggaguccagcgccaaguccgccagcguguacuacucccagcugaugugccagcccauccuccugcuggaccaggcgcucgucagcgacgugggcgacagcgccgagguggccgucaagauguucgacgccuacgugaacaccuucuccagcaccuucaacgugccgauggagaagcugaagacccuggucgccacggcggaggccgagcucgccaagaacgugucccuggacaacgugcugagcaccuucaucuccgccgcgcgccagggguucgucgacagcgacguggagaccaaggacguggucgagugccucaagcugucccaccagagcgacaucgaggugaccggcgacuccugcaacaacuacaugcugacguacaacaagguggagaacaugaccccccgggaccucggggccugcaucgacugcagcgcccgccacaucaacgcccaggucgccaagucccacaacaucgcgcugaucuggaacgugaaggacuucaugagccuguccgagcagcuccggaagcagauccgcagcgccgccaagaagaacaaccugcccuucaagcugaccugcgccaccacgcgccagguggucaacguggugaccaccaagaucgcccucaagggcgggugaggacuagucccuguucccagagcccacuuuuuuuucuuuuuuugaaauaaaauagccugucuuucagaucucaaaggcucuuuucagagccaccaaaaaaaaaaaaaaaaaaaaaaaaaaaaaaaaaaaaaaaaaaaaaaaaaaaaaaaaaaaaaaaaaaaaaaaaaaaaaaaaaaaaaaaaaaaaaaaaaaaaa

SEQ ID NO: 19707 - RNA, 6113 nt, Artificial Sequence
  SARS-CoV-2__MT810493.1__non-structural protein 3 (NSP3) mRNA gc
aggagagucccgcagucggcguccagcggcucugcuuguucgugugugugucguugcaggccuuauucaagcuuaccauggcccccaccaaggugaccuucggcgacgacacggucaucgaggugcagggguacaagagcgugaacaucaccuucgagcuggacgagcgcaucgacaagguccucaacgagaagugcuccgccuacaccguggagcugggcaccgaggugaacgaguucgcgugcgucguggccgacgccgugaucaagacgcugcagccggucagcgagcuccugaccccccuggggaucgaccucgacgagugguccauggccaccuacuaccuguucgacgagagcggcgaguucaagcuggccucccacauguacugcagcuucuacccccccgacgaggacgaggaggagggggacugcgaggaggaggaguucgagccguccacccaguacgaguacggcacggaggacgacuaccagggcaagccccucgaguucggggcgaccagcgccgcccugcagcccgaggaggagcaggaggaggacuggcuggacgacgacucccagcagaccgugggccagcaggacgggagcgaggacaaccagaccacgaccauccagaccaucguggagguccagccccagcucgagauggagcugaccccgguggugcagacgaucgaggucaacuccuucagcggcuaccugaagcucaccgacaacguguacaucaagaacgccgacaucguggaggaggcgaagaaggucaagcccaccgugguggucaacgccgccaacguguaccugaagcacgggggcggcguggccgggacccugaacaaggccacgaacaacgcgaugcaggucgaguccgacgacuacaucgccaccaacggcccccucaagguggggggcagcugcguccuguccggccacaaccuggccaagcacugccuccacgugguggggcccaacgucaacaagggcgaggacauccagcugcugaagagcgccuacgagaacuucaaccagcacgaggugcuccuggccccgcugcucuccgcggggaucuucggcgccgaccccauccacagccugcgggugugcgucgacaccgugcgcaccaacguguaccuggccgucuucgacaagaaccucuacgacaagcugguguccagcuuccuggagaugaagagcgagaagcagguggagcagaagaucgccgagauccccaaggaggaggucaagcccuucaucacggaguccaagccgagcguggagcagcggaagcaggacgacaagaagaucaaggccugcguggaggaggucaccaccacccucgaggagacgaaguuccugaccgagaaccugcuccuguacaucgacaucaacgggaaccugcaccccgacuccgcgacccucgugagcgacaucgacaucaccuuccugaagaaggacgcccccuacaucgugggcgacgucgugcaggagggcgugcugacggccgucgugauccccaccaagaaggccgggggcaccaccgagaugcucgccaaggcgcugcgcaaggugccgacggacaacuacaucaccaccuaccccgggcagggccugaacggguacaccgucgaggaggccaagaccgugcucaagaagugcaaguccgccuucuacauccugcccagcaucaucuccaacgagaagcaggagauccugggcacggugagcuggaaccuccgggagaugcuggcccacgcggaggagacccgcaagcugaugcccgucugcguggagaccaaggccaucguguccaccauccagcggaaguacaagggcaucaagauccaggagggggucguggacuacggcgcccgcuucuacuucuacacgagcaagaccaccguggccucccugaucaacacccucaacgaccugaacgagacgcuggucaccaugccgcucggguacgugacccacggccugaaccuggaggaggccgcgcgguacaugcgcagccucaaggugcccgccaccgucuccgugagcucccccgacgccgugacggccuacaacggguaccugaccagcuccagcaagacccccgaggagcacuucaucgagaccaucucccuggccggcagcuacaaggacuggagcuacuccggccagagcacgcagcucgggaucgaguuccugaagcggggcgacaaguccgucuacuacaccagcaacccgaccaccuuccaccuggacggggaggugaucacguucgacaaccucaagacccugcugucccuccgcgaggugcggaccaucaaggucuucaccacgguggacaacaucaaccugcacacccagguggucgacaugagcaugaccuacggccagcaguucggccccaccuaccuggacggggcggacgugacgaagaucaagccccacaacucccacgagggcaagaccuucuacgugcucccgaacgacgacacccugcgcgucgaggccuucgaguacuaccacaccacggaccccagcuuccuggggcgguacauguccgcccucaaccacaccaagaaguggaaguacccccaggugaacggccugaccagcaucaagugggccgacaacaacugcuaccuggccaccgcgcuccugacgcugcagcagaucgagcucaaguucaaccccccggcccugcaggacgccuacuaccgcgcccgggcgggggaggccgccaacuucugcgcccugauccucgccuacugcaacaagaccgugggcgagcugggcgacguccgcgagaccauguccuaccuguuccagcacgcgaaccucgacagcugcaagcgggugcugaacgucgugugcaagaccugcgggcagcagcagaccacgcugaagggcguggaggccgucauguacauggggacccucuccuacgagcaguucaagaagggcgugcagauccccugcaccugcgggaagcaggccaccaaguaccuggugcagcaggagagccccuucgucaugauguccgcccccccggcccaguacgagcugaagcacggcacguucaccugcgcgagcgaguacaccggcaacuaccagugcgggcacuacaagcacaucaccuccaaggagacgcucuacugcaucgacggcgcccugcugaccaagagcagcgaguacaaggggcccaucaccgacguguucuacaaggagaacuccuacaccacgaccaucaagcccgugaccuacaagcucgacggcgucgugugcaccgagaucgaccccaagcuggacaacuacuacaagaaggacaacagcuacuucacggagcagccgaucgaccuggugcccaaccagcccuaccccaacgccuccuucgacaacuucaaguucgucugcgacaacaucaaguucgccgacgaccucaaccagcugaccggguacaagaagccggccagccgcgagcugaaggugaccuucuuccccgaccucaacggcgacguggucgcgaucgacuacaagcacuacacccccuccuucaagaagggcgccaagcugcugcacaagcccaucguguggcacgugaacaacgccacgaacaaggccaccuacaagccgaacaccuggugcauccggugccucuggagcaccaagcccgucgagacguccaacagcuucggggugcugaaguccgaggacgcgcagggcauggacaaccuggccugcgaggaccucaagcccgugagcgaggaggucguggagaaccccaccauccagaaggacgugcuggagugcaacgucaagaccaccgagguggugggggacaucauccugaagccggccaacaacucccucaagaucacggaggaggucggccacaccgaccugauggccgccuacguggacaacagcucccugaccaucaagaagcccaacgagcucagccgcgugcuggggcugaagacccucgcgacgcacggccuggccgccgucaacuccgugcccugggacaccaucgccaacuacgccaagccguuccugaacaagguggucagcaccaccacgaacaucgugacccgcugccucaaccgggugugcaccaacuacaugcccuacuucuucacccugcugcuccagcugugcaccuucacgcgcuccaccaacagccggaucaaggcguccaugcccaccaccaucgccaagaacacggucaagagcgugggcaaguucugccuggaggccagcuucaacuaccucaagucccccaacuucagcaagcugaucaacaucaucaucugguuccugcuccuguccgugugccuggggagccucaucuacuccaccgccgcccugggcguccugaugagcaaccucgggaugccguccuacugcaccggcuaccgcgagggcuaccugaacagcaccaacgugacgaucgcgaccuacugcaccggguccauccccugcagcgugugccuguccggccucgacagccuggacaccuaccccucccuggagacgauccagaucaccaucagcuccuucaagugggaccucaccgccuucgggcuggucgccgagugguuccuggccuacauccucuucacccgguucuucuacgugcugggccuggccgcgaucaugcagcucuucuucagcuacuucgccgugcacuucaucuccaacagcuggcugauguggcugaucaucaaccugguccagauggcccccaucuccgccauggugcgcauguacaucuucuucgcgagcuucuacuacguguggaagagcuacguccacgugguggacgggugcaacuccagcacgugcaugaugugcuacaagcggaaccgcgccacccgggucgagugcaccaccaucgugaacggcguccgccgguccuucuacguguacgccaacggcgggaagggcuucugcaagcuccacaacuggaacugcgugaacugcgacacguucugcgccgggagcaccuucaucuccgacgaggucgcccgcgaccugagccugcaguucaagcggccgaucaaccccaccgaccaguccagcuacaucguggacuccgugaccgucaagaacggcagcauccaccucuacuucgacaaggcggggcagaagacguacgagcgccacucccugagccacuucgugaaccuggacaaccuccgggccaacaacaccaagggcucccugcccaucaacgugaucgucuucgacggcaagagcaagugcgaggaguccagcgccaaguccgccagcguguacuacucccagcugaugugccagcccauccuccugcuggaccaggcccucgugagcgacgucggggacagcgcggagguggccgugaagauguucgacgccuacgucaacaccuucuccagcaccuucaacgugccgauggagaagcugaagacgcugguggccaccgccgaggcggagcucgccaagaacgucucccuggacaacgugcugagcaccuucaucuccgccgcccgccagggcuucguggacagcgacgucgagaccaaggacgugguggagugccucaagcugucccaccagagcgacaucgaggucacgggggacuccugcaacaacuacaugcugaccuacaacaagguggagaacaugaccccccgggaccucggcgcgugcaucgacugcagcgcccgccacaucaacgcccagguggccaagucccacaacaucgcccugaucuggaacgucaaggacuucaugagccuguccgagcagcuccggaagcagauccgcagcgcggccaagaagaacaaccugcccuucaagcugaccugcgccacgacccgccagguggugaacgucgugaccaccaagaucgcccucaaggggggcugaggacuagucccuguucccagagcccacuuuuuuuucuuuuuuugaaauaaaauagccugucuuucagaucucaaaggcucuuuucagagccaccaaaaaaaaaaaaaaaaaaaaaaaaaaaaaaaaaaaaaaaaaaaaaaaaaaaaaaaaaaaaaaaaaaaaaaaaaaaaaaaaaaaaaaaaaaaaaaaaaaaaa

SEQ ID NO: 19708 - RNA, 6113 nt, Artificial Sequence
  SARS-CoV-2__MT810511.1__non-structural protein 3 (NSP3) mRNA gc
aggagagucccgcagucggcguccagcggcucugcuuguucgugugugugucguugcaggccuuauucaagcuuaccauggcccccaccaaggugaccuucggcgacgacacggucaucgaggugcagggguacaagagcgugaacaucaccuucgagcuggacgagcgcaucgacaagguccucaacgagaagugcuccgccuacaccguggagcugggcaccgaggugaacgaguucgcgugcgucguggccgacgccgugaucaagacgcugcagccggucagcgagcuccugaccccccuggggaucgaccucgacgagugguccauggccaccuacuaccuguucgacgagagcggcgaguucaagcuggccucccacauguacugcagcuucuacccccccgacgaggacgaggaggagggggacugcgaggaggaggaguucgagccguccacccaguacgaguacggcacggaggacgacuaccagggcaagccccucgaguucggggcgaccagcgccgcccugcagcccgaggaggagcaggaggaggacuggcuggacgacgacucccagcagaccgugggccagcaggacgggagcgaggacaaccagaccacgaccauccagaccaucguggagguccagccccagcucgagauggagcugaccccgguggugcagacgaucgaggucaacuccuucagcggcuaccugaagcucaccgacaacguguacaucaagaacgccgacaucguggaggaggcgaagaaggucaagcccaccgugguggucaacgccgccaacguguaccugaagcacgggggcggcguggccggggcccugaacaaggcgaccaacaacgccaugcaggucgaguccgacgacuacaucgccacgaacggcccccucaagguggggggcagcugcguccuguccggccacaaccuggccaagcacugccuccacgugguggggcccaacgucaacaagggcgaggacauccagcugcugaagagcgccuacgagaacuucaaccagcacgaggugcuccuggcgccgcugcucuccgccgggaucuucggcgccgaccccauccacagccugcgggugugcgucgacaccgugcgcaccaacguguaccuggccgucuucgacaagaaccucuacgacaagcugguguccagcuuccuggagaugaagagcgagaagcagguggagcagaagaucgccgagauccccaaggaggaggucaagcccuucaucaccgaguccaagccgagcguggagcagcggaagcaggacgacaagaagaucaaggcgugcguggaggaggucacgaccacccucgaggagaccaaguuccugacggagaaccugcuccuguacaucgacaucaacgggaaccugcaccccgacuccgccacccucgugagcgacaucgacaucaccuuccugaagaaggacgcccccuacaucgugggcgacgucgugcaggagggcgugcugaccgccgucgugauccccacgaagaaggccgggggcaccaccgagaugcucgcgaaggcccugcgcaaggugccgaccgacaacuacaucacgaccuaccccgggcagggccugaacggguacaccgucgaggaggccaagaccgugcucaagaagugcaaguccgccuucuacauccugcccagcaucaucuccaacgagaagcaggagauccugggcaccgugagcuggaaccuccgggagaugcuggcgcacgccgaggagacgcgcaagcugaugcccgucugcguggagaccaaggccaucguguccaccauccagcggaaguacaagggcaucaagauccaggagggggucguggacuacggcgcccgcuucuacuucuacaccagcaagacgaccguggccucccugaucaacacccucaacgaccugaacgagacccuggucacgaugccgcucggguacgugacccacggccugaaccuggaggaggcggcccgguacaugcgcagccucaaggugcccgccaccgucuccgugagcucccccgacgccgugaccgccuacaacggguaccugacgagcuccagcaagacccccgaggagcacuucaucgagaccaucucccuggcgggcagcuacaaggacuggagcuacuccggccagagcacccagcucgggaucgaguuccugaagcggggcgacaaguccgucuacuacacgagcaacccgaccaccuuccaccuguacggggaggugaucaccuucgacaaccucaagacgcugcugucccuccgcgaggugcggaccaucaaggucuucaccaccguggacaacaucaaccugcacacgcagguggucgacaugagcaugaccuacggccagcaguucggccccaccuaccuggacggggccgacgugaccaagaucaagccccacaacucccacgagggcaagacguucuacgugcucccgaacgacgacacccugcgcgucgaggccuucgaguacuaccacaccaccgaccccagcuuccuggggcgguacaucuccgcccucaaccacacgaagaaguggaaguacccccaggugaacggccugaccagcaucaagugggccgacaacaacugcuaccuggcgaccgcccuccugacccugcagcagaucgagcucaaguucaaccccccggcccugcaggacgccuacuaccgcgcgcgggccggggaggccgccaacuucugcgcccugauccucgcguacugcaacaagacggugggcgagcugggcgacguccgcgagaccauguccuaccuguuccagcacgccaaccucgacagcugcaagcgggugcugaacgucgugugcaagaccugcgggcagcagcagaccacccugaagggcguggaggccgucauguacauggggacgcucuccuacgagcaguucaagaagggcgugcagauccccugcaccugcgggaagcaggccaccaaguaccuggugcagcaggagagccccuucgucaugauguccgcccccccggcgcaguacgagcugaagcacggcaccuucacgugcgccagcgaguacaccggcaacuaccagugcgggcacuacaagcacaucaccuccaaggagacccucuacugcaucgacggcgcccugcugacgaagagcagcgaguacaaggggcccaucaccgacguguucuacaaggagaacuccuacaccaccacgaucaagcccgugaccuacaagcucgacggcgucgugugcaccgagaucgaccccaagcuggacaacuacuacaagaaggacaacagcuacuucaccgagcagccgaucgaccuggugcccaaccagcccuaccccaacgccuccuucgacaacuucaaguucgucugcgacaacaucaaguucgccgacgaccucaaccagcugacgggguacaagaagccggcgagccgcgagcugaaggugaccuucuuccccgaccucaacggcgacguggucgccaucgacuacaagcacuacacccccuccuucaagaagggcgccaagcugcugcacaagcccaucguguggcacgugaacaacgccaccaacaaggcgacguacaagccgaacaccuggugcauccggugccucuggagcaccaagcccgucgagaccuccaacagcuucgacgugcugaaguccgaggacgcccaggggauggacaaccuggccugcgaggaccucaagcccgugagcgaggaggucguggagaaccccacgauccagaaggacgugcuggagugcaacgucaagaccaccgagguggugggcgacaucauccugaagccggccaacaacucccucaagaucaccgaggaggucgggcacacggaccugauggccgcguacguggacaacagcucccugaccaucaagaagcccaacgagcucagccgcgugcugggccugaagacccucgccacccacgggcuggccgccgucaacuccgugcccugggacacgaucgccaacuacgcgaagccguuccugaacaagguggucagcaccaccaccaacaucgugacgcgcugccucaaccgggugugcaccaacuacaugcccuacuucuucacccugcugcuccagcugugcaccuucacccgcuccacgaacagccggaucaaggccuccaugcccaccaccaucgccaagaacaccgucaagagcgugggcaaguucugccuggaggccagcuucaacuaccucaagucccccaacuucagcaagcugaucaacaucaucaucugguuccugcuccuguccgugugccugggcagccucaucuacuccacggccgcgcuggggguccugaugagcaaccucggcaugccguccuacugcaccggguaccgcgagggcuaccugaacagcaccaacgugaccaucgccacguacugcaccggcuccauccccugcagcgugugccuguccgggcucgacagccuggacaccuaccccucccuggagaccauccagaucacgaucagcuccuucaagugggaccucaccgccuucggccuggucgccgagugguuccuggccuacauccucuucacccgguucuucuacgugcuggggcuggcggccaucaugcagcucuucuucagcuacuucgccgugcacuucaucuccaacagcuggcugauguggcugaucaucaaccugguccagauggcccccaucuccgcgauggugcgcauguacaucuucuucgccagcuucuacuacguguggaagagcuacguccacgugguggacggcugcaacuccagcaccugcaugaugugcuacaagcggaaccgcgccacgcgggucgagugcaccaccaucgugaacgggguccgccgguccuucuacguguacgccaacggcggcaagggguucugcaagcuccacaacuggaacugcgugaacugcgacaccuucugcgccggcagcacguucaucuccgacgaggucgcgcgcgaccugagccugcaguucaagcggccgaucaaccccaccgaccaguccagcuacaucguggacuccgugaccgucaagaacgggagcauccaccucuacuucgacaaggccggccagaagaccuacgagcgccacucccugagccacuucgugaaccuggacaaccuccgggccaacaacacgaaggggucccugcccaucaacgugaucgucuucgacggcaagagcaagugcgaggaguccagcgccaaguccgccagcguguacuacucccagcugaugugccagcccauccuccugcuggaccaggcgcucgugagcgacgucggcgacagcgccgagguggccgugaagauguucgacgccuacgucaacaccuucuccagcaccuucaacgugccgauggagaagcugaagacccugguggccacggcggaggccgagcucgccaagaacgucucccuggacaacgugcugagcaccuucaucuccgccgcgcgccagggguucguggacagcgacgucgagaccaaggacgugguggagugccucaagcugucccaccagagcgacaucgaggucaccggcgacuccugcaacaacuacaugcugacguacaacaagguggagaacaugaccccccgggaccucggggccugcaucgacugcagcgcccgccacaucaacgcccagguggccaagucccacaacaucgcgcugaucuggaacgucaaggacuucaugagccuguccgagcagcuccggaagcagauccgcagcgccgccaagaagaacaaccugcccuucaagcugaccugcgccaccacgcgccagguggugaacgucgugaccaccaagaucgcccucaagggcgggugaggacuagucccuguucccagagcccacuuuuuuuucuuuuuuugaaauaaaauagccugucuuucagaucucaaaggcucuuuucagagccaccaaaaaaaaaaaaaaaaaaaaaaaaaaaaaaaaaaaaaaaaaaaaaaaaaaaaaaaaaaaaaaaaaaaaaaaaaaaaaaaaaaaaaaaaaaaaaaaaaaaaa

SEQ ID NO: 19709 - RNA, 6113 nt, Artificial Sequence
  SARS-CoV-2__MT810529.1__non-structural protein 3 (NSP3) mRNA gc
aggagagucccgcagucggcguccagcggcucugcuuguucgugugugugucguugcaggccuuauucaagcuuaccauggcccccaccaaggugaccuucggcgacgacacggucaucgaggugcagggguacaagagcgugaacaucaccuucgagcuggacgagcgcaucgacaagguccucaacgagaagugcuccgccuacaccguggagcugggcaccgaggugaacgaguucgcgugcgucguggccgacgccgugaucaagacgcugcagccggucagcgagcuccugaccccccuggggaucgaccucgacgagugguccauggccaccuacuaccuguucgacgagagcggcgaguucaagcuggccucccacauguacugcagcuucuacccccccgacgaggacgaggaggagggggacugcgaggaggaggaguucgagccguccacccaguacgaguacggcacggaggacgacuaccagggcaagccccucgaguucggggcgaccagcgccgcccugcagcccgaggaggagcaggaggaggacuggcuggacgacgacucccagcagaccgugggccagcaggacgggagcgaggacaaccagaccacgaccauccagaccaucguggagguccagccccagcucgagauggagcugaccccgguggugcagacgaucgaggucaacuccuucagcggcuaccugaagcucaccgacaacguguacaucaagaacgccgacaucguggaggaggcgaagaaggucaagcccaccgugguggucaacgccgccaacguguaccugaagcacgggggcggcguggccggggcccugaacaaggcgaccaacaacgccaugcaggucgaguccgacgacuacaucgccacgaacggcccccucaagguggggggcagcugcguccuguccggccacaaccuggccaagcacugccuccacgugguggggcccaacgucaacaagggcgaggacauccagcugcugaagagcgccuacgagaacuucaaccagcacgaggugcuccuggcgccgcugcucuccgccgggaucuucggcgccgaccccauccacagccugcgggugugcgucgacaccgugcgcaccaacguguaccuggccgucuucgacaagaaccucuacgacaagcugguguccagcuuccuggagaugaagagcgagaagcagguggagcagaagaucgccgagauccccaaggaggaggucaagcccuucaucaccgaguccaagccgagcguggagcagcggaagcaggacgacaagaagaucaaggcgugcguggaggaggucacgaccacccucgaggagaccaaguuccugacggagaaccugcuccuguacaucgacaucaacgggaaccugcaccccgacuccgccacccucgugagcgacaucgacaucaccuuccugaagaaggacgcccccuacaucgugggcgacgucgugcaggagggcgugcugaccgccgucgugauccccacgaagaaggccgggggcaccaccgagaugcucgcgaaggcccugcgcaaggugccgaccgacaacuacaucacgaccuaccccgggcagggccugaacggguacaccgucgaggaggccaagaccgugcucaagaagugcaaguccgccuucuacauccugcccagcaucaucuccaacgagaagcaggagauccugggcaccgugagcuggaaccuccgggagaugcuggcgcacgccgaggagacgcgcaagcugaugcccgucugcguggagaccaaggccaucguguccaccauccagcggaaguacaagggcaucaagauccaggagggggucguggacuacggcgcccgcuucuacuucuacaccagcaagacgaccguggccucccugaucaacacccucaacgaccugaacgagacccuggucacgaugccgcucggguacgugacccacggccugaaccuggaggaggcggcccgguacaugcgcagccucaaggugcccgccaccgucuccgugagcucccccgacgccgugaccgccuacaacggguaccugacgagcuccagcaagacccccgaggagcacuucaucgagaccaucucccuggcgggcagcuacaaggacuggagcuacuccggccagagcacccagcucgggaucgaguuccugaagcggggcgacaaguccgucuacuacacgagcaacccgaccaccuuccaccuggacggggaggugaucaccuucgacaaccucaagacgcugcugucccuccgcgaggugcggaccaucaaggucuucaccaccguggacaacaucaaccugcacacgcagguggucgacaugagcaugaccuacggccagcaguucggccccaccuaccuggacggggccgacgugaccaagaucaagccccacaacucccacgagggcaagacguucuacgugcucccgaacgacgacacccugcgcgucgaggccuucgaguacuaccacaccaccgaccccagcuuccuggggcgguacauguccgcccucaaccacacgaagaaguggaaguacccccaggugaacggccugaccagcaucaagugggccgacaacaacugcuaccuggcgaccgcccuccugacccugcagcagaucgagcucaaguucaaccccccggcccugcaggacgccuacuaccgcgcgcgggccggggaggccgccaacuucugcgcccugauccucgcguacugcaacaagacggugggcgagcugggcgacguccgcgagaccauguccuaccuguuccagcacgccaaccucgacagcugcaagcgggugcugaacgucgugugcaagaccugcgggcagcagcagaccacccugaagggcguggaggccgucauguacauggggacgcucuccuacgagcaguucaagaagggcgugcagauccccugcaccugcgggaagcaggccaccaaguaccuggugcagcaggagagccccuucgucaugauguccgcccccccggcgcaguacgagcugaagcacggcaccuucacgugcgccagcgaguacaccggcaacuaccagugcgggcacuacaagcacaucaccuccaaggagacccucuacugcaucgacggcgcccugcugacgaagagcagcgaguacaaggggcccaucaccgacguguucuacaaggagaacuccuacaccaccacgaucaagcccgugaccuacaagcucgacggcgucgugugcaccgagaucgaccccaagcuggacaacuacuacaagaaggacaacagcuacuucaccgagcagccgaucgaccuggugcccaaccagcccuaccccaacgccuccuucgacaacuucaaguucgucugcgacaacaucaaguucgccgacgaccucaaccagcugacgggguacaagaagccggcgagccgcgagcugaaggugaccuucuuccccgaccucaacggcgacguggucgccaucgacuacaagcacuacacccccuccuucaagaagggcgccaagcugcugcacaagcccaucguguggcacgugaacaacgccaccaacaaggcgacguacaagccgaacaccuggugcauccggugccucuggagcaccaagcccgucgagaccuccaacagcuucgacgugcugaaguccgaggacgcccaggggauggacaaccuggccugcgaggaccucaagcccgugagcgaggaggucguggagaaccccacgauccagaaggacgugcuggagugcaacgucaagaccaccgagguggugggcgacaucauccugaagccggccaacaacucccucaagaucaccgaggaggucgggcacacggaccugauggccgcguacguggacaacagcucccugaccaucaagaagcccaacgagcucagccgcgugcugggccugaagacccucgccacccacgggcuggccgccgucaacuccgugcccugggacacgaucgccaacuacgcgaagccguuccugaacaagguggucagcaccaccaccaacaucgugacgcgcugccucaaccgggugugcaccaacuacaugcccuacuucuucacccugcugcuccagcugugcaccuucacccgcuccacgaacagccggaucaaggccuccaugcccaccaccaucgccaagaacaccgucaagagcgugggcaaguucugccuggaggccagcuucaacuaccucaagucccccaacuucagcaagcugaucaacaucaucaucugguuccugcuccuguccgugugccugggcagccucaucuacuccacggccgcgcuggggguccugaugagcaaccucggcaugccguccuacugcaccggguaccgcgagggcuaccugaacagcaccaacgugaccaucgccacguacugcaccggcuccauccccugcagcgugugccuguccgggcucgacagccuggacaccuaccccucccuggagaccauccagaucacgaucagcuccuucaagugggaccucaccgccuucggccuggucgccgagugguuccuggccuacauccucuucacccgguucuucuacgugcuggggcuggcggccaucaugcagcucuucuucagcuacuucgccgugcacuucaucuccaacagcuggcugauguggcugaucaucaaccugguccagauggcccccaucuccgcgauggugcgcauguacaucuucuucgccagcuucuacuacguguggaagagcuacguccacgugguggacggcugcaacuccagcaccugcaugaugugcuacaagcggaaccgcgccacgcgggucgagugcaccaccaucgugaacgggguccgccgguccuucuacguguacgccaacggcggcaagggguucugcaagcuccacaacuggaacugcgugaacugcgacaccuucugcgccggcagcacguucaucuccgacgaggucgcgcgcgaccugagccugcaguucaagcggccgaucaaccccaccgaccaguccagcuacaucguggacuccgugaccgucaagaacgggagcauccaccucuacuucgacaaggccggccagaagaccuacgagcgccacucccugagccacuucgugaaccuggacaaccuccgggccaacaacacgaaggggucccugcccaucaacgugaucgucuucgacggcaagagcaagugcgaggaguccagcgccaagcuggccuccguguacuacagccagcucaugugccagcccauccugcugcucgaccaggcgcugguguccgacgucggcgacagcgccgagguggccgugaagauguucgacgccuacgucaacaccuucagcuccaccuucaacgugccgauggagaagcugaagacccucguggccacggcggaggccgagcuggccaagaacgucagccuggacaacgugcucuccaccuucaucagcgccgcgcgccagggguucguggacuccgacgucgagaccaaggacgugguggagugccugaagcugagccaccaguccgacaucgaggucaccggcgacagcugcaacaacuacaugcucacguacaacaagguggagaacaugaccccccgggaccugggggccugcaucgacugcuccgcccgccacaucaacgcccagguggccaagagccacaacaucgcgcugaucuggaacgucaaggacuucaugucccucagcgagcagcugcggaagcagauccgcuccgccgccaagaagaacaaccugcccuucaagcucaccugcgccaccacgcgccagguggugaacgucgugaccaccaagaucgcccugaagggcgggugaggacuagucccuguucccagagcccacuuuuuuuucuuuuuuugaaauaaaauagccugucuuucagaucucaaaggcucuuuucagagccaccaaaaaaaaaaaaaaaaaaaaaaaaaaaaaaaaaaaaaaaaaaaaaaaaaaaaaaaaaaaaaaaaaaaaaaaaaaaaaaaaaaaaaaaaaaaaaaaaaaaaa

SEQ ID NO: 19710 - RNA, 6113 nt, Artificial Sequence
  SARS-CoV-2__MT810532.1__non-structural protein 3 (NSP3) mRNA gc
aggagagucccgcagucggcguccagcggcucugcuuguucgugugugugucguugcaggccuuauucaagcuuaccauggcccccaccaaggugaccuucggcgacgacacggucaucgaggugcagggguacaagagcgugaacaucaccuucgagcuggacgagcgcaucgacaagguccucaacgagaagugcuccgccuacaccguggagcugggcaccgaggugaacgaguucgcgugcgucguggccgacgccgugaucaagacgcugcagccggucagcgagcuccugaccccccuggggaucgaccucgacgagugguccauggccaccuacuaccuguucgacgagagcggcgaguucaagcuggccucccacauguacugcagcuucuacccccccgacgaggacgaggaggagggggacugcgaggaggaggaguucgagccguccacccaguacgaguacggcacggaggacgacuaccagggcaagccccucgaguucggggcgaccagcgccgcccugcagcccgaggaggagcaggaggaggacuggcuggacgacgacucccagcagaccgugggccagcaggacgggagcgaggacaaccagaccacgaccauccagaccaucguggagguccagccccagcucgagauggagcugaccccgguggugcagacgaucgaggucaacuccuucagcggcuaccugaagcucaccgacaacguguacaucaagaacgccgacaucguggaggaggcgaagaaggucaagcccaccgugguggucaacgccgccaacguguaccugaagcacgggggcggcguggccggggcccugaacaaggcgaccaacaacgccaugcaggucgaguccgacgacuacaucgccacgaacggcccccucaagguggggggcagcugcguccuguccggccacaaccuggccaagcacugccuccacgugguggggcccaacgucaacaagggcgaggacauccagcugcugaagagcgccuacgagaacuucaaccagcacgaggugcuccuggcgccgcugcucuccgccgggaucuucggcgccgaccccauccacagccugcgggugugcgucgacaccgugcgcaccaacguguaccuggccgucuucgacaagaaccucuacgacaagcugguguccagcuuccuggagaugaagagcgagaagcagguggagcagaagaucgccgagauccccaaggaggaggucaagcccuucaucaccgaguccaagccgagcguggagcagcggaagcaggacgacaagaagaucaaggcgugcguggaggaggucacgaccacccucgaggagaccaaguuccugacggagaaccugcuccuguacaucgacaucaacgggaaccugcaccccgacuccgccacccucgugagcgacaucgacaucaccuuccugaagaaggacgcccccuacaucgugggcgacgucgugcaggagggcgugcugaccgccgucgugauccccacgaagaaggccgggggcaccaccgagaugcucgcgaaggcccugcgcaaggugccgaccgacaacuacaucacgaccuaccccgggcagggccugaacggguacaccgucgaggaggccaagaccgugcucaagaagugcaaguccgccuucuacauccugcccagcaucaucuccaacgagaagcaggagauccugggcaccgugagcuggaaccuccgggagaugcuggcgcacgccgaggagacgcgcaagcugaugcccgucugcguggagaccaaggccaucguguccaccauccagcggaaguacaagggcaucaagauccaggagggggucguggacuacggcgcccgcuucuacuucuacaccagcaagacgaccguggccucccugaucaacacccucaacgaccugaacgagacccuggucacgaugccgcucggguacgugacccacggccugaaccuggaggaggcggcccgguacaugcgcagccucaaggugcccgccaccgucuccgugagcucccccgacgccgugaccgccuacaacggguaccugacgagcuccagcaagacccccgaggagcacuucaucgagaccaucucccuggcgggcagcuacaaggacuggagcuacuccggccagagcacccagcucgggaucgaguuccugaagcggggcgacaaguccgucuacuacacgagcaacccgaccaccuuccaccuggacggggaggugaucaccuucgacaaccucaagacgcugcugucccuccgcgaggugcggaccaucaaggucuucaccaccguggacaacaucaaccugcacacgcagguggucgacaugagcaugaccuacggccagcaguucggccccaccuaccuggacggggccgacgugaccaagaucaagccccacaacucccacgagggcaagacguucuacgugcucccgaacgacgacacccugcgcgucgaggccuucgaguacuaccacaccaccgaccccagcuuccuggggcgguacauguccgcccucaaccacacgaagaaguggaaguacccccaggugaacggccugaccagcaucaagugggccgacaacaacugcuaccuggcgaccgcccuccugacccugcagcagaucgagcucaaguucaaccccccggcccugcaggacgccuacuaccgcgcgcgggccggggaggccgccaacuucugcgcccugauccucgcguacugcaacaagacggugggcgagcugggcgacguccgcgagaccauguccuaccuguuccagcacgccaaccucgacagcugcaagcgggugcugaacgucgugugcaagaccugcgggcagcagcagaccacccugaagggcguggaggccgucauguacauggggacgcucuccuacgagcaguucaagaagggcgugcagauccccugcaccugcgggaagcaggccaccaaguaccuggugcagcaggagagccccuucgucaugauguccgcccccccggcgcaguacgagcugaagcacggcaccuucacgugcgccagcgaguacaccggcaacuaccagugcgggcacuacaagcacaucaccuccaaggagacccucuacugcaucgacggcgcccugcugacgaagagcagcgaguacaaggggcccaucaccgacguguucuacaaggagaacuccuacaccaccacgaucaagcccgugaccuacaagcucgacggcgucgugugcaccgagaucgaccccaagcuggacaacuacuacaagaaggacaacagcuacuucaccgagcagccgaucgaccuggugcccaaccagcccuaccccaacgccuccuucgacaacuucaaguucgucugcgacaacaucaaguucgccgacgaccucaaccagcugacgggguacaagaagccggcgagccgcgagcugaaggugaccuucuuccccgaccucaacggcgacguggucgccaucgacuacaagcacuacacccccuccuucaagaagggcgccaagcugcugcacaagcccaucguguggcacgugaacaacgccaccaacaaggcgacguacaagccgaacaccuggugcauccggugccucuggagcaccaagcccgucgagaccuccaacagcuucgacgugcugaaguccgaggacgcccaggggauggacaaccuggccugcgaggaccucaagcccgugagcgaggaggucguggagaaccccacgauccagaaggacgugcuggagugcaacgucaagaccaccgagguggugggcgacaucauccugaagccggccaacaacucccucaagaucaccgaggaggucgggcacacggaccugauggccgcguacguggacaacagcucccugaccaucaagaagcccaacgagcucagccgcgugcugggccugaagacccucgccacccacgggcuggccgccgucaacuccgugcccugggacacgaucgccaacuacgcgaagccguuccugaacaagguggucagcaccaccaccaacaucgugacgcgcugccucaaccgggugugcaccaacuacaugcccuacuucuucacccugcugcuccagcugugcaccuucacccgcuccacgaacagccggaucaaggccuccaugcccaccaccaucgccaagaacaccgucaagagcgugggcaaguucugccuggaggccagcuucaacuaccucaagucccccaacuucagcaagcugaucaacaucaucaucugguuccugcuccuguccgugugccugggcagccucaucuacuccacggccgcgcuggggguccugaugagcaaccucggcaugccguccuacugcaccggguaccgcgagggcuaccugaacagcaccaacgugaccaucgccacguacugcaccggcuccauccccugcagcgugugccuguccgggcucgacagccuggacaccuaccccucccuggagaccauccagaucacgaucagcuccuucaagugggaccucaccgccuucggccuggucgccgagugguuccuggccuacauccucuucacccgguucuucuacgugcuggggcuggcggccaucaugcagcucuucuucagcuacuucgccgugcacuucaucuccaacagcuggcugauguggcugaucaucaaccugguccagauggcccccaucuccgcgauggugcgcauguacaucuucuucgccagcuucuacuacguguggaagagcuacguccacgugguggacggcugcaacuccagcaccugcaugaugugcuacaagcggaaccgcgccacgcgggucgagugcaccaccaucgugaacgggguccgccgguccuucuacguguacgccaacggcggcaagggguucugcaagcuccacaacuggaacugcgugaacugcgacaccuucugcgccggcagcacguucaucuccgacgaggucgcgcgcgaccugagccugcaguucaagcggccgaucaaccccaccgaccaguccagcuacaucguggacuccgugaccgucaagaacgggagcauccaccucuacuucgacaaggccggccagaagaccuacgagcgccacucccugagccacuucgugaaccuggacaaccuccgggccaacaacacgaaggggucccugcccaucaacgugaucgucuucgacggcaagagcaagugcgaggaguccagcgccaaguccgccagcguguacuacucccagcugaugugccagcccauccuccugcuggaccaggcgcucgugagcgacgucggcgacagcgccgagguggccgugaagauguucgacgccuacgucaacaccuucuccagcaccuucaacgugccgauggagaagcugaagacccugguggccacggcggaggccgagcucgccaagaacgucucccuggacaacgugcugagcaccuucaucuccgccgcgcgccagggguucguggacagcgacgucgagaccaaggacgugguggagugccucaagcugucccaccagagcgacgucgaggugaccggcgacuccugcaacaacuacaugcugacguacaacaagguggagaacaugaccccccgggaccucggggccugcaucgacugcagcgcccgccacaucaacgcccaggucgccaagucccacaacaucgcgcugaucuggaacgugaaggacuucaugagccuguccgagcagcuccggaagcagauccgcagcgccgccaagaagaacaaccugcccuucaagcugaccugcgccaccacgcgccagguggucaacguggugaccaccaagaucgcccucaagggcgggugaggacuagucccuguucccagagcccacuuuuuuuucuuuuuuugaaauaaaauagccugucuuucagaucucaaaggcucuuuucagagccaccaaaaaaaaaaaaaaaaaaaaaaaaaaaaaaaaaaaaaaaaaaaaaaaaaaaaaaaaaaaaaaaaaaaaaaaaaaaaaaaaaaaaaaaaaaaaaaaaaaaaa

SEQ ID NO: 19711 - RNA, 6113 nt, Artificial Sequence
  SARS-CoV-2__MT810534.1__non-structural protein 3 (NSP3) mRNA gc
aggagagucccgcagucggcguccagcggcucugcuuguucgugugugugucguugcaggccuuauucaagcuuaccauggcccccaccaaggugaccuucggcgacgacacggucaucgaggugcagggguacaagagcgugaacaucaccuucgagcuggacgagcgcaucgacaagguccucaacgagaagugcuccgccuacaccguggagcugggcaccgaggugaacgaguucgcgugcgucguggccgacgccgugaucaagacgcugcagccggucagcgagcuccugaccccccuggggaucgaccucgacgagugguccauggccaccuacuaccuguucgacgagagcggcgaguucaagcuggccucccacauguacugcagcuucuacccccccgacgaggacgaggaggagggggacugcgaggaggaggaguucgagccguccacccaguacgaguacggcacggaggacgacuaccagggcaagccccucgaguucggggcgaccagcgccgcccugcagcccgaggaggagcaggaggaggacuggcuggacgacgacucccagcagaccgugggccagcaggacgggagcgaggacaaccagaccacgaccauccagaccaucguggagguccagccccagcucgagauggagcugaccccgguggugcagacgaucgaggucaacuccuucagcggcuaccugaagcucaccgacaacguguacaucaagaacgccgacaucguggaggaggcgaagaaggucaagcccaccgugguggucaacgccgccaacguguaccugaagcacgggggcggcguggccggggcccugaacaaggcgaccaacaacgccaugcaggucgaguccgacgacuacaucgccacgaacggcccccucaagguggggggcagcugcguccuguccggccacaaccuggccaagcacugccuccacgugguggggcccaacgucaacaagggcgaggacauccagcugcugaagagcgccuacgagaacuucaaccagcacgaggugcuccuggcgccgcugcucuccgccgggaucuucggcgccgaccccauccacagccugcgggugugcgucgacaccgugcgcaccaacguguaccuggccgucuucgacaagaaccucuacgacaagcugguguccagcuuccuggagaugaagagcgagaagcagguggagcagaagaucgccgagauccccaaggaggaggucaagcccuucaucaccgaguccaagccgagcguggagcagcggaagcaggacgacaagaagaucaaggcgugcguggaggaggucacgaccacccucgaggagaccaaguuccugacggagaaccugcuccuguacaucgacaucaacgggaaccugcaccccgacuccgccacccucgugagcgacaucgacaucaccuuccugaagaaggacgcccccuacaucgugggcgacgucgugcaggagggcgugcugaccgccgucgugauccccacgaagaaggccgggggcaccaccgagaugcucgcgaaggcccugcgcaaggugccgaccgacaacuacaucacgaccuaccccgggcagggccugaacggguacaccgucgaggaggccaagaccgugcucaagaagugcaaguccgccuucuacauccugcccagcaucaucuccaacgagaagcaggagauccugggcaccgugagcuggaaccuccgggagaugcuggcgcacgccgaggagacgcgcaagcugaugcccgucugcguggagaccaaggccaucguguccaccauccagcggaaguacaagggcaucaagauccaggagggggucguggacuacggcgcccgcuucuacuucuacaccagcaagacgaccguggccucccugaucaacacccucaacgaccugaacgagacccuggucacgaugccgcucggguacgugacccacggccugaaccuggaggaggcggcccgguacaugcgcagccucaaggugcccgccaccgucuccgugagcucccccgacgccgugaccgccuacaacggguaccugacgagcuccagcaagacccccgaggagcacuucaucgagaccaucucccuggcgggcagcuacaaggacuggagcuacuccggccagagcacccagcucgggaucgaguuccugaagcggggcgacaaguccgucuacuacacgagcaacccgaccaccuuccaccuggacggggaggugaucaccuucgacaaccucaagacgcugcugucccuccgcgaggugcggaccaucaaggucuucaccaccguggacaacaucaaccugcacacgcagguggucgacaugagcaugaccuacggccagcaguucggccccaccuaccuggacggggccgacgugaccaagaucaagccccacaacucccacgagggcaagacguucuacgugcucccgaacgacgacacccugcgcgucgaggccuucgaguacuaccacaccaccgaccccagcuuccuggggcgguacauguccgcccucaaccacacgaagaaguggaaguacccccaggugaacggccugaccagcaucaagugggccgacaacaacugcuaccuggcgaccgcccuccugacccugcagcagaucgagcucaaguucaaccccccggcccugcaggacgccuacuaccgcgcgcgggccggggaggccgccaacuucugcgcccugauccucgcguacugcaacaagacggugggcgagcugggcgacguccgcgagaccauguccuaccuguuccagcacgccaaccucgacagcugcaagcgggugcugaacgucgugugcaagaccugcgggcagcagcagaccacccugaagggcguggaggccgucauguacauggggacgcucuccuacgagcaguucaagaagggcgugcagauccccugcaccugcgggaagcaggccaccaaguaccuggugcagcaggagagccccuucgucaugauguccgcccccccggcgcaguacgagcugaagcacggcaccuucacgugcgccagcgaguacaccggcaacuaccagugcgggcacuacaagcacaucaccuccaaggagacccucuacugcaucgacggcgcccugcugacgaagagcagcgaguacaaggggcccaucaccgacguguucuacaaggagaacuccuacaccaccacgaucaagcccgugaccuacaagcucgacggcgucgugugcaccgagaucgaccccaagcuggacaacuacuacaagaaggacaacagcuacuucaccgagcagccgaucgaccuggugcccaaccagcccuaccccaacgccuccuucgacaacuucaaguucgucugcgacaacaucaaguucgccgacgaccucaaccagcugacgggguacaagaagccggcgagccgcgagcugaaggugaccuucuuccccgaccucaacggcgacgugguccccaucgacuacaagcacuacacccccuccuucaagaagggcgccaagcugcugcacaagccgaucguguggcacgugaacaacgccaccaacaaggccacguacaagcccaacaccuggugcauccggugccucuggagcaccaagcccgucgagaccuccaacagcuucgacgugcugaaguccgaggacgcgcaggggauggacaaccuggccugcgaggaccucaagcccgugagcgaggaggucguggagaacccgacgauccagaaggacgugcuggagugcaacgucaagaccaccgagguggugggcgacaucauccugaagcccgccaacaacucccucaagaucaccgaggaggucgggcacacggaccugauggccgccuacguggacaacagcucccugaccaucaagaagcccaacgagcucagccgcgugcugggccugaagacccucgcgacccacgggcuggccgccgucaacuccgugccgugggacacgaucgccaacuacgccaagcccuuccugaacaagguggucagcaccaccaccaacaucgugacgcgcugccucaaccgggugugcaccaacuacaugcccuacuucuucacccugcugcuccagcugugcaccuucacccgcuccacgaacagccggaucaaggcguccaugcccaccaccaucgccaagaacaccgucaagagcgugggcaaguucugccuggaggccagcuucaacuaccucaaguccccgaacuucagcaagcugaucaacaucaucaucugguuccugcuccuguccgugugccugggcagccucaucuacuccacggccgcccuggggguccugaugagcaaccucggcaugcccuccuacugcaccggguaccgcgagggcuaccugaacagcaccaacgugaccaucgcgacguacugcaccggcuccauccccugcagcgugugccuguccgggcucgacagccuggacaccuaccccucccuggagaccauccagaucacgaucagcuccuucaagugggaccucaccgccuucggccuggucgccgagugguuccuggccuacauccucuucacccgguucuucuacgugcuggggcuggccgcgaucaugcagcucuucuucagcuacuucgccgugcacuucaucuccaacagcuggcugauguggcugaucaucaaccugguccagauggccccgaucuccgccauggugcgcauguacaucuucuucgcgagcuucuacuacguguggaagagcuacguccacgugguggacggcugcaacuccagcaccugcaugaugugcuacaagcggaaccgcgccacgcgggucgagugcaccaccaucgugaacgggguccgccgguccuucuacguguacgccaacggcggcaagggguucugcaagcuccacaacuggaacugcgugaacugcgacaccuucugcgccggcagcacguucaucuccgacgaggucgcccgcgaccugagccugcaguucaagcggcccaucaaccccaccgaccaguccagcuacaucguggacuccgugaccgucaagaacgggagcauccaccucuacuucgacaaggcgggccagaagaccuacgagcgccacucccugagccacuucgugaaccuggacaaccuccgggccaacaacacgaaggggucccugcccaucaacgugaucgucuucgacggcaagagcaagugcgaggaguccagcgccaaguccgccagcguguacuacucccagcugaugugccagccgauccuccugcuggaccaggcccucgugagcgacgucggcgacagcgcggagguggccgugaagauguucgacgccuacgucaacaccuucuccagcaccuucaacgugcccauggagaagcugaagacccugguggccacggccgaggcggagcucgccaagaacgucucccuggacaacgugcugagcaccuucaucuccgccgcccgccagggguucguggacagcgacgucgagaccaaggacgugguggagugccucaagcugucccaccagagcgacaucgaggucaccggcgacuccugcaacaacuacaugcugacguacaacaagguggagaacaugaccccccgggaccucggggcgugcaucgacugcagcgcccgccacaucaacgcccagguggccaagucccacaacaucgcccugaucuggaacgucaaggacuucaugagccuguccgagcagcuccggaagcagauccgcagcgcggccaagaagaacaaccugcccuucaagcugaccugcgccaccacgcgccagguggugaacgucgugaccaccaagaucgcccucaagggcgggugaggacuagucccuguucccagagcccacuuuuuuuucuuuuuuugaaauaaaauagccugucuuucagaucucaaaggcucuuuucagagccaccaaaaaaaaaaaaaaaaaaaaaaaaaaaaaaaaaaaaaaaaaaaaaaaaaaaaaaaaaaaaaaaaaaaaaaaaaaaaaaaaaaaaaaaaaaaaaaaaaaaaa

SEQ ID NO: 19712 - RNA, 6113 nt, Artificial Sequence
  SARS-CoV-2__MT810570.1__non-structural protein 3 (NSP3) mRNA gc
aggagagucccgcagucggcguccagcggcucugcuuguucgugugugugucguugcaggccuuauucaagcuuaccauggcccccaccaaggugaccuucggcgacgacacggucaucgaggugcagggguacaagagcgugaacaucaccuucgagcuggacgagcgcaucgacaagguccucaacgagaagugcuccgccuacaccguggagcugggcaccgaggugaacgaguucgcgugcgucguggccgacgccgugaucaagacgcugcagccggucagcgagcuccugaccccccuggggaucgaccucgacgagugguccauggccaccuacuaccuguucgacgagagcggcgaguucaagcuggccucccacauguacugcagcuucuacccccccgacgaggacgaggaggagggggacugcgaggaggaggaguucgagccguccacccaguacgaguacggcacggaggacgacuaccagggcaagccccucgaguucggggcgaccagcgccgcccugcagcccgaggaggagcaggaggaggacuggcuggacgacgacucccagcagaccgugggccagcaggacgggagcgaggacaaccagaccacgaccauccagaccaucguggagguccagccccagcucgagauggagcugaccccgguggugcagacgaucgaggucaacuccuucagcggcuaccugaagcucaccgacaacguguacaucaagaacgccgacaucguggaggaggcgaagaaggucaagcccaccgugguggucaacgccgccaacguguaccugaagcacgggggcggcguggccggggcccugaacaaggcgaccaacaacgccaugcaggucgaguccgacgacuacaucgccacgaacggcccccucaagguggggggcagcugcguccuguccggccacaaccuggccaagcacugccuccacgugguggggcccaacgucaacaagggcgaggacauccagcugcugaagagcgccuacgagaacuucaaccagcacgaggugcuccuggcgccgcugcucuccgccgggaucuucggcgccgaccccauccacagccugcgggugugcgucgacaccgugcgcaccaacguguaccuggccgucuucgacaagaaccucuacgacaagcugguguccagcuuccuggagaugaagagcgagaagcagguggagcagaagaucgccgagauccccaaggaggaggucaagcccuucaucaccgaguccaagccgagcguggagcagcggaagcaggacgacaagaagaucaaggcgugcguggaggaggucacgaccacccucgaggagaccaaguuccugacggagaaccugcuccuguacaucgacaucaacgggaaccugcaccccgacuccgccacccucgugagcgacaucgacaucaccuuccugaagaaggacgcccccuacaucgugggcgacgucgugcaggagggcgugcugaccgccgucgugauccccacgaagaaggccgggggcaccaccgagaugcucgcgaaggcccugcgcaaggugccgaccgacaacuacaucacgaccuaccccgggcagggccugaacggguacaccgucgaggaggccaagaccgugcucaagaagugcaaguccgccuucuacauccugcccagcaucaucuccaacgagaagcaggagauccugggcaccgugagcuggaaccuccgggagaugcuggcgcacgccgaggagacgcgcaagcugaugcccgucugcguggagaccaaggccaucguguccaccauccagcggaaguacaagggcaucaagauccaggagggggucguggacuacggcgcccgcuucuacuucuacaccagcaagacgaccguggccucccugaucaacacccucaacgaccugaacgagacccuggucacgaugccgcucggguacgugacccacggccugaaccuggaggaggcggcccgguacaugcgcagccucaaggugcccgccaccgucuccgugagcucccccgacgccgugaccgccuacaacggguaccugacgagcuccagcaagacccccgaggagcacuucaucgagaccaucucccuggcgggcagcuacaaggacuggagcuacuccggccagagcacccagcucgggaucgaguuccugaagcggggcgacaaguccgucuacuacacgagcaacccgaccaccuuccaccuggacggggaggugaucaccuucgacaaccucaagacgcugcugucccuccgcgaggugcggaccaucaaggucuucaccaccguggacaacaucaaccugcacacgcagguggucgacaugagcaugaccuacggccagcaguucggccccaccuaccuggacggggccgacgugaccaagaucaagccccacaacucccacgagggcaagacguucuacgugcucccgaacgacgacacccugcgcgucgaggccuucgaguacuaccacaccaccgaccccagcuuccuggggcgguacauguccgcccucaaccacacgaagaaguggaaguacccccaggugaacggccugaccagcaucaagugggccgacaacaacugcuaccuggcgaccgcccuccugacccugcagcagaucgagcucaaguucaaccccccggcccugcaggacgccuacuaccgcgcgcgggccggggaggccgccaacuucugcgcccugauccucgcguacugcaacaagacggugggcgagcugggcgacguccgcgagaccauguccuaccuguuccagcacgccaaccucgacagcugcaagcgggugcugaacgucgugugcaagaccugcgggcagcagcagaccacccugaagggcguggaggccgucauguacauggggacgcucuccuacgagcaguucaagaagggcgugcagauccccugcaccugcgggaagcaggccaccaaguaccuggugcagcaggagagccccuucgucaugauguccgcccccccggcgcaguacgagcugaagcacggcaccuucacgugcgccagcgaguacaccggcaacuaccagugcgggcacuacaagcacaucaccuccaaggagacccucuacugcaucgacggcgcccugcugacgaagagcagcgaguacaaggggcccaucaccgacguguucuacaaggagaacuccuacaccaccacgaucaagcccgugaccuacaagcucgacggcgucgugugcaccgagaucgaccccaagcuggacaacuacuacaagaaggacaacagcuacuucaccgagcagccgaucgaccuggugcccaaccagcccuaccccaacgccuccuucgacaacuucaaguucgucugcgacaacaucaaguucgccgacgaccucaaccagcugacgggguacaagaagccggcgagccgcgagcugaaggugaccuucuuccccgaccucaacggcgacguggucgccaucgacuacaagcacuacacccccuccuucaagaagggcgccaagcugcugcacaagcccaucguguggcacgugaacaacgccaccaacaaggcgacguacaagccgaacaccuggugcauccggugccucuggagcaccaagcccgucgagaccuccaacagcuucgacgugcugaaguccgaggacgcccaggggauggacaaccuggccugcgaggaccucaagcuggugagcgaggaggucguggagaaccccacgauccagaaggacgugcuggagugcaacgucaagaccaccgagguggugggcgacaucauccucaagcccgccaacaacucccugaagaucaccgaggaggucgggcacacggaccugauggccgcguacguggacaacagcucccucaccaucaagaagccgaacgagcugagccgcgugcugggccucaagacccuggccacccacgggcuggccgccgucaacuccgugcccugggacacgaucgccaacuacgcgaagcccuuccucaacaagguggucagcaccaccaccaacaucgugacgcgcugccugaaccgggugugcaccaacuacaugccguacuucuucacccugcuccugcagcugugcaccuucacccgcuccacgaacagccggaucaaggccuccaugcccaccaccaucgccaagaacaccgucaagagcgugggcaaguucugccucgaggccagcuucaacuaccugaagucccccaacuucagcaagcugaucaacaucaucaucugguuccuccugcuguccgugugccucggcagccugaucuacuccacggccgcgcuggggguccucaugagcaaccugggcaugcccuccuacugcaccggguaccgcgagggcuaccugaacagcaccaacgugaccaucgccacguacugcaccggcuccaucccgugcagcgugugccucuccgggcuggacagccuggacaccuaccccucccucgagaccauccagaucacgaucagcuccuucaagugggaccugaccgccuucggccuggucgccgagugguuccucgccuacauccuguucacccgguucuucuacgugcuggggcucgcggccaucaugcagcuguucuucagcuacuucgccgugcacuucaucuccaacagcuggcugauguggcugaucaucaaccucguccagauggcccccaucuccgcgauggugcgcauguacaucuucuucgccagcuucuacuacguguggaagagcuacguccacgugguggacggcugcaacuccagcaccugcaugaugugcuacaagcggaaccgcgccacgcgggucgagugcaccaccaucgugaacgggguccgccgguccuucuacguguacgccaacggcggcaagggguucugcaagcugcacaacuggaacugcgugaacugcgacaccuucugcgccggcagcacguucaucuccgacgaggucgcgcgcgaccugagccuccaguucaagcggcccaucaacccgaccgaccaguccagcuacaucguggacuccgugaccgucaagaacgggagcauccaccuguacuucgacaaggccggccagaagaccuacgagcgccacucccugagccacuucgugaaccucgacaaccugcgggccaacaacacgaaggggucccugcccaucaacgugaucgucuucgacggcaagagcaagugcgaggaguccagcgccaaguccgccagcguguacuacucccagcucaugugccagcccauccugcugcucgaccaggcgcuggugagcgacgucggcgacagcgccgagguggccgugaagauguucgacgccuacgucaacaccuucuccagcaccuucaacgugcccauggagaagcugaagacccucguggccacggcggaggccgagcuggccaagaacgucucccuggacaacgugcucagcaccuucaucuccgccgcgcgccagggguucguggacagcgacgucgagaccaaggacgugguggagugccugaagcugucccaccagagcgacaucgaggucaccggcgacuccugcaacaacuacaugcucacguacaacaagguggagaacaugaccccgcgggaccugggggccugcaucgacugcagcgcccgccacaucaacgcccagguggccaagucccacaacaucgcgcugaucuggaacgucaaggacuucaugagccucuccgagcagcugcggaagcagauccgcagcgccgccaagaagaacaaccugcccuucaagcucaccugcgccaccacgcgccagguggugaacgucgugaccaccaagaucgcccugaagggcgggugaggacuagucccuguucccagagcccacuuuuuuuucuuuuuuugaaauaaaauagccugucuuucagaucucaaaggcucuuuucagagccaccaaaaaaaaaaaaaaaaaaaaaaaaaaaaaaaaaaaaaaaaaaaaaaaaaaaaaaaaaaaaaaaaaaaaaaaaaaaaaaaaaaaaaaaaaaaaaaaaaaaaa

SEQ ID NO: 19713 - RNA, 6113 nt, Artificial Sequence
  SARS-CoV-2__MT810589.1__non-structural protein 3 (NSP3) mRNA gc
aggagagucccgcagucggcguccagcggcucugcuuguucgugugugugucguugcaggccuuauucaagcuuaccauggcccccaccaaggugaccuucggcgacgacacggucaucgaggugcagggguacaagagcgugaacaucaccuucgagcuggacgagcgcaucgacaagguccucaacgagaagugcuccgccuacaccguggagcugggcaccgaggugaacgaguucgcgugcgucguggccgacgccgugaucaagacgcugcagccggucagcgagcuccugaccccccuggggaucgaccucgacgagugguccauggccaccuacuaccuguucgacgagagcggcgaguucaagcuggccucccacauguacugcagcuucuacccccccgacgaggacgaggaggagggggacugcgaggaggaggaguucgagccguccacccaguacgaguacggcacggaggacgacuaccagggcaagccccucgaguucggggcgaccagcgccgcccugcagcccgaggaggagcaggaggaggacuggcuggacgacgacucccagcagaccgugggccagcaggacgggagcgaggacaaccagaccacgaccauccagaccaucguggagguccagccccagcucgagauggagcugaccccgguggugcagacgaucgaggucaacuccuucagcggcuaccugaagcucaccgacaacguguacaucaagaacgccgacaucguggaggaggcgaagaaggucaagcccaccgugguggucaacgccgccaacguguaccugaagcacgggggcggcguggccggggcccugaacaaggcgaccaacaacgccaugcaggucgaguccgacgacuacaucgccacgaacggcccccucaagguggggggcagcugcguccuguccggccacaaccuggccaagcacugccuccacgugguggggcccaacgucaacaagggcgaggacauccagcugcugaagagcgccuacgagaacuucaaccagcacgaggugcuccuggcgccgcugcucuccgccgggaucuucggcgccgaccccauccacagccugcgggugugcgucgacaccgugcgcaccaacguguaccuggccgucuucgacaagaaccucuacgacaagcugguguccagcuuccuggagaugaagagcgagaagcagguggagcagaagaucgccgagauccccaaggaggaggucaagcccuucaucaccgaguccaagccgagcguggagcagcggaagcaggacgacaagaagaucaaggcgugcguggaggaggucacgaccacccucgaggagaccaaguuccugacggagaaccugcuccuguacaucgacaucaacgggaaccugcaccccgacuccgccacccucgugagcgacaucgacaucaccuuccugaagaaggacgcccccuacaucgugggcgacgucgugcaggagggcgugcugaccgccgucgugauccccacgaagaaggccgggggcaccaccgagaugcucgcgaaggcccugcgcaaggugccgaccgacaacuacaucacgaccuaccccgggcagggccugaacggguacaccgucgaggaggccaagaccgugcucaagaagugcaaguccgccuucuacauccugcccagcaucaucuccaacgagaagcaggagauccugggcaccgugagcuggaaccuccgggagaugcuggcgcacgccgaggagacgcgcaagcugaugcccgucugcguggagaccaaggccaucguguccaccauccagcggaaguacaagggcaucaagauccaggagggggucguggacuacggcgcccgcuucuacuucuacaccagcaagacgaccguggccucccugaucaacacccucaacgaccugaacgagacccuggucacgaugccgcucggguacgugacccacggccugaaccuggaggaggcggcccgguacaugcgcagccucaaggugcccgccaccgucuccgugagcucccccgacgccgugaccgccuacaacggguaccugacgagcuccagcaagacccccgaggagcacuucaucgagaccaucucccuggcgggcagcuacaaggacuggagcuacuccggccagagcacccagcucgggaucgaguuccugaagcggggcgacaaguccgucuacuacacgagcaacccgaccaccuuccaccuggacggggaggugaucaccuucgacaaccucaagacgcugcugucccuccgcgaggugcggaccaucaaggucuucaccaccguggacaacaucaaccugcacacgcagguggucgacaugagcaugaccuacggccagcaguucggccccaccuaccuggacggggccgacgugaccaagaucaagccccacaacucccacgagggcaagacguucuacgugcucccgaacgacgacacccugcgcgucgaggccuucgaguacuaccacaccaccgaccccagcuuccuggggcgguacauguccgcccucaaccacacgaagaaguggaaguacccccaggugaacggccugaccagcaucaagugggccgacaacaacugcuaccuggcgaccgcccuccugacccugcagcagaucgagcucaaguucaaccccccggcccugcaggacgccuacuaccgcgcgcgggccggggaggccgccaacuucugcgcccugauccucgcguacugcaacaagacggugggcgagcugggcgacguccgcgagaccauguccuaccuguuccagcacgccaaccucgacagcugcaagcgggugcugaacgucgugugcaagaccugcgggcagcagcagaccacccugaagggcguggaggccgucauguacauggggacgcucuccuacgagcaguucaagaagggcgugcagauccccugcaccugcgggaagcaggccaccaaguaccuggugcagcaggagagccccuucgucaugauguccgcccccccggcgcaguacgagcugaagcacggcaccuucacgugcgccagcgaguacaccggcaacuaccagugcgggcacuacaagcacaucaccuccaaggagacccucuacugcaucgacggcgcccugcugacgaagagcagcgaguacaaggggcccaucaccgacguguucuacaaggagaacuccuacaccaccacgaucaagcccgugaccuacaagcucgacggcgucgugugcaccgagaucgaccccaagcuggacaacuacuacaagaaggacaacagcuacuucaccgagcagccgaucgaccuggugcccaaccagcccuaccccaacgccuccuucgacaacuucaaguucgucugcgacaacaucaaguucgccgacgaccucaaccagcugacgggguacaagaagccggcgagccgcgagcugaaggugaccuucuuccccgaccucaacggcgacguggucgccaucgacuacaagcacuacacccccuccuucaagaagggcgccaagcugcugcacaagcccaucguguggcacgugaacaacgccaccaacaaggcgacguacaagccgaacaccuggugcauccggugccucuggagcaccaagcccgucgagaccuccaacagcuucgacgugcugaaguccgaggacgcccaggggauggacaaccuggccugcgaggaccucaagcccgugagcgaggaggucguggagaaccccacgauccagaaggacgugcuggagugcaacgucaagaccaccgagguggugggcgacaucauccugaagccggccaacaacucccucaagaucaccgaggaggucgggcacacggaccugauggccgcguacguggacaacagcucccugaccaucaagaagcccaacgagcucagccgcgugcugggccugaagacccucgccauccacgggcuggccgccgucaacuccgugcccugggacaccaucgccaacuacgcgaagccguuccugaacaagguggucagcacgaccaccaacaucgugacccgcugccucaaccgggugugcacgaacuacaugcccuacuucuucacccugcugcuccagcugugcaccuucacccgcuccaccaacagccggaucaaggccuccaugcccacgaccaucgccaagaacaccgucaagagcgugggcaaguucugccuggaggccagcuucaacuaccucaagucccccaacuucagcaagcugaucaacaucaucaucugguuccugcuccuguccgugugccugggcagccucaucuacuccaccgccgcgcuggggguccugaugagcaaccucggcaugccguccuacugcacgggguaccgcgagggcuaccugaacagcaccaacgugaccaucgccaccuacugcacgggcuccauccccugcagcgugugccuguccgggcucgacagccuggacaccuaccccucccuggagaccauccagaucaccaucagcuccuucaagugggaccucacggccuucggccuggucgccgagugguuccuggccuacauccucuucacccgguucuucuacgugcuggggcuggcggccaucaugcagcucuucuucagcuacuucgccgugcacuucaucuccaacagcuggcugauguggcugaucaucaaccugguccagauggcccccaucuccgcgauggugcgcauguacaucuucuucgccagcuucuacuacguguggaagagcuacguccacgugguggacggcugcaacuccagcaccugcaugaugugcuacaagcggaaccgcgccacccgggucgagugcacgaccaucgugaacgggguccgccgguccuucuacguguacgccaacggcggcaagggguucugcaagcuccacaacuggaacugcgugaacugcgacaccuucugcgccggcagcaccuucaucuccgacgaggucgcgcgcgaccugagccugcaguucaagcggccgaucaaccccacggaccaguccagcuacaucguggacuccgugaccgucaagaacgggagcauccaccucuacuucgacaaggccggccagaagaccuacgagcgccacucccugagccacuucgugaaccuggacaaccuccgggccaacaacaccaaggggucccugcccaucaacgugaucgucuucgacggcaagagcaagugcgaggaguccagcgccaaguccgccagcguguacuacucccagcugaugugccagcccauccuccugcuggaccaggcgcucgugagcgacgucggcgacagcgccgagguggccgugaagauguucgacgccuacgucaacacguucuccagcaccuucaacgugccgauggagaagcugaagacccugguggccaccgcggaggccgagcucgccaagaacgucucccuggacaacgugcugagcacguucaucuccgccgcgcgccagggguucguggacagcgacgucgagaccaaggacgugguggagugccucaagcugucccaccagagcgacaucgaggucaccggcgacuccugcaacaacuacaugcugaccuacaacaagguggagaacaugacgccccgggaccucggggccugcaucgacugcagcgcccgccacaucaacgcccagguggccaagucccacaacaucgcgcugaucuggaacgucaaggacuucaugagccuguccgagcagcuccggaagcagauccgcagcgccgccaagaagaacaaccugcccuucaagcugaccugcgccaccacccgccagguggugaacgucgugacgaccaagaucgcccucaagggcgggugaggacuagucccuguucccagagcccacuuuuuuuucuuuuuuugaaauaaaauagccugucuuucagaucucaaaggcucuuuucagagccaccaaaaaaaaaaaaaaaaaaaaaaaaaaaaaaaaaaaaaaaaaaaaaaaaaaaaaaaaaaaaaaaaaaaaaaaaaaaaaaaaaaaaaaaaaaaaaaaaaaaaa

SEQ ID NO: 19714 - RNA, 6113 nt, Artificial Sequence
  SARS-CoV-2__MT810599.1__non-structural protein 3 (NSP3) mRNA gc
aggagagucccgcagucggcguccagcggcucugcuuguucgugugugugucguugcaggccuuauucaagcuuaccauggcccccaccaaggugaccuucggcgacgacacggucaucgaggugcagggguacaagagcgugaacaucaccuucgagcuggacgagcgcaucgacaagguccucaacgagaagugcuccgccuacaccguggagcugggcaccgaggugaacgaguucgcgugcgucguggccgacgccgugaucaagacgcugcagccggucagcgagcuccugaccccccuggggaucgaccucgacgagugguccauggccaccuacuaccuguucgacgagagcggcgaguucaagcuggccucccacauguacugcagcuucuacccccccgacgaggacgaggaggagggggacugcgaggaggaggaguucgagccguccacccaguacgaguacggcacggaggacgacuaccagggcaagccccucgaguucggggcgaccagcgccgcccugcagcccgaggaggagcaggaggaggacuggcuggacgacgacucccagcagaccgugggccagcaggacgggagcgaggacaaccagaccacgaccauccagaccaucguggagguccagccccagcucgagauggagcugaccccgguggugcagacgaucgaggucaacuccuucagcggcuaccugaagcucaccgacaacguguacaucaagaacgccgacaucguggaggaggcgaagaaggucaagcccaccgugguggucaacgccgccaacguguaccugaagcacgggggcggcguggccggggcccugaacaaggcgaccaacaacgccaugcaggucgaguccgacgacuacaucgccacgaacggcccccucaagguggggggcagcugcguccuguccggccacaaccuggccaagcacugccuccacgugguggggcccaacgucaacaagggcgaggacauccagcugcugaagagcgccuacgagaacuucaaccagcacgaggugcuccuggcgccgcugcucuccgccgggaucuucggcgccgaccccauccacagccugcgggugugcgucgacaccgugcgcaccaacguguaccuggccgucuucgacaagaaccucuacgacaagcugguguccagcuuccuggagaugaagagcgagaagcagguggagcagaagaucgccgagauccccaaggaggaggucaagcccuucaucaccgaguccaagccgagcguggagcagcggaagcaggacgacaagaagaucaaggcgugcguggaggaggucacgaccacccucgaggagaccaaguuccugacggagaaccugcuccuguacaucgacaucaacgggaaccugcaccccgacuccgccacccucgugagcgacaucgacaucaccuuccugaagaaggacgcccccuacaucgugggcgacgucgugcaggagggcgugcugaccgccgucgugauccccacgaagaaggccgggggcaccaccgagaugcucgcgaaggcccugcgcaaggugccgaccgacaacuacaucacgaccuaccccgggcagggccugaacggguacaccgucgaggaggccaagaccgugcucaagaagugcaaguccgccuucuacauccugcccagcaucaucuccaacgagaagcaggagauccugggcaccgugagcuggaaccuccgggagaugcuggcgcacgccgaggagacgcgcaagcugaugcccgucugcguggagaccaaggccaucguguccaccauccagcggaaguacaagggcaucaagauccaggagggggucguggacuacggcgcccgcuucuacuucuacaccagcaagacgaccguggccucccugaucaacacccucaacgaccugaacgagacccuggucacgaugccgcucggguacgugacccacggccugaaccuggaggaggcggcccgguacaugcgcagccucaaggugcccgccaccgucuccgugagcucccccgacgccgugaccgccuacaacggguaccugacgagcuccagcaagacccccgaggagcacuucaucgagaccaucucccuggcgggcagcuacaaggacuggagcuacuccggccagagcacccagcucgggaucgaguuccugaagcggggcgacaaguccgucuacuacacgagcaacccgaccaccuuccaccuggacggggaggugaucaccuucgacaaccucaagacgcugcugucccuccgcgaggugcggaccaucaaggucuucaccaccguggacaacaucaaccugcacacgcagguggucgacaugagcaugaccuacggccagcaguucggccccaccuaccuggacggggccgacgugaccaagaucaagccccacaacucccacgagggcaagacguucuacgugcucccgaacgacgacacccugcgcgucgaggccuucgaguacuaccacaccaccgaccccagcuuccuggggcgguacauguccgcccucaaccacacgaagaaguggaaguaccugcaggugaacggccugaccagcaucaagugggccgacaacaacugcuaccucgcgaccgcccugcugacccuccagcagaucgagcugaaguucaacccccccgcccugcaggacgccuacuaccgcgcgcgggccggggaggccgccaacuucugcgcccucauccuggcguacugcaacaagacggugggcgagcugggcgacguccgcgagaccauguccuaccucuuccagcacgccaaccuggacagcugcaagcgggugcugaacgucgugugcaagaccugcgggcagcagcagaccacccucaagggcguggaggccgucauguacauggggacgcuguccuacgagcaguucaagaagggcgugcagaucccgugcaccugcgggaagcaggccaccaaguaccuggugcagcaggagagccccuucgucaugauguccgccccccccgcgcaguacgagcucaagcacggcaccuucacgugcgccagcgaguacaccggcaacuaccagugcgggcacuacaagcacaucaccuccaaggagacccuguacugcaucgacggcgcccugcucacgaagagcagcgaguacaaggggccgaucaccgacguguucuacaaggagaacuccuacaccaccacgaucaagcccgugaccuacaagcuggacggcgucgugugcaccgagaucgaccccaagcuggacaacuacuacaagaaggacaacagcuacuucaccgagcagcccaucgaccucgugccgaaccagcccuaccccaacgccuccuucgacaacuucaaguucgucugcgacaacaucaaguucgccgacgaccugaaccagcugacgggguacaagaagcccgcgagccgcgagcucaaggugaccuucuucccggaccugaacggcgacguggucgccaucgacuacaagcacuacacccccuccuucaagaagggcgccaagcugcuccacaagcccaucguguggcacgugaacaacgccaccaacaaggcgacguacaagcccaacaccuggugcauccggugccuguggagcaccaagccggucgagaccuccaacagcuucgacgugcugaaguccgaggacgcccaggggauggacaaccucgccugcgaggaccugaagcccgugagcgaggaggucguggagaaccccacgauccagaaggacgugcuggagugcaacgucaagaccaccgagguggugggcgacaucauccucaagcccgccaacaacucccugaagaucaccgaggaggucgggcacacggaccugauggccgcguacguggacaacagcucccucaccaucaagaagccgaacgagcugagccgcgugcugggccucaagacccuggccacccacgggcuggccgccgucaacuccgugcccugggacacgaucgccaacuacgcgaagcccuuccucaacaagguggucagcaccaccaccaacaucgugacgcgcugccugaaccgggugugcaccaacuacaugccguacuucuucacccugcuccugcagcugugcaccuucacccgcuccacgaacagccggaucaaggccuccaugcccaccaccaucgccaagaacaccgucaagagcgugggcaaguucugccucgaggccagcuucaacuaccugaagucccccaacuucagcaagcugaucaacaucaucaucugguuccuccugcuguccgugugccucggcagccugaucuacuccacggccgcgcuggggguccucaugagcaaccugggcaugcccuccuacugcaccggguaccgcgagggcuaccugaacagcaccaacgugaccaucgccacguacugcaccggcuccaucccgugcagcgugugccucuccgggcuggacagccuggacaccuaccccucccucgagaccauccagaucacgaucagcuccuucaagugggaccugaccgccuucggccuggucgccgagugguuccucgccuacauccuguucacccgguucuucuacgugcuggggcucgcggccaucaugcagcuguucuucagcuacuucgccgugcacuucaucuccaacagcuggcugauguggcugaucaucaaccucguccagauggcccccaucuccgcgauggugcgcauguacaucuucuucgccagcuucuacuacguguggaagagcuacguccacgugguggacggcugcaacuccagcaccugcaugaugugcuacaagcggaaccgcgccacgcgggucgagugcaccaccaucgugaacgggguccgccgguccuucuacguguacgccaacggcggcaagggguucugcaagcugcacaacuggaacugcgugaacugcgacaccuucugcgccggcagcacguucaucuccgacgaggucgcgcgcgaccugagccuccaguucaagcggcccaucaacccgaccgaccaguccagcuacaucguggacuccgugaccgucaagaacgggagcauccaccuguacuucgacaaggccggccagaagaccuacgagcgccacucccugagccacuucgugaaccucgacaaccugcgggccaacaacacgaaggggucccugcccaucaacgugaucgucuucgacggcaagagcaagugcgaggaguccagcgccaaguccgccagcguguacuacucccagcucaugugccagcccauccugcugcucgaccaggcgcuggugagcgacgucggcgacagcgccgagguggccgugaagauguucgacgccuacgucaacaccuucuccagcaccuucaacgugcccauggagaagcugaagacccucguggccacggcggaggccgagcuggccaagaacgucucccuggacaacgugcucagcaccuucaucuccgccgcgcgccagggguucguggacagcgacgucgagaccaaggacgugguggagugccugaagcugucccaccagagcgacaucgaggucaccggcgacuccugcaacaacuacaugcucacguacaacaagguggagaacaugaccccgcgggaccugggggccugcaucgacugcagcgcccgccacaucaacgcccagguggccaagucccacaacaucgcgcugaucuggaacgucaaggacuucaugagccucuccgagcagcugcggaagcagauccgcagcgccgccaagaagaacaaccugcccuucaagcucaccugcgccaccacgcgccagguggugaacgucgugaccaccaagaucgcccugaagggcgggugaggacuagucccuguucccagagcccacuuuuuuuucuuuuuuugaaauaaaauagccugucuuucagaucucaaaggcucuuuucagagccaccaaaaaaaaaaaaaaaaaaaaaaaaaaaaaaaaaaaaaaaaaaaaaaaaaaaaaaaaaaaaaaaaaaaaaaaaaaaaaaaaaaaaaaaaaaaaaaaaaaaaa

SEQ ID NO: 19715 - RNA, 6113 nt, Artificial Sequence
  SARS-CoV-2__MT810624.1__non-structural protein 3 (NSP3) mRNA gc
aggagagucccgcagucggcguccagcggcucugcuuguucgugugugugucguugcaggccuuauucaagcuuaccauggcccccaccaaggugaccuucggcgacgacacggucaucgaggugcagggguacaagagcgugaacaucaccuucgagcuggacgagcgcaucgacaagguccucaacgagaagugcuccgccuacaccguggagcugggcaccgaggugaacgaguucgcgugcgucguggccgacgccgugaucaagacgcugcagccggucagcgagcuccugaccccccuggggaucgaccucgacgagugguccauggccaccuacuaccuguucgacgagagcggcgaguucaagcuggccucccacauguacugcagcuucuacccccccgacgaggacgaggaggagggggacugcgaggaggaggaguucgagccguccacccaguacgaguacggcacggaggacgacuaccagggcaagccccucgaguucggggcgaccagcgccgcccugcagcccgaggaggagcaggaggaggacuggcuggacgacgacucccagcagaccgugggccagcaggacgggagcgaggacaaccagaccacgaccauccagaccaucguggagguccagccccagcucgagauggagcugaccccgguggugcagacgaucgaggucaacuccuucagcggcuaccugaagcucaccgacaacguguacaucaagaacgccgacaucguggaggaggcgaagaaggucaagcccaccgugguggucaacgccgccaacguguaccugaagcacgggggcggcguggccggggcccugaacaaggcgaccaacaacgccaugcaggucgaguccgacgacuacaucgccacgaacggcccccucaagguggggggcagcugcguccuguccggccacaaccuggccaagcacugccuccacgugguggggcccaacgucaacaagggcgaggacauccagcugcugaagagcgccuacgagaacuucaaccagcacgaggugcuccuggcgccgcugcucuccgccgggaucuucggcgccgaccccauccacagccugcgggugugcgucgacaccgugcgcaccaacguguaccuggccgucuucgacaagaaccucuacgacaagcugguguccagcuuccuggagaugaagagcgagaagcagguggagcagaagaucgccgagauccccaaggaggaggucaagcccuucaucaccgaguccaagccgagcguggagcagcggaagcaggacgacaagaagaucaaggcgugcguggaggaggucacgaccacccucgaggagaccaaguuccugacggagaaccugcuccuguacaucgacaucaacgggaaccugcaccccgacuccgccacccucgugagcgacaucgacaucaccuuccugaagaaggacgcccccuacaucgugggcgacgucgugcaggagggcgugcugaccgccgucgugauccccacgaagaaggccgggggcaccaccgagaugcucgcgaaggcccugcgcaaggugccgaccgacaacuacaucacgaccuaccccgggcagggccugaacggguacaccgucgaggaggccaagaccgugcucaagaagugcaaguccgccuucuacauccugcccagcaucaucuccaacgagaagcaggagauccugggcaccgugagcuggaaccuccgggagaugcuggcgcacgccgaggagacgcgcaagcugaugcccgucugcguggagaccaaggccaucguguccaccauccagcggaaguacaagggcaucaagauccaggagggggucguggacuacggcgcccgcuucuacuucuacaccagcaagacgaccguggccucccugaucaacacccucaacgaccugaacgagacccuggucacgaugccgcucggguacgugacccacggccugaaccuggaggaggcggcccgguacaugcgcagccucaaggugcccgccaccgucuccgugagcucccccgacgccgugaccgccuacaacggguaccugacgagcuccagcaagacccccgaggagcacuucaucgagaccaucucccuggcgggcagcuacaaggacuggagcuacuccggccagagcacccagcucgggaucgaguuccugaagcggggcgacaaguccgucuacuacacgagcaacccgaccaccuuccaccuggacggggaggugaucaccuucgacaaccucaagacgcugcugucccuccgcgaggugcggaccaucaaggucuucaccaccguggacaacaucaaccugcacacgcagguggucgacaugagcaugaccuacggccagcaguucggccccaccuaccuggacggggccgacgugaccaagaucaagccccacaacucccacgagggcaagacguucuacgugcucccgaacgacgacacccugcgcgucgaggccuucgaguacuacuacaccaccgaccccagcuuccuggggcgguacauguccgcccucaaccacacgaagaaguggaaguacccccaggugaacggccugaccagcaucaagugggccgacaacaacugcuaccuggcgaccgcccuccugacccugcagcagaucgagcucaaguucaaccccccggcccugcaggacgccuacuaccgcgcgcgggccggggaggccgccaacuucugcgcccugauccucgcguacugcaacaagacggugggcgagcugggcgacguccgcgagaccauguccuaccuguuccagcacgccaaccucgacagcugcaagcgggugcugaacgucgugugcaagaccugcgggcagcagcagaccacccugaagggcguggaggccgucauguacauggggacgcucuccuacgagcaguucaagaagggcgugcagauccccugcaccugcgggaagcaggccaccaaguaccuggugcagcaggagagccccuucgucaugauguccgcccccccggcgcaguacgagcugaagcacggcaccuucacgugcgccagcgaguacaccggcaacuaccagugcgggcacuacaagcacaucaccuccaaggagacccucuacugcaucgacggcgcccugcugacgaagagcagcgaguacaaggggcccaucaccgacguguucuacaaggagaacuccuacaccaccacgaucaagcccgugaccuacaagcucgacggcgucgugugcaccgagaucgaccccaagcuggacaacuacuacaagaaggacaacagcuacuucaccgagcagccgaucgaccuggugcccaaccagcccuaccccaacgccuccuucgacaacuucaaguucgucugcgacaacaucaaguucgccgacgaccucaaccagcugacgggguacaagaagccggcgagccgcgagcugaaggugaccuucuuccccgaccucaacggcgacguggucgccaucgacuacaagcacuacacccccuccuucaagaagggcgccaagcugcugcacaagcccaucguguggcacgugaacaacgccaccaacaaggcgacguacaagccgaacaccuggugcauccggugccucuggagcaccaagcccgucgagaccuccaacagcuucgacgugcugaaguccgaggacgcccaggggauggacaaccuggccugcgaggaccucaagcccgugagcgaggaggucguggagaaccccacgauccagaaggacgugcuggagugcaacgucaagaccaccgagguggugggcgacaucauccugaagccggccaacaacucccucaagaucaccgaggaggucgggcacacggaccugauggccgcguacguggacaacagcucccugaccaucaagaagcccaacgagcucagccgcgugcugggccugaagacccucgccacccacgggcuggccgccgucaacuccgugcccugggacacgaucgccaacuacgcgaagccguuccugaacaagguggucagcaccaccaccaacaucgugacgcgcugccucaaccgggugugcaccaacuacaugcccuacuucuucacccugcugcuccagcugugcaccuucacccgcuccacgaacagccggaucaaggccuccaugcccaccaccaucgccaagaacaccgucaagagcgugggcaaguucugccuggaggccagcuucaacuaccucaagucccccaacuucagcaagcugaucaacaucaucaucugguuccugcuccuguccgugugccugggcagccucaucuacuccacggccgcgcuggggguccugaugagcaaccucggcaugccguccuacugcaccggguaccgcgagggcuaccugaacagcaccaacgugaccaucgccacguacugcaccggcuccauccccugcagcgugugccuguccgggcucgacagccuggacaccuaccccucccuggagaccauccagaucacgaucagcuccuucaagugggaccucaccgccuucggccuggucgccgagugguuccuggccuacauccucuucacccgguucuucuacgugcuggggcuggcggccaucaugcagcucuucuucagcuacuucgccgugcacuucaucuccaacagcuggcugauguggcugaucaucaaccugguccagauggcccccaucuccgcgauggugcgcauguacaucuucuucgccagcuucuacuacguguggaagagcuacguccacgugguggacggcugcaacuccagcaccugcaugaugugcuacaagcggaaccgcgccacgcgggucgagugcaccaccaucgugaacgggguccgccgguccuucuacguguacgccaacggcggcaagggguucugcaagcuccacaacuggaacugcgugaacugcgacaccuucugcgccggcagcacguucaucuccgacgaggucgcgcgcgaccugagccugcaguucaagcggccgaucaaccccaccgaccaguccagcuacaucguggacuccgugaccgucaagaacgggagcauccaccucuacuucgacaaggccggccagaagaccuacgagcgccacucccugagccacuucgugaaccuggacaaccuccgggccaacaacacgaaggggucccugcccaucaacgugaucgucuucgacggcaagagcaagugcgaggaguccagcgccaaguccgccagcguguacuacucccagcugaugugccagcccauccuccugcuggaccaggcgcucgugagcgacgucggcgacagcgccgagguggccgugaagauguucgacgccuacgucaacaccuucuccagcaccuucaacgugccgauggagaagcugaagacccugguggccacggcggaggccgagcucgccaagaacgucucccuggacaacgugcugagcaccuucaucuccgccgcgcgccagggguucguggacagcgacgucgagaccaaggacgugguggagugccucaagcugucccaccagagcgacaucgaggucaccggcgacuccugcaacaacuacaugcugacguacaacaagguggagaacaugaccccccgggaccucggggccugcaucgacugcagcgcccgccacaucaacgcccagguggccaagucccacaacaucgcgcugaucuggaacgucaaggacuucaugagccuguccgagcagcuccggaagcagauccgcagcgccgccaagaagaacaaccugcccuucaagcugaccugcgccaccacgcgccagguggugaacgucgugaccaccaagaucgcccucaagggcgggugaggacuagucccuguucccagagcccacuuuuuuuucuuuuuuugaaauaaaauagccugucuuucagaucucaaaggcucuuuucagagccaccaaaaaaaaaaaaaaaaaaaaaaaaaaaaaaaaaaaaaaaaaaaaaaaaaaaaaaaaaaaaaaaaaaaaaaaaaaaaaaaaaaaaaaaaaaaaaaaaaaaaa

SEQ ID NO: 19716 - RNA, 6113 nt, Artificial Sequence
  SARS-CoV-2__MT810634.1__non-structural protein 3 (NSP3) mRNA gc
aggagagucccgcagucggcguccagcggcucugcuuguucgugugugugucguugcaggccuuauucaagcuuaccauggcccccaccaaggugaccuucggcgacgacacggucaucgaggugcagggguacaagagcgugaacaucaccuucgagcuggacgagcgcaucgacaagguccucaacgagaagugcuccgccuacaccguggagcugggcaccgaggugaacgaguucgcgugcgucguggccgacgccgugaucaagacgcugcagccggucagcgagcuccugaccccccuggggaucgaccucgacgagugguccauggccaccuacuaccuguucgacgagagcggcgaguucaagcuggccucccacauguacugcagcuucuacccccccgacgaggacgaggaggagggggacugcgaggaggaggaguucgagccguccacccaguacgaguacggcacggaggacgacuaccagggcaagccccucgaguucggggcgaccagcgccgcccugcagcccgaggaggagcaggaggaggacuggcuggacgacgacucccagcagaccgugggccagcaggacgggagcgaggacaaccagaccacgaccauccagaccaucguggagguccagccccagcucgagauggagcugaccccgguggugcagacgaucgaggucaacuccuucagcggcuaccugaagcucaccgacaacguguacaucaagaacgccgacaucguggaggaggcgaagaaggucaagcccaccgugguggucaacgccgccaacguguaccugaagcacgggggcggcguggccggggcccugaacaaggcgaccaacaacgccaugcaggucgaguccgacgacuacaucgccacgaacggcccccucaagguggggggcagcugcguccuguccggccacaaccuggccaagcacugccuccacgugguggggcccaacgucaacaagggcgaggacauccagcugcugaagagcgccuacgagaacuucaaccagcacgaggugcuccuggcgccgcugcucuccgccgggaucuucggcgccgaccccauccacagccugcgggugugcgucgacaccgugcgcaccaacguguaccuggccgucuucgacaagaaccucuacgacaagcugguguccagcuuccuggagaugaagagcgagaagcagguggagcagaagaucgccgagauccccaaggaggaggucaagcccuucaucaccgaguccaagccgagcguggagcagcggaagcaggacgacaagaagaucaaggcgugcguggaggaggucacgaccacccucgaggagaccaaguuccugacggagaaccugcuccuguacaucgacaucaacgggaaccugcaccccgacuccgccacccucgugagcgacaucgacaucaccuuccugaagaaggacgcccccuacaucgugggcgacgucgugcaggagggcgugcugaccgccgucgugauccccacgaagaaggccgggggcaccaccgagaugcucgcgaaggcccugcgcaaggugccgaccgacaacuacaucacgaccuaccccgggcagggccugaacggguacaccgucgaggaggccaagaccgugcucaagaagugcaaguccgccuucuacauccugcccagcaucaucuccaacgagaagcaggagauccugggcaccgugagcuggaaccuccgggagaugcuggcgcacgccgaggagacgcgcaagcugaugcccgucugcguggagaccaaggccaucguguccaccauccagcggaaguacaagggcaucaagauccaggagggggucguggacuacggcgcccgcuucuacuucuacaccagcaagacgaccguggccucccugaucaacacccucaacgaccugaacgagacccuggucacgaugccgcucggguacgugacccacggccugaaccuggaggaggcggcccgguacaugcgcagccucaaggugcccgccaccgucuccgugagcucccccgacgccgugaccgccuacaacggguaccugacgagcuccagcaagacccccgaggagcacuucaucgagaccaucucccuggcgggcagcuacaaggacuggagcuacuccggccagagcacccagcucgggaucgaguuccugaagcggggcgacaaguccgucuacuacacgagcaacccgaccaccuuccaccuguacggggaggugaucaccuucgacaaccucaagacgcugcugucccuccgcgaggugcggaccaucaaggucuucaccaccguggacaacaucaaccugcacacgcagguggucgacaugagcaugaccuacggccagcaguucggccccaccuaccuggacggggccgacgugaccaagaucaagccccacaacucccacgagggcaagacguucuacgugcucccgaacgacgacacccugcgcgucgaggccuucgaguacuaccacaccaccgaccccagcuuccuggggcgguacaucuccgcccucaaccacacgaagaaguggaaguacccccaggugaacggccugaccagcaucaagugggccgacaacaacugcuaccuggcgaccgcccuccugacccugcagcagaucgagcucaaguucaaccccccggcccugcaggacgccuacuaccgcgcgcgggccggggaggccgccaacuucugcgcccugauccucgcguacugcaacaagacggugggcgagcugggcgacguccgcgagaccauguccuaccuguuccagcacgccaaccucgacagcugcaagcgggugcugaacgucgugugcaagaccugcgggcagcagcagaccacccugaagggcguggaggccgucauguacauggggacgcucuccuacgagcaguucaagaagggcgugcagauccccugcaccugcgggaagcaggccaccaaguaccuggugcagcaggagagccccuucgucaugauguccgcccccccggcgcaguacgagcugaagcacggcaccuucacgugcgccagcgaguacaccggcaacuaccagugcgggcacuacaagcacaucaccuccaaggagacccucuacugcaucgacggcgcccugcugacgaagagcagcgaguacaaggggcccaucaccgacguguucuacaaggagaacuccuacaccaccacgaucaagcccgugaccuacaagcucgacggcgucgugugcaccgagaucgaccccaagcuggacaacuacuacaagaaggacaacagcuacuucaccgagcagccgaucgaccuggugcccaaccagcccuaccccaacgccuccuucgacaacuucaaguucgucugcgacaacaucaaguucgccgacgaccucaaccagcugacgggguacaagaagccggcgagccgcgagcugaaggugaccuucuuccccgaccucaacggcgacguggucgccaucgacuacaagcacuacacccccuccuucaagaagggcgccaagcugcugcacaagcccaucguguggcacgugaacaacgccaccaacaaggcgacguacaagccgaacaccuggugcauccggugccucuggagcaccaagcccgucgagaccuccaacagcuucgacgugcugaaguccgaggacgcccaggggauggacaaccuggccugcgaggaccucaagcccgugagcgaggaggucguggagaaccccacgauccagaaggacgugcuggagugcaacgucaagaccaccgagguggugggcgacaucauccugaagccggccaacaacucccucaagaucaccgaggaggucgggcacacggaccugauggccgcguacguggacaacagcucccugaccaucaagaagcccaacgagcucagccgcgugcugggccugaagacccucgccacccacgggcuggccgccgucaacggcgugcccugggacacgaucgccaacuacgcgaagccguuccugaacaagguggucuccaccaccaccaacaucgugacgcgcugccucaaccgggugugcaccaacuacaugcccuacuucuucacccugcugcuccagcugugcaccuucacccgcagcacgaacucccggaucaaggccagcaugcccaccaccaucgccaagaacaccgucaaguccgugggcaaguucugccuggaggccagcuucaacuaccucaagagccccaacuucuccaagcugaucaacaucaucaucugguuccugcuccugagcgugugccuggggucccucaucuacagcacggccgcgcugggcguccugauguccaaccucgggaugccgagcuacugcaccggcuaccgcgagggcuaccugaacuccaccaacgugaccaucgccacguacugcaccgggagcauccccugcuccgugugccugagcggccucgacucccuggacaccuaccccagccuggagaccauccagaucacgaucuccagcuucaagugggaccucaccgccuucgggcuggucgccgagugguuccuggccuacauccucuucacccgguucuucuacgugcugggccuggcggccaucaugcagcucuucuucuccuacuucgccgugcacuucaucagcaacuccuggcugauguggcugaucaucaaccugguccagauggcccccaucagcgcgauggugcgcauguacaucuucuucgccuccuucuacuacguguggaagagcuacguccacgugguggacgggugcaacagcuccaccugcaugaugugcuacaagcggaaccgcgccacgcgggucgagugcaccaccaucgugaacggcguccgccggagcuucuacguguacgccaacggcgggaagggcuucugcaagcuccacaacuggaacugcgugaacugcgacaccuucugcgccggguccacguucaucagcgacgaggucgcgcgcgaccugucccugcaguucaagcggccgaucaaccccaccgaccagagcuccuacaucguggacagcgugaccgucaagaacggcuccauccaccucuacuucgacaaggccgggcagaagaccuacgagcgccacagccugucccacuucgugaaccuggacaaccuccgggccaacaacacgaagggcagccugcccaucaacgugaucgucuucgacggcaaguccaagugcgaggagagcuccgccaagagcgccuccguguacuacagccagcugaugugccagcccauccuccugcuggaccaggcgcucguguccgacgucggggacagcgccgagguggccgugaagauguucgacgccuacgucaacaccuucagcuccaccuucaacgugccgauggagaagcugaagacccugguggccacggcggaggccgagcucgccaagaacgucagccuggacaacgugcuguccaccuucaucagcgccgcgcgccagggcuucguggacuccgacgucgagaccaaggacgugguggagugccucaagcugagccaccaguccgacaucgaggucaccggggacagcugcaacaacuacaugcugacguacaacaagguggagaacaugaccccccgggaccucggcgccugcaucgacugcuccgcccgccacaucaacgcccagguggccaagagccacaacaucgcgcugaucuggaacgucaaggacuucaugucccugagcgagcagcuccggaagcagauccgcuccgccgccaagaagaacaaccugcccuucaagcugaccugcgccaccacgcgccagguggugaacgucgugaccaccaagaucgcccucaaggggggcugaggacuagucccuguucccagagcccacuuuuuuuucuuuuuuugaaauaaaauagccugucuuucagaucucaaaggcucuuuucagagccaccaaaaaaaaaaaaaaaaaaaaaaaaaaaaaaaaaaaaaaaaaaaaaaaaaaaaaaaaaaaaaaaaaaaaaaaaaaaaaaaaaaaaaaaaaaaaaaaaaaaaa

SEQ ID NO: 19717 - RNA, 6113 nt, Artificial Sequence
  SARS-CoV-2__MT810640.1__non-structural protein 3 (NSP3) mRNA gc
aggagagucccgcagucggcguccagcggcucugcuuguucgugugugugucguugcaggccuuauucaagcuuaccauggcccccaccaaggugaccuucggcgacgacacggucaucgaggugcagggguacaagagcgugaacaucaccuucgagcuggacgagcgcaucgacaagguccucaacgagaagugcuccgccuacaccguggagcugggcaccgaggugaacgaguucgcgugcgucguggccgacgccgugaucaagacgcugcagccggucagcgagcuccugaccccccuggggaucgaccucgacgagugguccauggccaccuacuaccuguucgacgagagcggcgaguucaagcuggccucccacauguacugcagcuucuacccccccgacgaggacgaggaggagggggacugcgaggaggaggaguucgagccguccacccaguacgaguacggcacggaggacgacuaccagggcaagccccucgaguucggggcgaccagcgccgcccugcagcccgaggaggagcaggaggaggacuggcuggacgacgacucccagcagaccgugggccagcaggacgggagcgaggacaaccagaccacgaccauccagaccaucguggagguccagccccagcucgagauggagcugaccccgguggugcagacgaucgaggucaacuccuucagcggcuaccugaagcucaccgacaacguguacaucaagaacgccgacaucguggaggaggcgaagaaggucaagcccaccgugguggucaacgccgccaacguguaccugaagcacgggggcggcguggccggggcccugaacaaggcgaccaacaacgccaugcaggucgaguccgacgacuacaucgccacgaacggcccccucaagguggggggcagcugcguccuguccggccacaaccuggccaagcacugccuccacgugguggggcccaacgucaacaagggcgaggacauccagcugcugaagagcgccuacgagaacuucaaccagcacgaggugcuccuggcgccgcugcucuccgccgggaucuucggcgccgaccccauccacagccugcgggugugcgucgacaccgugcgcaccaacguguaccuggccgucuucgacaagaaccucuacgacaagcugguguccagcuuccuggagaugaagagcgagaagcagguggagcagaagaucgccgagauccccaaggaggaggucaagcccuucaucaccgaguccaagccgagcguggagcagcggaagcaggacgacaagaagaucaaggcgugcguggaggaggucacgaccacccucgaggagaccaaguuccugacggagaaccugcuccuguacaucgacaucaacgggaaccugcaccccgacuccgccacccucgugagcgacaucgacaucaccuuccugaagaaggacgcccccuacaucgugggcgacgucgugcaggagggcgugcugaccgccgucgugauccccacgaagaaggccgggggcaccaccgagaugcucgcgaaggcccugcgcaaggugccgaccgacaacuacaucacgaccuaccccgggcagggccugaacggguacaccgucgaggaggccaagaccgugcucaagaagugcaaguccgccuucuacauccugcccagcaucaucuccaacgagaagcaggagauccugggcaccgugagcuggaaccuccgggagaugcuggcgcacgccgaggagacgcgcaagcugaugcccgucugcguggagaccaaggccaucguguccaccauccagcggaaguacaagggcaucaagauccaggagggggucguggacuacggcgcccgcuucuacuucuacaccagcaagacgaccguggccucccugaucaacacccucaacgaccugaacgagacccuggucacgaugccgcucggguacgugacccacggccugaaccuggaggaggcggcccgguacaugcgcagccucaaggugcccgccaccgucuccgugagcucccccgacgccgugaccgccuacaacggguaccugacgagcuccagcaagacccccgaggagcacuucaucgagaccaucucccuggcgggcagcuacaaggacuggagcuacuccggccagagcacccagcucgggaucgaguuccugaagcggggcgacaaguccgucuacuacacgagcaacccgaccaccuuccaccuguacggggaggugaucaccuucgacaaccucaagacgcugcugucccuccgcgaggugcggaccaucaaggucuucaccaccguggacaacaucaaccugcacacgcagguggucgacaugagcaugaccuacggccagcaguucggccccaccuaccuggacggggccgacgugaccaagaucaagccccacaacucccacgagggcaagacguucuacgugcucccgaacgacgacacccugcgcgucgaggccuucgaguacuaccacaccaccgaccccagcuuccuggggcgguacaucuccgcccucaaccacacgaagaaguggaaguacccccaggugaacggccugaccagcaucaagugggccgacaacaacugcuaccuggcgaccgcccuccugacccugcagcagaucgagcucaaguucaaccccccggcccugcaggacgccuacuaccgcgcgcgggccggggaggccgccaacuucugcgcccugauccucgcguacugcaacaagacggugggcgagcugggcgacguccgcgagaccauguccuaccuguuccagcacgccaaccucgacagcugcaagcgggugcugaacgucgugugcaagaccugcgggcagcagcagaccacccugaagggcguggaggccgucauguacauggggacgcucuccuacgagcaguucaagaagggcgugcagauccccugcaccugcgggaagcaggccaccaaguaccuggugcagcaggagagccccuucgucaugauguccgcccccccggcgcaguacgagcugaagcacggcaccuucacgugcgccagcgaguacaccggcaacuaccagugcgggcacuacaagcacaucaucuccaaggagacccucuacugcaucgacggcgcccugcugaccaagagcagcgaguacaaggggcccaucacggacguguucuacaaggagaacuccuacaccaccaccaucaagcccgugacguacaagcucgacggcgucgugugcaccgagaucgaccccaagcuggacaacuacuacaagaaggacaacagcuacuucaccgagcagccgaucgaccuggugcccaaccagcccuaccccaacgccuccuucgacaacuucaaguucgucugcgacaacaucaaguucgccgacgaccucaaccagcugaccggguacaagaagccggcgagccgcgagcugaaggugacguucuuccccgaccucaacggcgacguggucgccaucgacuacaagcacuacacccccuccuucaagaagggcgccaagcugcugcacaagcccaucguguggcacgugaacaacgccaccaacaaggcgaccuacaagccgaacacguggugcauccggugccucuggagcaccaagcccgucgagaccuccaacagcuucgacgugcugaaguccgaggacgcccaggggauggacaaccuggccugcgaggaccucaagcccgugagcgaggaggucguggagaaccccaccauccagaaggacgugcuggagugcaacgucaagacgaccgagguggugggcgacaucauccugaagccggccaacaacucccucaagaucaccgaggaggucgggcacaccgaccugauggccgcguacguggacaacagcucccugacgaucaagaagcccaacgagcucagccgcgugcugggccugaagacccucgccacccacgggcuggccgccgucaacuccgugcccugggacaccaucgccaacuacgcgaagccguuccugaacaagguggucagcacgaccaccaacaucgugacccgcugccucaaccgggugugcacgaacuacaugcccuacuucuucacccugcugcuccagcugugcaccuucacccgcuccaccaacagccggaucaaggccuccaugcccacgaccaucgccaagaacaccgucaagagcgugggcaaguucugccuggaggccagcuucaacuaccucaagucccccaacuucagcaagcugaucaacaucaucaucugguuccugcuccuguccgugugccugggcagccucaucuacuccaccgccgcgcuggggguccugaugagcaaccucggcaugccguccuacugcacgggguaccgcgagggcuaccugaacagcaccaacgugaccaucgccaccuacugcacgggcuccauccccugcagcgugugccuguccgggcucgacagccuggacaccuaccccucccuggagaccauccagaucaccaucagcuccuucaagugggaccucacggccuucggccuggucgccgagugguuccuggccuacauccucuucacccgguucuucuacgugcuggggcuggcggccaucaugcagcucuucuucagcuacuucgccgugcacuucaucuccaacagcuggcugauguggcugaucaucaaccugguccagauggcccccaucuccgcgauggugcgcauguacaucuucuucgccagcuucuacuacguguggaagagcuacguccacgugguggacggcugcaacuccagcaccugcaugaugugcuacaagcggaaccgcgccacccgggucgagugcacgaccaucgugaacgggguccgccgguccuucuacguguacgccaacggcggcaagggguucugcaagcuccacaacuggaacugcgugaacugcgacaccuucugcgccggcagcaccuucaucuccgacgaggucgcgcgcgaccugagccugcaguucaagcggccgaucaaccccacggaccaguccagcuacaucguggacuccgugaccgucaagaacgggagcauccaccucuacuucgacaaggccggccagaagaccuacgagcgccacucccugagccacuucgugaaccuggacaaccuccgggccaacaacaccaaggggucccugcccaucaacgugaucgucuucgacggcaagagcaagugcgaggaguccagcgccaaguccgccagcguguacuacucccagcugaugugccagcccauccuccugcuggaccaggcgcucgugagcgacgucggcgacagcgccgagguggccgugaagauguucgacgccuacgucaacacguucuccagcaccuucaacgugccgauggagaagcugaagacccugguggccaccgcggaggccgagcucgccaagaacgucucccuggacaacgugcugagcacguucaucuccgccgcgcgccagggguucguggacagcgacgucgagaccaaggacgugguggagugccucaagcugucccaccagagcgacaucgaggucaccggcgacuccugcaacaacuacaugcugaccuacaacaagguggagaacaugacgccccgggaccucggggccugcaucgacugcagcgcccgccacaucaacgcccagguggccaagucccacaacaucgcgcugaucuggaacgucaaggacuucaugagccuguccgagcagcuccggaagcagauccgcagcgccgccaagaagaacaaccugcccuucaagcugaccugcgccaccacccgccagguggugaacgucgugacgaccaagaucgcccucaagggcgggugaggacuagucccuguucccagagcccacuuuuuuuucuuuuuuugaaauaaaauagccugucuuucagaucucaaaggcucuuuucagagccaccaaaaaaaaaaaaaaaaaaaaaaaaaaaaaaaaaaaaaaaaaaaaaaaaaaaaaaaaaaaaaaaaaaaaaaaaaaaaaaaaaaaaaaaaaaaaaaaaaaaaa

SEQ ID NO: 19718 - RNA, 6113 nt, Artificial Sequence
  SARS-CoV-2__MT810661.1__non-structural protein 3 (NSP3) mRNA gc
aggagagucccgcagucggcguccagcggcucugcuuguucgugugugugucguugcaggccuuauucaagcuuaccauggcccccaccaaggugaccuucggcgacgacacggucaucgaggugcagggguacaagagcgugaacaucaccuucgagcuggacgagcgcaucgacaagguccucaacgagaagugcuccgccuacaccguggagcugggcaccgaggugaacgaguucgcgugcgucguggccgacgccgugaucaagacgcugcagccggucagcgagcuccugaccccccuggggaucgaccucgacgagugguccauggccaccuacuaccuguucgacgagagcggcgaguucaagcuggccucccacauguacugcagcuucuacccccccgacgaggacgaggaggagggggacugcgaggaggaggaguucgagccguccacccaguacgaguacggcacggaggacgacuaccagggcaagccccucgaguucggggcgaccagcgccgcccugcagcccgaggaggagcaggaggaggacuggcuggacgacgacucccagcagaccgugggccagcaggacgggagcgaggacaaccagaccacgaccauccagaccaucguggagguccagccccagcucgagauggagcugaccccgguggugcagacgaucgaggucaacuccuucagcggcuaccugaagcucaccgacaacguguacaucaagaacgccgacaucguggaggaggcgaagaaggucaagcccaccgugguggucaacgccgccaacguguaccugaagcacgggggcggcguggccggggcccugaacaaggcgaccaacaacgccaugcaggucgaguccgacgacuacaucgccacgaacggcccccucaagguggggggcagcugcguccuguccggccacaaccuggccaagcacugccuccacgugguggggcccaacgucaacaagggcgaggacauccagcugcugaagagcgccuacgagaacuucaaccagcacgaggugcuccuggcgccgcugcucuccgccgggaucuucggcgccgaccccauccacagccugcgggugugcgucgacaccgugcgcaccaacguguaccuggccgucuucgacaagaaccucuacgacaagcugguguccagcuuccuggagaugaagagcgagaagcagguggagcagaagaucgccgagauccccaaggaggaggucaagcccuucaucaccgaguccaagccgagcguggagcagcggaagcaggacgacaagaagaucaaggcgugcguggaggaggucacgaccacccucgaggagaccaaguuccugacggagaaccugcuccuguacaucgacaucaacgggaaccugcaccccgacuccgccacccucgugagcgacaucgacaucaccuuccugaagaaggacgcccccuacaucgugggcgacgucgugcaggagggcgugcugaccgccgucgugauccccacgaagaaggccgggggcaccaccgagaugcucgcgaaggcccugcgcaaggugccgaccgacaacuacaucacgaccuaccccgggcagggccugaacggguacaccgucgaggaggccaagaccgugcucaagaagugcaaguccgccuucuacauccugcccagcaucaucuccaacgagaagcaggagauccugggcaccgugagcuggaaccuccgggagaugcuggcgcacgccgaggagacgcgcaagcugaugcccgucugcguggagaccaaggccaucguguccaccauccagcggaaguacaagggcaucaagauccaggagggggucguggacuacggcgcccgcuucuacuucuacaccagcaagacgaccguggccucccugaucaacacccucaacgaccugaacgagacccuggucacgaugccgcucggguacgugacccacggccugaaccuggaggaggcggcccgguacaugcgcagccucaaggugcccgccaccgucuccgugagcucccccgacgccgugaccgccuacaacggguaccugacgagcuccagcaagacccccgaggagcacuucaucgagaccaucucccuggcgggcagcuacaaggacuggagcuacuccggccagagcacccagcucgggaucgaguuccugaagcggggcgacaaguccgucuacuacacgagcaacccgaccaccuuccaccuggacggggaggugaucaccuucgacaaccucaagacgcugcugucccuccgcgaggugcggaccaucaaggucuucaccaccguggacaacaucaaccugcacacgcagguggucgacaugagcaugaccuacggccagcaguucggccccaccuaccuggacggggccgacgugaccaagaucaagccccacaacucccacgagggcaagacguucuacgugcucccgaacgacgacacccugcgcgucgaggccuucgaguacuaccacaccaccgaccccagcuuccuggggcgguacauguccgcccucaaccacacgaagaaguggaaguacccccaggugaacggccugaccagcaucaagugggccgacaacaacugcuaccuggcgaccgcccuccugacccugcagcagaucgagcucaaguucaaccccccggcccugcaggacgccuacuaccgcgcgcgggccggggaggccgccaacuucugcgcccugauccucgcguacugcaacaagacggugggcgagcugggcgacguccgcgagaccauguccuaccuguuccagcacgccaaccucgacagcugcaagcgggugcugaacgucgugugcaagaccugcgggcagcagcagaccacccugaagggcguggaggccgucauguacauggggacgcucuccuacgagcaguucaagaagggcgugcagauccccugcaccugcgggaagcaggccaccaaguaccuggugcagcaggagagccccuucgucaugauguccgcccccccggcgcaguacgagcugaagcacggcaccuucacgugcgccagcgaguacaccggcaacuaccagugcgggcacuacaagcacaucaccuccaaggagacccucuacugcaucgacggcgcccugcugacgaagagcagcgaguacaaggggcccaucaccgacguguucuacaaggagaacuccuacaccaccacgaucaagcccgugaccuacaagcucgacggcgucgugugcaccgagaucgaccccaagcuggacaacuacuacaagaaggacaacagcuacuucaccgagcagccgaucgaccugcuccccaaccagcccuaccccaacgccuccuucgacaacuucaaguucgugugcgacaacaucaaguucgccgacgaccugaaccagcugacgggguacaagaagccggcgagccgcgagcucaaggucaccuucuuccccgaccugaacggcgacgugguggccaucgacuacaagcacuacacccccuccuucaagaagggcgccaagcugcuccacaagcccaucgucuggcacgugaacaacgccaccaacaaggcgacguacaagccgaacaccuggugcauccggugccuguggagcaccaagcccguggagaccuccaacagcuucgacguccugaaguccgaggacgcccaggggauggacaaccucgccugcgaggaccugaagcccgugagcgaggagguggucgagaaccccacgauccagaaggacauccuggagugcaacgugaagaccaccgagguggucggcgacaucauccucaagccggccaacaacucccugaagaucaccgaggagguggggcacacggaccugauggccgcguacguggacaacagcucccucaccaucaagaagcccaacgagcugagccgcguccugggccucaagacccuggccacccacgggcuggccgccgugaacuccgugcccugggacacgaucgccaacuacgcgaagccguuccucaacaaggucgugagcaccaccaccaacaucgugacgcgcugccugaaccgggucugcaccaacuacaugcccuacuucuucacccugcuccugcagcugugcaccuucacccgcuccacgaacagccggaucaaggccuccaugcccaccaccaucgccaagaacaccgugaagagcgugggcaaguucugccucgaggccagcuucaacuaccugaagucccccaacuucagcaagcugaucaacaucaucaucugguuccuccugcuguccgucugccucggcagccugaucuacuccacggccgcgcugggggugcucaugagcaaccugggcaugccguccuacugcaccggguaccgcgagggcuaccugaacagcaccaacgugaccaucgccacguacugcaccggcuccauccccugcagcgucugccucuccgggcuggacagccuggacaccuaccccucccucgagaccauccagaucacgaucagcuccuucaagugggaccugaccgccuucggccugguggccgagugguuccucgccuacauccuguucacccgguucuucuacgugcuggggcucgcggccaucaugcagcuguucuucagcuacuucgccguccacuucaucuccaacagcuggcugauguggcugaucaucaaccucgugcagauggcccccaucuccgcgauggugcgcauguacaucuucuucgccagcuucuacuacgucuggaagagcuacgugcacguggucgacggcugcaacuccagcaccugcaugaugugcuacaagcggaaccgcgccacgcggguggagugcaccaccaucgugaacgggguccgccgguccuucuacguguacgccaacggcggcaagggguucugcaagcugcacaacuggaacugcgucaacugcgacaccuucugcgccggcagcacguucaucuccgacgagguggcgcgcgaccugagccuccaguucaagcggccgaucaaccccaccgaccaguccagcuacaucguggacuccgucaccgugaagaacgggagcauccaccuguacuucgacaaggccggccagaagaccuacgagcgccacucccugagccacuucgugaaccucgacaaccugcgggccaacaacacgaaggggucccugcccaucaacgucaucguguucgacggcaagagcaagugcgaggaguccagcgccaaguccgccagcguguacuacucccagcucaugugccagcccauccugcugcucgaccaggcgcuggucagcgacgugggcgacagcgccgagguggccgucaagauguucgacgccuacgugaacaccuucuccagcaccuucaacgugccgauggagaagcugaagacccucgucgccacggcggaggccgagcuggccaagaacgugucccuggacaacgugcucagcaccuucaucuccgccgcgcgccagggguucgucgacagcgacguggagaccaaggacguggucgagugccugaagcugucccaccagagcgacaucgaggugaccggcgacuccugcaacaacuacaugcucacguacaacaagguggagaacaugaccccccgggaccugggggccugcaucgacugcagcgcccgccacaucaacgcccaggucgccaagucccacaacaucgcgcugaucuggaacgugaaggacuucaugagccucuccgagcagcugcggaagcagauccgcagcgccgccaagaagaacaaccugcccuucaagcucaccugcgccaccacgcgccagguggucaacguggugaccaccaagaucgcccugaagggcgggugaggacuagucccuguucccagagcccacuuuuuuuucuuuuuuugaaauaaaauagccugucuuucagaucucaaaggcucuuuucagagccaccaaaaaaaaaaaaaaaaaaaaaaaaaaaaaaaaaaaaaaaaaaaaaaaaaaaaaaaaaaaaaaaaaaaaaaaaaaaaaaaaaaaaaaaaaaaaaaaaaaaaa

SEQ ID NO: 19719 - RNA, 6113 nt, Artificial Sequence
  SARS-CoV-2__MT810690.1__non-structural protein 3 (NSP3) mRNA gc
aggagagucccgcagucggcguccagcggcucugcuuguucgugugugugucguugcaggccuuauucaagcuuaccauggcccccaccaaggugaccuucggcgacgacacggucaucgaggugcagggguacaagagcgugaacaucaccuucgagcuggacgagcgcaucgacaagguccucaacgagaagugcuccgccuacaccguggagcugggcaccgaggugaacgaguucgcgugcgucguggccgacgccgugaucaagacgcugcagccggucagcgagcuccugaccccccuggggaucgaccucgacgagugguccauggccaccuacuaccuguucgacgagagcggcgaguucaagcuggccucccacauguacugcagcuucuacccccccgacgaggacgaggaggagggggacugcgaggaggaggaguucgagccguccacccaguacgaguacggcacggaggacgacuaccagggcaagccccucgaguucggggcgaccagcgccgcccugcagcccgaggaggagcaggaggaggacuggcuggacgacgacucccagcagaccgugggccagcaggacgggagcgaggacaaccagaccacgaccauccagaccaucguggagguccagccccagcucgagauggagcugaccccgguggugcagacgaucgaggucaacuccuucagcggcuaccugaagcucaccgacaacguguacaucaagaacgccgacaucguggaggaggcgaagaaggucaagcccaccgugguggucaacgccgccaacguguaccugaagcacgggggcggcguggccggggcccugaacaaggcgaccaacaacgccaugcaggucgaguccgacgacuacaucgccacgaacggcccccucaagguggggggcagcugcguccuguccggccacaaccuggccaagcacugccuccacgugguggggcccaacgucaacaagggcgaggacauccagcugcugaagagcgccuacgagaacuucaaccagcacgaggugcuccuggcgccgcugcucuccgccgggaucuucggcgccgaccccauccacagccugcgggugugcgucgacaccgugcgcaccaacguguaccuggccgucuucgacaagaaccucuacgacaagcugguguccagcuuccuggagaugaagagcgagaagcagguggagcagaagaucgccgagauccccaaggaggaggucaagcccuucaucaccgaguccaagccgagcguggagcagcggaagcaggacgacaagaagaucaaggcgugcguggaggaggucacgaccacccucgaggagaccaaguuccugacggagaaccugcuccuguacaucgacaucaacgggaaccugcaccccgacuccgccacccucgugagcgacaucgacaucaccuuccugaagaaggacgcccccuacaucgugggcgacgucgugcaggagggcgugcugaccgccgucgugauccccacgaagaaggccgggggcaccaccgagaugcucgcgaaggcccugcgcaaggugccgaccgacaacuacaucacgaccuaccccgggcagggccugaacggguacaccgucgaggaggccaagaccgugcucaagaagugcaaguccgccuucuacauccugcccagcaucaucuccaacgagaagcaggagauccugggcaccgugagcuggaaccuccgggagaugcuggcgcacgccgaggagacgcgcaagcugaugcccgucugcguggagaccaaggccaucguguccaccauccagcggaaguacaagggcaucaagauccaggagggggucguggacuacggcgcccgcuucuacuucuacaccagcaagacgaccguggccucccugaucaacacccucaacgaccugaacgagacccuggucacgaugccgcucggguacgugacccacggccugaaccuggaggaggcggcccgguacaugcgcagccucaaggugcccgccaccgucuccgugagcucccccgacgccgugaccgccuacaacggguaccugacgagcuccagcaagacccccgaggagcacuucaucgagaccaucucccuggcgggcagcuacaaggacuggagcuacuccggccagagcacccagcucgggaucgaguuccugaagcggggcgacaaguccgucuacuacacgagcaacccgaccaccuuccaccuggacggggaggugaucaccuucgacaaccucaagacgcugcugucccuccgcgaggugcggaccaucaaggucuucaccaccguggacaacaucaaccugcacacgcagguggucgacaugagcaugaccuacggccagcaguucggccccaccuaccuggacggggccgacgugaccaagaucaagccccacaacucccacgagggcaagacguucuacgugcucccgaacgacgacacccugcgcgucgaggccuucgaguacuaccacaccaccgaccccagcuuccuggggcgguacauguccgcccucaaccacacgaagaaguggaaguacccccaggugaacggccugaccagcaucaagugggccgacaacaacugcuaccuggcgaccgcccuccugacccugcagcagaucgagcucaaguucaaccccccggcccugcaggacgccuacuaccgcgcgcgggccggggaggccgccaacuucugcgcccugauccucgcguacugcaacaagacggugggcgagcugggcgacguccgcgagaccauguccuaccuguuccagcacgccaaccucgacagcugcaagcgggugcugaacgucgugugcaagaccugcgggcagcagcagaccacccugaagggcguggaggccgucauguacauggggacgcucuccuacgagcaguucaagaagggcgugcagauccccugcaccugcgggaagcaggccaccaaguaccuggugcagcaggagagccccuucgucaugauguccgcccccccggcgcaguacgagcugaagcacggcaccuucacgugcgccagcgaguacaccggcaacuaccagugcgggcacuacaagcacaucaccuccaaggagacccucuacugcaucgacggcgcccugcugacgaagagcagcgaguacaaggggcccaucaccgacguguucuacaaggagaacuccuacaccaccacgaucaagcccgugaccuacaagcucgacggcgucgugugcaccgagaucgaccccaagcuggacaacuacuacaagaaggacaacagcuacuucaccgagcagccgaucgaccuggugcccaaccagcccuaccccaacgccuccuucgacaacuucaaguucgucugcgacaacaucaaguucgccgacgaccucaaccagcugacgggguacaagaagccggcgagccgcgagcugaaggugaccuucuuccccgaccucaacggcgacguggucgccaucgacuacaagcacuacacccccuccuucaagaagggcgccaagcugcugcacaagcccaucguguggcacgugaacaacgccaccaacaaggcgacguacaagccgaacaccuggugcauccggugccucuggagcaccaagcccgucgagaccuccaacagcuucgacgugcugaaguccgaggacgcccaggggauggacaaccuggccugcgaggaccucaagcccgugagcgaggaggucguggagaaccccacgauccagaaggacgugcuggagugcaacgucaagaccaccgagguggugggcgacaucauccugaagccggccaacaacucccucaagaucaccgaggaggucgggcacacggaccugauggccgcguacguggacaacagcucccugaccaucaagaagcccaacgagcucagccgcgugcugggccugaagacccucgccacccacgggcuggccgccgucaacuccgugcccugggacacgaucgccaacuacgcgaagccguuccugaacaagguggucagcaccaccaccaacaucgugacgcgcugccucaaccgggugugcaccaacuacaugcccuacuucuucacccugcugcuccagcugugcaccuucacccgcuccacgaacagccggaucaaggccuccaugagcaccaccaucgccaagaacaccgucaagagcgugggcaaguucugccuggaggccuccuucaacuaccucaagagccccaacuucuccaagcugaucaacaucaucaucugguuccugcuccugagcgugugccugggcucccucaucuacagcacggccgcgcuggggguccugauguccaaccucggcaugcccagcuacugcaccggguaccgcgagggcuaccugaacuccaccaacgugaccaucgccacguacugcaccggcagcaucccgugcuccgugugccugagcgggcucgacucccuggacaccuaccccagccuggagaccauccagaucacgaucuccagcuucaagugggaccucaccgccuucggccuggucgccgagugguuccuggccuacauccucuucacccgguucuucuacgugcuggggcuggcggccaucaugcagcucuucuucuccuacuucgccgugcacuucaucagcaacuccuggcugauguggcugaucaucaaccugguccagauggcccccaucagcgcgauggugcgcauguacaucuucuucgccagcuucuacuacguguggaaguccuacguccacgugguggacggcugcaacagcuccaccugcaugaugugcuacaagcggaaccgcgccacgcgggucgagugcaccaccaucgugaacgggguccgccggagcuucuacguguacgccaacggcggcaagggguucugcaagcuccacaacuggaacugcgugaacugcgacaccuucugcgccggcuccacguucaucagcgacgaggucgcgcgcgaccugucccugcaguucaagcggcccaucaacccgaccgaccagagcuccuacaucguggacagcgugaccgucaagaacggguccauccaccucuacuucgacaaggccggccagaagaccuacgagcgccacagccugucccacuucgugaaccuggacaaccuccgggccaacaacacgaaggggagccugcccaucaacgugaucgucuucgacggcaaguccaagugcgaggagagcuccgccaagagcgccuccguguacuacagccagcugaugugccagcccauccuccugcuggaccaggcgcucgugagcgacgucggcgacuccgccgagguggccgugaagauguucgacgccuacgucaacaccuucagcuccaccuucaacgugcccauggagaagcugaagacccugguggccacggcggaggccgagcucgccaagaacgucagccuggacaacgugcuguccaccuucaucagcgccgcgcgccagggguucguggacuccgacgucgagaccaaggacgugguggagugccucaagcugagccaccaguccgacaucgaggucaccggcgacagcugcaacaacuacaugcugacguacaacaagguggagaacaugaccccgcgggaccucggggccugcaucgacugcuccgcccgccacaucaacgcccagguggccaagagccacaacaucgcgcugaucuggaacgucaaggacuucaugucccugagcgagcagcuccggaagcagauccgcuccgccgccaagaagaacaaccugcccuucaagcugaccugcgccaccacgcgccagguggugaacgucgugaccaccaagaucgcccucaagggcgggugaggacuagucccuguucccagagcccacuuuuuuuucuuuuuuugaaauaaaauagccugucuuucagaucucaaaggcucuuuucagagccaccaaaaaaaaaaaaaaaaaaaaaaaaaaaaaaaaaaaaaaaaaaaaaaaaaaaaaaaaaaaaaaaaaaaaaaaaaaaaaaaaaaaaaaaaaaaaaaaaaaaaa

SEQ ID NO: 19720 - RNA, 6113 nt, Artificial Sequence
  SARS-CoV-2__MT810701.1__non-structural protein 3 (NSP3) mRNA gc
aggagagucccgcagucggcguccagcggcucugcuuguucgugugugugucguugcaggccuuauucaagcuuaccauggcccccaccaaggugaccuucggcgacgacacggucaucgaggugcagggguacaagagcgugaacaucaccuucgagcuggacgagcgcaucgacaagguccucaacgagaagugcuccgccuacaccguggagcugggcaccgaggugaacgaguucgcgugcgucguggccgacgccgugaucaagacgcugcagccggucagcgagcuccugaccccccuggggaucgaccucgacgagugguccauggccaccuacuaccuguucgacgagagcggcgaguucaagcuggccucccacauguacugcagcuucuacccccccgacgaggacgaggaggagggggacugcgaggaggaggaggaguucgagccguccacccaguacgaguacggcacggaggacgacuaccagggcaagccccucgaguucggggcgaccagcgccgcccugcagcccgaggaggagcaggaggaggacuggcuggacgacgacucccagcagaccgugggccagcaggacgggagcgaggacaaccagaccacgaccauccagaccaucguggagguccagccccagcucgagauggagcugaccccgguggugcagacgaucgaggucaacuccuucagcggcuaccugaagcucaccgacaacguguacaucaagaacgccgacaucguggaggaggcgaagaaggucaagcccaccgugguggucaacgccgccaacguguaccugaagcacgggggcggcguggccggggcccugaacaaggcgaccaacaacgccaugcaggucgaguccgacgacuacaucgccacgaacggcccccucaagguggggggcagcugcguccuguccggccacaaccuggccaagcacugccuccacgugguggggcccaacgucaacaagggcgaggacauccagcugcugaagagcgccuacgagaacuucaaccagcacgaggugcuccuggcgccgcugcucuccgccgggaucuucggcgccgaccccauccacagccugcgggugugcgucgacaccgugcgcaccaacguguaccuggccgucuucgacaagaaccucuacgacaagcugguguccagcuuccuggagaugaagagcgagaagcagguggagcagaagaucgccgagauccccaaggaggaggucaagcccuucaucaccgaguccaagccgagcguggagcagcggaagcaggacgacaagaagaucaaggcgugcguggaggaggucacgaccacccucgaggagaccaaguuccugacggagaaccugcuccuguacaucgacaucaacgggaaccugcaccccgacuccgccacccucgugagcgacaucgacaucaccuuccugaagaaggacgcccccuacaucgugggcgacgucgugcaggagggcgugcugaccgccgucgugauccccacgaagaaggccgggggcaccaccgagaugcucgcgaaggcccugcgcaaggugccgaccgacaacuacaucacgaccuaccccgggcagggccugaacggguacaccgucgaggaggccaagaccgugcucaagaagugcaaguccgccuucuacauccugcccagcaucaucuccaacgagaagcaggagauccugggcaccgugagcuggaaccuccgggagaugcuggcgcacgccgaggagacgcgcaagcugaugcccgucugcguggagaccaaggccaucguguccaccauccagcggaaguacaagggcaucaagauccaggagggggucguggacuacggcgcccgcuucuacuucuacaccagcaagacgaccguggccucccugaucaacacccucaacgaccugaacgagacccuggucacgaugccgcucggguacgugacccacggccugaaccuggaggaggcggcccgguacaugcgcagccucaaggugcccgccaccgucuccgugagcucccccgacgccgugaccgccuacaacggguaccugacgagcuccagcaagacccccgaggagcacuucaucgagaccaucucccuggcgggcagcuacaaggacuggagcuacuccggccagagcacccagcucgggaucgaguuccugaagcggggcgacaaguccgucuacuacacgagcaacccgaccaccuuccaccuggacggggaggugaucaccuucgacaaccucaagacgcugcugucccuccgcgaggugcggaccaucaaggucuucaccaccguggacaacaucaaccugcacacgcagguggucgacaugagcaugaccuacggccagcaguucggccccaccuaccuggacggggccgacgugaccaagaucaagccccacaacucccacgagggcaagacguucuacgugcucccgaacgacgacacccugcgcgucgaggccuucgaguacuaccacaccaccgaccccagcuuccuggggcgguacauguccgcccucaaccacacgaagaaguggaaguacccccaggugaacggccugaccagcaucaagugggccgacaacaacugcuaccuggcgaccgcccuccugacccugcagcagaucgagcucaaguucaaccccccggcccugcaggacgccuacuaccgcgcgcgggccggggaggccgccaacuucugcgcccugauccucgcguacugcaacaagacggugggcgagcugggcgacguccgcgagaccauguccuaccuguuccagcacgccaaccucgacagcugcaagcgggugcugaacgucgugugcaagaccugcgggcagcagcagaccacccugaagggcguggaggccgucauguacauggggacgcucuccuacgagcaguucaagaagggcgugcagauccccugcaccugcgggaagcaggccaccaaguaccuggugcagcaggagagccccuucgucaugauguccgcccccccggcgcaguacgagcugaagcacggcaccuucacgugcgccagcgaguacaccggcaacuaccagugcgggcacuacaagcacaucaccuccaaggagacccucuacugcaucgacggcgcccugcugacgaagagcagcgaguacaaggggcccaucaccgacguguucuacaaggagaacuccuacaccaccacgaucaagcccgugaccuacaagcucgacggcgucgugugcaccgagaucgaccccaagcuggacaacuacuacaagaaggacaacagcuacuucaccgagcagccgaucgaccuggugcccaaccagcccuaccccaacgccuccuucgacaacuucaaguucgucugcgacaacaucaaguucgccgacgaccucaaccagcugacgggguacaagaagccggcgagccgcgagcugaaggugaccuucuuccccgaccucaacggcgacguggucgccaucgacuacaagcacuacacccccuccuucaagaagggcgccaagcugcugcacaagcccaucguguggcacgugaacaacgccaccaacaaggcgacguacaagccgaacaccuggugcauccggugccucuggagcaccaagcccgucgagaccuccaacagcuucgacgugcugaaguccgaggacgcccaggggauggacaaccuggccugcgaggaccucaagcccgugagcgaggaggucguggagaaccccacgauccagaaggacgugcuggagugcaacgucaagaccaccgagguggugggcgacaucauccugaagccggccaacaacucccucaagaucaccgaggaggucgggcacacggaccugauggccgcguacguggacaacagcucccugaccaucaagaagcccaacgagcucagccgcgugcugggccugaagacccucgccacccacgggcuggccgccgucaacuccgugcccugggacacgaucgccaacuacgcgaagccguuccugaacaagguggucagcaccaccaccaacaucgugacgcgcugccucaaccgggugugcaccaacuacaugcccuacuucuucacccugcugcuccagcugugcaccuucacccgcuccacgaacagccggaucaaggccuccaugcccaccaccaucgccaagaacaccgucaagagcgugggcaaguucugccuggaggccagcuucaacuaccucaagucccccaacuucagcaagcugaucaacaucaucaucugguuccugcuccuguccgugugccugggcagccucaucuacuccacggccgcgcuggggguccugaugagcaaccucggcaugccguccuacugcaccggguaccgcgagggcuaccugaacagcaccaacgugaccaucgccacguacugcaccggcuccauccccugcagcgugugccuguccgggcucgacagccuggacaccuaccccucccuggagaccauccagaucacgaucagcuccuucaagugggaccucaccgccuucggccuggucgccgagugguuccuggccuacauccucuucacccgguucuucuacgugcuggggcuggcggccaucaugcagcucuucuucagcuacuucgccgugcacuucaucuccaacagcuggcugauguggcugaucaucaaccugguccagauggcccccaucuccgcgauggugcgcauguacaucuucuucgccagcuucuacuacguguggaagagcuacguccacgugguggacggcugcaacuccagcaccugcaugaugugcuacaagcggaaccgcgccacgcgggucgagugcaccaccaucgugaacgggguccgccgguccuucuacguguacgccaacggcggcaagggguucugcaagcuccacaacuggaacugcgugaacugcgacaccuucugcgccggcagcacguucaucuccgacgaggucgcgcgcgaccugagccugcaguucaagcggccgaucaaccccaccgaccaguccagcuacaucguggacuccgugaccgucaagaacgggagcauccaccucuacuucgacaaggccggccagaagaccuacgagcgccacucccugagccacuucgugaaccuggacaaccuccgggccaacaacacgaaggggucccugcccaucaacgugaucgucuucgacggcaagagcaagugcgaggaguccagcgccaaguccgccagcguguacuacucccagcugaugugccagcccauccuccugcuggaccaggcgcucgugagcgacgucggcgacagcgccgagguggccgugaagauguucgacgccuacgucaacaccuucuccagcaccuucaacgugccgauggagaagcugaagacccugguggccacggcggaggccgagcucgccaagaacgucucccuggacaacgugcugagcaccuucaucuccgccgcgcgccagggguucguggacagcgacgucgagaccaaggacgugguggagugccucaagcugucccaccagagcgacaucgaggucaccggcgacuccugcaacaacuacaugcugacguacaacaagguggagaacaugaccccccgggaccucggggccugcaucgacugcagcgcccgccacaucaacgcccagguggccaagucccacaacaucgcgcugaucuggaacgucaaggacuucaugagccuguccgagcagcuccggaagcagauccgcagcgccgccaagaagaacaaccugcccuucaagcugaccugcgccaccacgcgccagguggugaacgucgugaccaccaagaucgcccucaagggcugaggacuagucccuguucccagagcccacuuuuuuuucuuuuuuugaaauaaaauagccugucuuucagaucucaaaggcucuuuucagagccaccaaaaaaaaaaaaaaaaaaaaaaaaaaaaaaaaaaaaaaaaaaaaaaaaaaaaaaaaaaaaaaaaaaaaaaaaaaaaaaaaaaaaaaaaaaaaaaaaaaaaa

SEQ ID NO: 19721 - RNA, 6113 nt, Artificial Sequence
  SARS-CoV-2__MT810727.1__non-structural protein 3 (NSP3) mRNA gc
aggagagucccgcagucggcguccagcggcucugcuuguucgugugugugucguugcaggccuuauucaagcuuaccauggcccccaccaaggugaccuucggcgacgacacggucaucgaggugcagggguacaagagcgugaacaucaccuucgagcuggacgagcgcaucgacaagguccucaacgagaagugcuccgccuacaccguggagcugggcaccgaggugaacgaguucgcgugcgucguggccgacgccgugaucaagacgcugcagccggucagcgagcuccugaccccccuggggaucgaccucgacgagugguccauggccaccuacuaccuguucgacgagagcggcgaguucaagcuggccucccacauguacugcagcuucuacccccccgacgaggacgaggaggagggggacugcgaggaggaggaguucgagccguccacccaguacgaguacggcacggaggacgacuaccagggcaagccccucgaguucggggcgaccagcgccgcccugcagcccgaggaggagcaggaggaggacuggcuggacgacgacucccagcagaccgugggccagcaggacgggagcgaggacaaccagaccacgaccauccagaccaucguggagguccagccccagcucgagauggagcugaccccgguggugcagacgaucgaggucaacuccuucagcggcuaccugaagcucaccgacaacguguacaucaagaacgccgacaucguggaggaggcgaagaaggucaagcccaccgugguggucaacgccgccaacguguaccugaagcacgggggcggcguggccggggcccugaacaaggcgaccaacaacgccaugcaggucgaguccgacgacuacaucgccacgaacggcccccucaagguggggggcagcugcguccuguccggccacaaccuggccaagcacugccuccacgugguggggcccaacgucaacaagggcgaggacauccagcugcugaagagcgccuacgagaacuucaaccagcacgaggugcuccuggcgccgcugcucuccgccgggaucuucggcgccgaccccauccacagccugcgggugugcgucgacaccgugcgcaccaacguguaccuggccgucuucgacaagaaccucuacgacaagcugguguccagcuuccuggagaugaagagcgagaagcagguggagcagaagaucgccgagauccccaaggaggaggucaagcccuucaucaccgaguccaagccgagcguggagcagcggaagcaggacgacaagaagaucaaggcgugcguggaggaggucacgaccacccucgaggagaccaaguuccugacggagaaccugcuccuguacaucgacaucaacgggaaccugcaccccgacuccgccacccucgugagcgacaucgacaucaccuuccugaagaaggacgcccccuacaucgugggcgacgucgugcaggagggcgugcugaccgccgucgugauccccacgaagaaggccgggggcaccaccgagaugcucgcgaaggcccugcgcaaggugccgaccgacaacuacaucacgaccuaccccgggcagggccugaacggguacaccgucgaggaggccaagaccgugcucaagaagugcaaguccgccuucuacauccugcccagcaucaucuccaacgagaagcaggagauccugggcaccgugagcuggaaccuccgggagaugcuggcgcacgccgaggagacgcgcaagcugaugcccgucugcguggagaccaaggccaucguguccaccauccagcggaaguacaagggcaucaagauccaggagggggucguggacuacggcgcccgcuucuacuucuacaccagcaagacgaccguggccucccugaucaacacccucaacgaccugaacgagacccuggucacgaugccgcucggguacgugacccacggccugaaccuggaggaggcggcccgguacaugcgcagccucaaggugcccgccaccgucuccgugagcucccccgacgccgugaccgccuacaacggguaccugacgagcuccagcaagacccccgaggagcacuucaucgagaccaucucccuggcgggcagcuacaaggacuggagcuacuccggccagagcacccagcucgggaucgaguuccugaagcggggcgacaaguccgucuacuacacgagcaacccgaccaccuuccaccuggacggggaggugaucaccuucgacaaccucaagacgcugcugucccuccgcgaggugcggaccaucaaggucuucaccaccguggacaacaucaaccugcacacgcagguggucgacaugagcaugaccuacggccagcaguucggccccaccuaccuggacggggccgacgugaccaagaucaagccccacaacucccacgagggcaagacguucuacgugcucccgaacgacgacacccugcgcgucgaggccuucgaguacuaccacaccaccgaccccagcuuccuggggcgguacauguccgcccucaaccacacgaagaaguggaaguacccccaggugaacggccugaccagcaucaagugggccgacaacaacugcuaccuggcgaccgcccuccugacccugcagcagaucgagcucaaguucaaccccccggcccugcaggacgccuacuaccgcgcgcgggccggggaggccgccaacuucugcgcccugauccucgcguacugcaacaagacggugggcgagcugggcgacguccgcgagaccauguccuaccuguuccagcacgccaaccucgacagcugcaagcgggugcugaacgucgugugcaagaccugcgggcagcagcagaccacccugaagggcguggaggccgucauguacauggggacgcucuccuacgagcaguucaagaagggcgugcagauccccugcaccugcgggaagcaggccaccaaguaccuggugcagcaggagagccccuucgucaugauguccgcccccccggcgcaguacgagcugaagcacggcaccuucacgugcgccagcgaguacaccggcaacuaccagugcgggcacuacaagcacaucaccuccaaggagacccucuacugcaucgacggcgcccugcugacgaagagcagcgaguacaaggggcccaucaccgacguguucuacaaggagaacuccuacaccaccacgaucaagcccgugaccuacaagcucgacggcgucgugugcaccgagaucgaccccaagcuggacaacuacuacaagaaggacaacagcuacuucaccgagcagccgaucgaccuggugcccaaccagcccuaccccaacgccuccuucgacaacuucaaguucgucugcgacaacaucaaguucgccgacgaccucaaccagcugacgggguacaagaagccggcgagccgcgagcugaaggugaccuucuuccccgaccucaacggcgacguggucgccaucgacuacaagcacuacacccccuccuucaagaagggcgccaagcugcugcacaagcccaucguguggcacgugaacaacgccaccaacaaggcgacguacaagccgaacaccuggugcauccggugccucuggagcaccaagcccgucgagaccuccaacagcuucgacgugcugaaguccgaggacgcccaggggauggacaaccuggccugcgaggaccucaagcccgugagcgaggaggucguggagaaccccacgauccagaaggacgugcuggagugcaacgucaagaccaccgagguggugggcgacaucauccugaagccggccaacaacucccucaagaucaccgaggaggucgggcacacggaccugauggccgcguacguggacaacagcucccugaccaucaagaagcccaacgagcucagccgcgugcugggccugaagacccucgccacccacgggcuggccgccgucaacuccgugcccugggacacgaucgccaacuacgcgaagccguuccugaacaagguggucagcaccaccaccaacaucgugacgcgcugccucaaccgggugugcaccaacuacaugcccuacuucuucacccugcugcuccagcugugcaccuucacccgcuccacgaacagccggaucaaggccuccaugcccaccaccaucgccaagaacaccgucaagagcgugggcaaguucugccuggaggcccucuucaacuaccugaagagccccaacuucuccaagcugaucaacaucaucaucugguuccuccugcugagcgugugccucggcucccugaucuacagcacggccgcgcuggggguccucauguccaaccugggcaugccgagcuacugcaccggguaccgcgagggcuaccugaacuccaccaacgugaccaucgccacguacugcaccggcagcauccccugcuccgugugccucagcgggcuggacucccuggacaccuaccccagccucgagaccauccagaucacgaucuccagcuucaagugggaccugaccgccuucggccuggucgccgagugguuccucgccuacauccuguucacccgguucuucuacgugcuggggcucgcggccaucaugcagcuguucuucuccuacuucgccgugcacuucaucagcaacuccuggcugauguggcugaucaucaaccucguccagauggcccccaucagcgcgauggugcgcauguacaucuucuucgccuccuucuacuacguguggaagagcuacguccacgugguggacggcugcaacagcuccaccugcaugaugugcuacaagcggaaccgcgccacgcgggucgagugcaccaccaucgugaacgggguccgccggagcuucuacguguacgccaacggcggcaagggguucugcaagcugcacaacuggaacugcgugaacugcgacaccuucugcgccggcuccacguucaucagcgacgaggucgcgcgcgaccugucccuccaguucaagcggccgaucaaccccaccgaccagagcuccuacaucguggacagcgugaccgucaagaacggguccauccaccuguacuucgacaaggccggccagaagaccuacgagcgccacagccugucccacuucgugaaccucgacaaccugcgggccaacaacacgaaggggagccugcccaucaacgugaucgucuucgacggcaaguccaagugcgaggagagcuccgccaagagcgccuccguguacuacagccagcucaugugccagcccauccugcugcucgaccaggcgcugguguccgacgucggcgacagcgccgagguggccgugaagauguucgacgccuacgucaacaccuucagcuccaccuucaacgugccgauggagaagcugaagacccucguggccacggcggaggccgagcuggccaagaacgucagccuggacaacgugcucuccaccuucaucagcgccgcgcgccagggguucguggacuccgacgucgagaccaaggacgugguggagugccugaagcugagccaccaguccgacaucgaggucaccggcgacagcugcaacaacuacaugcucacguacaacaagguggagaacaugaccccccgggaccugggggccugcaucgacugcuccgcccgccacaucaacgcccagguggccaagagccacaacaucgcgcugaucuggaacgucaaggacuucaugucccucagcgagcagcugcggaagcagauccgcuccgccgccaagaagaacaaccugcccuucaagcucaccugcgccaccacgcgccagguggugaacgucgugaccaccaagaucgcccugaagggcgggugaggacuagucccuguucccagagcccacuuuuuuuucuuuuuuugaaauaaaauagccugucuuucagaucucaaaggcucuuuucagagccaccaaaaaaaaaaaaaaaaaaaaaaaaaaaaaaaaaaaaaaaaaaaaaaaaaaaaaaaaaaaaaaaaaaaaaaaaaaaaaaaaaaaaaaaaaaaaaaaaaaaaa

SEQ ID NO: 19722 - RNA, 6113 nt, Artificial Sequence
  SARS-CoV-2__MT810827.1__non-structural protein 3 (NSP3) mRNA gc
aggagagucccgcagucggcguccagcggcucugcuuguucgugugugugucguugcaggccuuauucaagcuuaccauggcccccaccaaggugaccuucggcgacgacacggucaucgaggugcagggguacaagagcgugaacaucaccuucgagcuggacgagcgcaucgacaagguccucaacgagaagugcuccgccuacaccguggagcugggcaccgaggugaacgaguucgcgugcgucguggccgacgccgugaucaagacgcugcagccggucagcgagcuccugaccccccuggggaucgaccucgacgagugguccauggccaccuacuaccuguucgacgagagcggcgaguucaagcuggccucccacauguacugcagcuucuacccccccgacgaggacgaggaggagggggacugcgaggaggaggaguucgagccguccacccaguacgaguacggcacggaggacgacuaccagggcaagccccucgaguucggggcgaccagcgccgcccugcagcccgaggaggagcaggaggaggacuggcuggacgacgacucccagcagaccgugggccagcaggacgggagcgaggacaaccagaccacgaccauccagaccaucguggagguccagccccagcucgagauggagcugaccccgguggugcagacgaucgaggucaacuccuucagcggcuaccugaaguucaccgacaacguguacaucaagaacgccgacaucguggaggaggcgaagaaggucaagcccaccgugguggucaacgccgccaacguguaccucaagcacgggggcggcguggccggggcccugaacaaggcgaccaacaacgccaugcaggucgaguccgacgacuacaucgccacgaacggcccccugaagguggggggcagcugcguccucuccggccacaaccuggccaagcacugccugcacgugguggggcccaacgucaacaagggcgaggacauccagcuccugaagagcgccuacgagaacuucaaccagcacgaggugcugcucgcgccgcugcuguccgccgggaucuucggcgccgaccccauccacagccuccgggugugcgucgacaccgugcgcaccaacguguaccuggccgucuucgacaagaaccuguacgacaagcucguguccagcuuccuggagaugaagagcgagaagcagguggagcagaagaucgccgagauccccaaggaggaggucaagcccuucaucaccgaguccaagccgagcguggagcagcggaagcaggacgacaagaagaucaaggcgugcguggaggaggucacgaccacccuggaggagaccaaguuccucacggagaaccugcugcucuacaucgacaucaacgggaaccugcaccccgacuccgccacccuggugagcgacaucgacaucaccuuccucaagaaggacgcccccuacaucgugggcgacgucgugcaggagggcgugcugaccgccgucgugauccccacgaagaaggccgggggcaccaccgagaugcuggcgaaggcccuccgcaaggugccgaccgacaacuacaucacgaccuaccccgggcagggccugaacggguacaccgucgaggaggccaagaccgugcugaagaagugcaaguccgccuucuacauccuccccagcaucaucuccaacgagaagcaggagauccugggcaccgugagcuggaaccugcgggagaugcucgcgcacgccgaggagacgcgcaagcugaugcccgucugcguggagaccaaggccaucguguccaccauccagcggaaguacaagggcaucaagauccaggagggggucguggacuacggcgcccgcuucuacuucuacaccagcaagacgaccguggccucccugaucaacacccugaacgaccucaacgagacccuggucacgaugccgcugggguacgugacccacggccucaaccuggaggaggcggcccgguacaugcgcagccugaaggugcccgccaccgucuccgugagcucccccgacgccgugaccgccuacaacggguaccucacgagcuccagcaagacccccgaggagcacuucaucgagaccaucucccuggcgggcagcuacaaggacuggagcuacuccggccagagcacccagcuggggaucgaguuccucaagcggggcgacaaguccgucuacuacacgagcaacccgaccaccuuccaccuggacggggaggugaucaccuucgacaaccugaagacgcuccugucccugcgcgaggugcggaccaucaaggucuucaccaccguggacaacaucaaccuccacacgcagguggucgacaugagcaugaccuacggccagcaguucggccccaccuaccuggacggggccgacgugaccaagaucaagccccacaacucccacgagggcaagacguucuacgugcugccgaacgacgacacccuccgcgucgaggccuucgaguacuaccacaccaccgaccccagcuuccuggggcgguacauguccgcccugaaccacacgaagaaguggaaguacccccaggugaacggccucaccagcaucaagugggccgacaacaacugcuaccuggcgaccgcccugcucacccugcagcagaucgagcugaaguucaaccccccggcccuccaggacgccuacuaccgcgcgcgggccggggaggccgccaacuucugcgcccugauccuggcguacugcaacaagacggugggcgagcucggcgacguccgcgagaccauguccuaccuguuccagcacgccaaccuggacagcugcaagcgggugcucaacgucgugugcaagaccugcgggcagcagcagaccacccugaagggcguggaggccgucauguacauggggacgcuguccuacgagcaguucaagaagggcgugcagauccccugcaccugcgggaagcaggccaccaaguaccucgugcagcaggagagccccuucgucaugauguccgcccccccggcgcaguacgagcugaagcacggcaccuucacgugcgccagcgaguacaccggcaacuaccagugcgggcacuacaagcacaucaccuccaaggagacccuguacugcaucgacggcgcccuccugacgaagagcagcgaguacaaggggcccaucaccgacguguucuacaaggagaacuccuacaccaccacgaucaagcccgugaccuacaagcuggacggcgucgugugcaccgagaucgaccccaagcucgacaacuacuacaagaaggacaacagcuacuucaccgagcagccgaucgaccuggugcccaaccagcccuaccccaacgccuccuucgacaacuucaaguucgucugcgacaacaucaaguucgccgacgaccugaaccagcucacgggguacaagaagccggcgagccgcgagcugaaggugaccuucuuccccgaccugaacggcgacguggucgccaucgacuacaagcacuacacccccuccuucaagaagggcgccaagcuccugcacaagcccaucguguggcacgugaacaacgccaccaacaaggcgacguacaagccgaacaccuggugcauccggugccuguggagcaccaagcccgucgagaccuccaacagcuucgacgugcucaaguccgaggacgcccaggggauggacaaccuggccugcgaggaccugaagcccgugagcgaggaggucguggagaaccccacgauccagaaggacgugcucgagugcaacgucaagaccaccgagguggugggcgacaucauccugaagccggccaacaacucccugaagaucaccgaggaggucgggcacacggaccucauggccgcguacguggacaacagcucccugaccaucaagaagcccaacgagcugagccgcgugcucggccugaagacccuggccacccacgggcucgccgccgucaacuccgugcccugggacacgaucgccaacuacgcgaagccguuccugaacaagguggucagcaccaccaccaacaucgugacgcgcugccugaaccgggugugcaccaacuacaugcccuacuucuucacccuccugcugcagcucugcaccuucacccgcuccacgaacagccggaucaaggccuccaugcccaccaccaucgccaagaacaccgucaagagcgugggcaaguucugccuggaggccagcuucaacuaccugaagucccccaacuucagcaagcucaucaacaucaucaucugguuccugcugcucuccgugugccugggcagccugaucuacuccacggccgcgcucgggguccugaugagcaaccugggcaugccguccuacugcaccggguaccgcgagggcuaccucaacagcaccaacgugaccaucgccacguacugcaccggcuccauccccugcagcgugugccuguccgggcuggacagccucgacaccuaccccucccuggagaccauccagaucacgaucagcuccuucaagugggaccugaccgccuucggccucgucgccgagugguuccuggccuacauccuguucacccgguucuucuacgugcucgggcuggcggccaucaugcagcuguucuucagcuacuucgccgugcacuucaucuccaacagcuggcucauguggcugaucaucaaccugguccagauggcccccaucuccgcgauggugcgcauguacaucuucuucgccagcuucuacuacguguggaagagcuacguccacgugguggacggcugcaacuccagcaccugcaugaugugcuacaagcggaaccgcgccacgcgggucgagugcaccaccaucgugaacgggguccgccgguccuucuacguguacgccaacggcggcaagggguucugcaagcugcacaacuggaacugcgugaacugcgacaccuucugcgccggcagcacguucaucuccgacgaggucgcgcgcgaccucagccugcaguucaagcggccgaucaaccccaccgaccaguccagcuacaucguggacuccgugaccgucaagaacgggagcauccaccuguacuucgacaaggccggccagaagaccuacgagcgccacucccucagccacuucgugaaccuggacaaccugcgggccaacaacacgaaggggucccuccccaucaacgugaucgucuucgacggcaagagcaagugcgaggaguccagcgccaaguccgccagcguguacuacucccagcugaugugccagcccauccugcuccuggaccaggcgcuggugagcgacgucggcgacagcgccgagguggccgugaagauguucgacgccuacgucaacaccuucuccagcaccuucaacgugccgauggagaagcucaagacccugguggccacggcggaggccgagcuggccaagaacgucucccucgacaacgugcugagcaccuucaucuccgccgcgcgccagggguucguggacagcgacgucgagaccaaggacgugguggagugccugaagcucucccaccagagcgacaucgaggucaccggcgacuccugcaacaacuacaugcugacguacaacaagguggagaacaugaccccccgggaccugggggccugcaucgacugcagcgcccgccacaucaacgcccagguggccaagucccacaacaucgcgcucaucuggaacgucaaggacuucaugagccuguccgagcagcugcggaagcagauccgcagcgccgccaagaagaacaaccuccccuucaagcugaccugcgccaccacgcgccagguggugaacgucgugaccaccaagaucgcccugaagggcgggugaggacuagucccuguucccagagcccacuuuuuuuucuuuuuuugaaauaaaauagccugucuuucagaucucaaaggcucuuuucagagccaccaaaaaaaaaaaaaaaaaaaaaaaaaaaaaaaaaaaaaaaaaaaaaaaaaaaaaaaaaaaaaaaaaaaaaaaaaaaaaaaaaaaaaaaaaaaaaaaaaaaaa

SEQ ID NO: 19723 - RNA, 6113 nt, Artificial Sequence
  SARS-CoV-2__MT810831.1__non-structural protein 3 (NSP3) mRNA gc
aggagagucccgcagucggcguccagcggcucugcuuguucgugugugugucguugcaggccuuauucaagcuuaccauggcccccaccaaggugaccuucggcgacgacacggucaucgaggugcagggguacaagagcgugaacaucaccuucgagcuggacgagcgcaucgacaagguccucaacgagaagugcuccgccuacaccguggagcugggcaccgaggugaacgaguucgcgugcgucguggccgacgccgugaucaagacgcugcagccggucagcgagcuccugaccccccuggggaucgaccucgacgagugguccauggccaccuacuaccuguucgacgagagcggcgaguucaagcuggccucccacauguacugcagcuucuacccccccgacgaggacgaggaggagggggacugcgaggaggaggaguucgagccguccacccaguacgaguacggcacggaggacgacuaccagggcaagccccucgaguucggggcgaccagcgccgcccugcagcccgaggaggagcaggaggaggacuggcuggacgacgacucccagcagaccgugggccagcaggacgggagcgaggacaaccagaccacgaccauccagaccaucguggagguccagccccagcucgagauggagcugaccccgguggugcagacgaucgaggucaacuccuucagcggcuaccugaagcucaccgacaacguguacaucaagaacgccgacaucguggaggaggcgaagaaggucaagcccaccgugguggucaacgccgccaacguguaccugaagcacgggggcggcguggccggggcccugaacaaggcgaccaacaacgccaugcaggucgaguccgacgacuacaucgccacgaacggcccccucaagguggggggcagcugcguccuguccggccacaaccuggccaagcacugccuccacgugguggggcccaacgucaacaagggcgaggacauccagcugcugaagagcgccuacgagaacuucaaccagcacgaggugcuccuggcgccgcugcucuccgccgggaucuucggcgccgaccccauccacagccugcgggugugcgucgacaccgugcgcaccaacguguaccuggccgucuucgacaagaaccucuacgacaagcugguguccagcuuccuggagaugaagagcgagaagcagguggagcagaagaucgccgagauccccaaggaggaggucaagcccuucaucaccgaguccaagccgagcguggagcagcggaagcaggacgacaagaagaucaaggcgugcguggaggaggucacgaccacccucgaggagaccaaguuccugacggagaaccugcuccuguacaucgacaucaacgggaaccugcaccccgacuccgccacccucgugagcgacaucgacaucaccuuccugaagaaggacgcccccuacaucgugggcgacgucgugcaggagggcgugcugaccgccgucgugauccccacgaagaaggccgggggcaccaccgagaugcucgcgaaggcccugcgcaaggugccgaccgacaacuacaucacgaccuaccccgggcagggccugaacggguacaccgucgaggaggccaagaccgugcucaagaagugcaaguccgccuucuacauccugcccagcaucaucuccaacgagaagcaggagauccugggcaccgugagcuggaaccuccgggagaugcuggcgcacgccgaggagacgcgcaagcugaugcccgucugcguggagaccaaggccaucguguccaccauccagcggaaguacaagggcaucaagauccaggagggggucguggacuacggcgcccgcuucuacuucuacaccagcaagacgaccguggccucccugaucaacacccucaacgaccugaacgagacccuggucacgaugccgcucggguacgugacccacggccugaaccuggaggaggcggcccgguacaugcgcagccucaaggugcccgccaccgucuccgugagcucccccgacgccgugaccgccuacaacggguaccugacgagcuccagcaagacccccgaggagcacuucaucgagaccaucucccuggcgggcagcuacaaggacuggagcuacuccggccagagcacccagcucgggaucgaguuccugaagcggggcgacaaguccgucuacuacacgagcaacccgaccaccuuccaccuggacggggaggugaucaccuucgacaaccucaagacgcugcugucccuccgcgaggugcggaccaucaaggucuucaccaccguggacaacaucaaccugcacacgcagguggucgacaugagcaugaccuacggccagcaguucggccccaccuaccuggacggggccgacgugaccaagaucaagccccacaacucccacgagggcaagacguucuacgugcucccgaacgacgacacccugcgcgucgaggccuucgaguacuaccacaccaccgaccccagcuuccuggggcgguacauguccgcccucaaccacacgaagaaguggaaguacccccaggugaacggccugaccagcaucaagugggccgacaacaacugcuaccuggcgaccgcccuccugacccugcagcagaucgagcucaaguucaaccccccggcccugcaggacgccuacuaccgcgcgcgggccggggaggccgccaacuucugcgcccugauccucgcguacugcaacaagacggugggcgagcugggcgacguccgcgagaccauguccuaccuguuccagcacgccaaccucgacagcugcaagcgggugcugaacgucgugugcaagaccugcgggcagcagcagaccacccugaagggcguggaggccgucauguacauggggacgcucuccuacgagcaguucaagaagggcgugcagauccccugcaccugcgggaagcaggccaccaaguaccuggugcagcaggagagccccuucgucaugauguccgcccccccggcgcaguacgagcugaagcacggcaccuucacgugcgccagcgaguacaccggcaacuaccagugcgggcacuacaagcacaucaccuccaaggagacccucuacugcaucgacggcgcccugcugacgaagagcagcgaguacaaggggcccaucaccgacguguucuacaaggagaacuccuacaccaccacgaucaagcccgugaccuacaagcucgacggcgucgugugcaccgagaucgaccccaagcuggacaacuacuacaagaaggacaacagcuacuucaccgagcagccgaucgaccuggugcccaaccagcccuaccagaacgccuccuucgacaacuucaaguucgucugcgacaacaucaaguucgccgacgaccucaaccagcugacgggguacaagaagcccgcgagccgcgagcugaaggugaccuucuucccggaccucaacggcgacguggucgccaucgacuacaagcacuacacccccuccuucaagaagggcgccaagcugcugcacaagcccaucguguggcacgugaacaacgccaccaacaaggcgacguacaagcccaacaccuggugcauccggugccucuggagcaccaagccggucgagaccuccaacagcuucgacgugcugaaguccgaggacgcccaggggauggacaaccuggccugcgaggaccucaagcccgugagcgaggaggucguggagaaccccacgauccagaaggacgugcuggagugcaacgucaagaccaccgagguggugggcgacaucauccugaagcccgccaacaacucccucaagaucaccgaggaggucgggcacacggaccugauggccgcguacguggacaacagcucccugaccaucaagaagccgaacgagcucagccgcgugcugggccugaagacccucgccacccacgggcuggccgccgucaacuccgugcccugggacacgaucgccaacuacgcgaagcccuuccugaacaagguggucagcaccaccaccaacaucgugacgcgcugccucaaccgggugugcaccaacuacaugccguacuucuucacccugcugcuccagcugugcaccuucacccgcuccacgaacagccggaucaaggccuccaugcccaccaccaucgccaagaacaccgucaagagcgugggcaaguucugccuggaggccagcuucaacuaccucaagucccccaacuucagcaagcugaucaacaucaucaucugguuccugcuccuguccgugugccugggcagccucaucuacuccacggccgcgcuggggguccugaugagcaaccucggcaugcccuccuacugcaccggguaccgcgagggcuaccugaacagcaccaacgugaccaucgccacguacugcaccggcuccaucccgugcagcgugugccuguccgggcucgacagccuggacaccuaccccucccuggagaccauccagaucacgaucagcuccuucaagugggaccucaccgccuucggccuggucgccgagugguuccuggccuacauccucuucacccgguucuucuacgugcuggggcuggcggccaucaugcagcucuucuucagcuacuucgccgugcacuucaucuccaacagcuggcugauguggcugaucaucaaccugguccagauggcccccaucuccgcgauggugcgcauguacaucuucuucgccagcuucuacuacguguggaagagcuacguccacgugguggacggcugcaacuccagcaccugcaugaugugcuacaagcggaaccgcgccacgcgggucgagugcaccaccaucgugaacgggguccgccgguccuucuacguguacgccaacggcggcaagggguucugcaagcuccacaacuggaacugcgugaacugcgacaccuucugcgccggcagcacguucaucuccgacgaggucgcgcgcgaccugagccugcaguucaagcggcccaucaacccgaccgaccaguccagcuacaucguggacuccgugaccgucaagaacgggagcauccaccucuacuucgacaaggccggccagaagaccuacgagcgccacucccugagccacuucgugaaccuggacaaccuccgggccaacaacacgaaggggucccugcccaucaacgugaucgucuucgacggcaagagcaagugcgaggaguccagcgccaaguccgccagcguguacuacucccagcugaugugccagcccauccuccugcuggaccaggcgcucgugagcgacgucggcgacagcgccgagguggccgugaagauguucgacgccuacgucaacaccuucuccagcaccuucaacgugcccauggagaagcugaagacccugguggccacggcggaggccgagcucgccaagaacgucucccuggacaacgugcugagcaccuucaucuccgccgcgcgccagggguucguggacagcgacgucgagaccaaggacgugguggagugccucaagcugucccaccagagcgacaucgaggucaccggcgacuccugcaacaacuacaugcugacguacaacaagguggagaacaugaccccgcgggaccucggggccugcaucgacugcagcgcccgccacaucaacgcccagguggccaagucccacaacaucgcgcugaucuggaacgucaaggacuucaugagccuguccgagcagcuccggaagcagauccgcagcgccgccaagaagaacaaccugcccuucaagcugaccugcgccaccacgcgccagguggugaacgucgugaccaccaagaucgcccucaagggcgggugaggacuagucccuguucccagagcccacuuuuuuuucuuuuuuugaaauaaaauagccugucuuucagaucucaaaggcucuuuucagagccaccaaaaaaaaaaaaaaaaaaaaaaaaaaaaaaaaaaaaaaaaaaaaaaaaaaaaaaaaaaaaaaaaaaaaaaaaaaaaaaaaaaaaaaaaaaaaaaaaaaaaa

SEQ ID NO: 19724 - RNA, 6113 nt, Artificial Sequence
  SARS-CoV-2__MT810843.1__non-structural protein 3 (NSP3) mRNA gc
aggagagucccgcagucggcguccagcggcucugcuuguucgugugugugucguugcaggccuuauucaagcuuaccauggcccccaccaaggugaccuucggcgacgacacggucaucgaggugcagggguacaagagcgugaacaucaccuucgagcuggacgagcgcaucgacaagguccucaacgagaagugcuccgccuacaccguggagcugggcaccgaggugaacgaguucgcgugcgucguggccgacgccgugaucaagacgcugcagccggucagcgagcuccugaccccccuggggaucgaccucgacgagugguccauggccaccuacuaccuguucgacgagagcggcgaguucaagcuggccucccacauguacugcagcuucuacccccccgacgaggacgaggaggagggggacugcgaggaggaggaguucgagccguccacccaguacgaguacggcacggaggacgacuaccagggcaagccccucgaguucggggcgaucagcgccgcccugcagcccgaggaggagcaggaggaggacuggcuggacgacgacucccagcagaccgugggccagcaggacgggagcgaggacaaccagaccaccacgauccagaccaucguggagguccagccccagcucgagauggagcugaccccgguggugcagaccaucgaggucaacuccuucagcggcuaccugaagcucacggacaacguguacaucaagaacgccgacaucguggaggaggcgaagaaggucaagcccaccgugguggucaacgccgccaacguguaccugaagcacgggggcggcguggccggggcccugaacaaggcgaccaacaacgccaugcaggucgaguccgacgacuacaucgccaccaacggcccccucaagguggggggcagcugcguccuguccggccacaaccuggccaagcacugccuccacgugguggggcccaacgucaacaagggcgaggacauccagcugcugaagagcgccuacgagaacuucaaccagcacgaggugcuccuggcgccgcugcucuccgccgggaucuucggcgccgaccccauccacagccugcgggugugcgucgacacggugcgcaccaacguguaccuggccgucuucgacaagaaccucuacgacaagcugguguccagcuuccuggagaugaagagcgagaagcagguggagcagaagaucgccgagauccccaaggaggaggucaagcccuucaucaccgaguccaagccgagcguggagcagcggaagcaggacgacaagaagaucaaggcgugcguggaggaggucaccacgacccucgaggagaccaaguuccugaccgagaaccugcuccuguacaucgacaucaacgggaaccugcaccccgacuccgccacgcucgugagcgacaucgacaucaccuuccugaagaaggacgcccccuacaucgugggcgacgucgugcaggagggcgugcugaccgccgucgugauccccaccaagaaggccgggggcacgaccgagaugcucgcgaaggcccugcgcaaggugccgaccgacaacuacaucaccacguaccccgggcagggccugaacggguacaccgucgaggaggccaagaccgugcucaagaagugcaaguccgccuucuacauccugcccagcaucaucuccaacgagaagcaggagauccugggcaccgugagcuggaaccuccgggagaugcuggcgcacgccgaggagacccgcaagcugaugcccgucugcguggagacgaaggccaucguguccaccauccagcggaaguacaagggcaucaagauccaggagggggucguggacuacggcgcccgcuucuacuucuacaccagcaagaccacgguggccucccugaucaacacccucaacgaccugaacgagacccuggucaccaugccgcucggguacgugacgcacggccugaaccuggaggaggcggcccgguacaugcgcagccucaaggugcccgccaccgucuccgugagcucccccgacgccgugaccgccuacaacggguaccugaccagcuccagcaagacgcccgaggagcacuucaucgagaccaucucccuggcgggcagcuacaaggacuggagcuacuccggccagagcacccagcucgggaucgaguuccugaagcggggcgacaaguccgucuacuacaccagcaacccgacgaccuuccaccuggacggggaggugaucaccuucgacaaccucaagacccugcugucccuccgcgaggugcggacgaucaaggucuucaccaccguggacaacaucaaccugcacacccagguggucgacaugagcaugacguacggccagcaguucggccccaccuaccuggacggggccgacgugaccaagaucaagccccacaacucccacgagggcaagaccuucuacgugcucccgaacgacgacacgcugcgcgucgaggccuucgaguacuaccacaccaccgaccccagcuuccuggggcgguacauguccgcccucaaccacaccaagaaguggaaguacccccaggugaacggccugacgagcaucaagugggccgacaacaacugcuaccuggcgaccgcccuccugacccugcagcagaucgagcucaaguucaaccccccggcccugcaggacgccuacuaccgcgcgcgggccggggaggccgccaacuucugcgcccugauccucgcguacugcaacaagaccgugggcgagcugggcgacguccgcgagacgauguccuaccuguuccagcacgccaaccucgacagcugcaagcgggugcugaacgucgugugcaagaccugcgggcagcagcagaccacccugaagggcguggaggccgucauguacauggggacccucuccuacgagcaguucaagaagggcgugcagauccccugcacgugcgggaagcaggccaccaaguaccuggugcagcaggagagccccuucgucaugauguccgcccccccggcgcaguacgagcugaagcacggcaccuucaccugcgccagcgaguacacgggcaacuaccagugcgggcacuacaagcacaucaccuccaaggagacccucuacugcaucgacggcgcccugcugaccaagagcagcgaguacaaggggcccaucacggacguguucuacaaggagaacuccuacaccaccaccaucaagcccgugacguacaagcucgacggcgucgugugcaccgagaucgaccccaagcuggacaacuacuacaagaaggacaacagcuacuucaccgagcagccgaucgaccuggugcccaaccagcccuaccccaacgccuccuucgacaacuucaaguucgucugcgacaacaucaaguucgccgacgaccucaaccagcugaccggguacaagaagccggcgagccgcgagcugaaggugacguucuuccccgaccucaacggcgacguggucgccaucgacuacaagcacuacacccccuccuucaagaagggcgccaagcugcugcacaagcccaucguguggcacgugaacaacgccaccaacaaggcgaccuacaagccgaacacguggugcauccggugccucuggagcaccaagcccgucgagaccuccaacagcuucgacgugcugaaguccgaggacgcccaggggauggacaaccuggccugcgaggaccucaagcccgugagcgaggaggucguggagaaccccaccauccagaaggacgugcuggagugcaacgucaagacgaccgagguggugggcgacaucauccugaagccggccaacaacucccucaagaucaccgaggaggucgggcacaccgaccugauggccgcguacguggacaacagcucccugacgaucaagaagcccaacgagcucagccgcgugcugggccugaagacccucgccacccacgggcuggccgccgucaacuccgugcccugggacaccaucgccaacuacgcgaagccguuccugaacaagguggucagcacgaccaccaacaucgugacccgcugccucaaccgggugugcacgaacuacaugcccuacuucuucacccugcugcuccagcugugcaccuucacccgcuccaccaacagccggaucaaggccuccaugcccacgaccaucgccaagaacaccgucaagagcgugggcaaguucugccuggaggccagcuucaacuaccucaagucccccaacuucagcaagcugaucaacaucaucaucugguuccugcuccuguccgugugccugggcagccucaucuacuccaccgccguccugggggugcugaugagcaaccucggcaugccguccuacugcacgggguaccgcgagggcuaccugaacagcaccaacgugaccaucgcgaccuacugcacgggcuccauccccugcagcgucugccuguccgggcucgacagccuggacaccuaccccucccuggagaccauccagaucaccaucagcuccuucaagugggaccucacggccuucggccugguggccgagugguuccuggccuacauccucuucacccgguucuucuacgugcuggggcuggccgcgaucaugcagcucuucuucagcuacuucgccguccacuucaucuccaacagcuggcugauguggcugaucaucaaccuggugcagauggcccccaucuccgccauggugcgcauguacaucuucuucgcgagcuucuacuacgucuggaagagcuacgugcacguggucgacggcugcaacuccagcaccugcaugaugugcuacaagcggaaccgcgccacccggguggagugcacgaccaucgucaacggggugcgccgguccuucuacguguacgccaacggcggcaagggguucugcaagcuccacaacuggaacugcgucaacugcgacaccuucugcgccggcagcaccuucaucuccgacgagguggcccgcgaccugagccugcaguucaagcggccgaucaaccccacggaccaguccagcuacaucguggacuccgucaccgugaagaacgggagcauccaccucuacuucgacaaggcgggccagaagaccuacgagcgccacucccugagccacuucgugaaccuggacaaccuccgggccaacaacaccaaggggucccugcccaucaacgucaucguguucgacggcaagagcaagugcgaggaguccagcgccaaguccgccagcguguacuacucccagcugaugugccagcccauccuccugcuggaccaggcccucgucagcgacgugggcgacagcgcggagguggccgucaagauguucgacgccuacgugaacacguucuccagcaccuucaacgugccgauggagaagcugaagacccuggucgccaccgccgaggcggagcucgccaagaacgugucccuggacaacgugcugagcacguucaucuccgccgcccgccagggguucgucgacagcgacguggagaccaaggacguggucgagugccucaagcugucccaccagagcgacaucgaggugaccggcgacuccugcaacaacuacaugcugaccuacaacaagguggagaacaugacgccccgggaccucggggcgugcaucgacugcagcgcccgccacaucaacgcccaggucgccaagucccacaacaucgcccugaucuggaacgugaaggacuucaugagccuguccgagcagcuccggaagcagauccgcagcgcggccaagaagaacaaccugcccuucaagcugaccugcgccaccacccgccagguggucaacguggugacgaccaagaucgcccucaagggcgggugaggacuagucccuguucccagagcccacuuuuuuuucuuuuuuugaaauaaaauagccugucuuucagaucucaaaggcucuuuucagagccaccaaaaaaaaaaaaaaaaaaaaaaaaaaaaaaaaaaaaaaaaaaaaaaaaaaaaaaaaaaaaaaaaaaaaaaaaaaaaaaaaaaaaaaaaaaaaaaaaaaaaa

SEQ ID NO: 19725 - RNA, 6113 nt, Artificial Sequence
  SARS-CoV-2__MT810895.1__non-structural protein 3 (NSP3) mRNA gc
aggagagucccgcagucggcguccagcggcucugcuuguucgugugugugucguugcaggccuuauucaagcuuaccauggcccccaccaaggugaccuucggcgacgacacggucaucgaggugcagggguacaagagcgugaacaucaccuucgagcuggacgagcgcaucgacaagguccucaacgagaagugcuccgccuacaccguggagcugggcaccgaggugaacgaguucgcgugcgucguggccgacgccgugaucaagacgcugcagccggucagcgagcuccugaccccccuggggaucgaccucgacgagugguccauggccaccuacuaccuguucgacgagagcggcgaguucaagcuggccucccacauguacugcagcuucuacccccccgacgaggacgaggaggagggggacugcgaggaggaggaguucgagccguccacccaguacgaguacggcacggaggacgacuaccagggcaagccccucgaguucggggcgaccagcgccgcccugcagcccgaggaggagcaggaggaggacuggcuggacgacgacucccagcagaccgugggccagcaggacgggagcgaggacaaccagaccacgaccauccagaccaucguggagguccagccccagcucgagauggagcugaccccgguggugcagacgaucgaggucaacuccuucagcggcuaccugaagcucaccgacaacguguacaucaagaacgccgacaucguggaggaggcgaagaaggucaagcccaccgugguggucaacgccgccaacguguaccugaagcacgggggcggcguggccggggcccugaacaaggcgaccaacaacgccaugcaggucgaguccgacgacuacaucgccacgaacggcccccucaagguggggggcagcugcguccuguccggccacaaccuggccaagcacugccuccacgugguggggcccaacgucaacaagggcgaggacauccagcugcugaagagcgccuacgagaacuucaaccagcacgaggugcuccuggcgccgcugcucuccgccgggaucuucggcgccgaccccauccacagccugcgggugugcgucgacaccgugcgcaccaacguguaccuggccgucuucgacaagaaccucuacgacaagcugguguccagcuuccuggagaugaagagcgagaagcagguggagcagaagaucgccgagauccccaaggaggaggucaagcccuucaucaccgaguccaagccgagcguggagcagcggaagcaggacgacaagaagaucaaggcgugcguggaggaggucacgaccacccucgaggagaccaaguuccugacggagaaccugcuccuguacaucgacaucaacgggaaccugcaccccgacuccgccacccucgugagcgacaucgacaucaccuuccugaagaaggacgcccccuacaucgugggcgacgucgugcaggagggcgugcugaccgccgucgugauccccacgaagaaggccgggggcaccaccgagaugcucgcgaaggcccugcgcaaggugccgaccgacaacuacaucacgaccuaccccgggcagggccugaacggguacaccgucgaggaggccaagaccgugcucaagaagugcaaguccgccuucuacauccugcccagcaucaucuccaacgagaagcaggagauccugggcaccgugagcuggaaccuccgggagaugcuggcgcacgccgaggagacgcgcaagcugaugcccgucugcguggagaccaaggccaucguguccaccauccagugcaaguacaagggcaucaagauccaggagggggucguggacuacggcgcccgguucuacuucuacaccagcaagacgaccguggccucccugaucaacacccucaacgaccugaacgagacccuggucacgaugccgcucggguacgugacccacggccugaaccuggaggaggcggcccgcuacaugcggagccucaaggugcccgccaccgucuccgugagcucccccgacgccgugaccgccuacaacggguaccugacgagcuccagcaagacccccgaggagcacuucaucgagaccaucucccuggcgggcagcuacaaggacuggagcuacuccggccagagcacccagcucgggaucgaguuccugaagcgcggcgacaaguccgucuacuacacgagcaacccgaccaccuuccaccuggacggggaggugaucaccuucgacaaccucaagacgcugcugucccuccgggaggugcgcaccaucaaggucuucaccaccguggacaacaucaaccugcacacgcagguggucgacaugagcaugaccuacggccagcaguucggccccaccuaccuggacggggccgacgugaccaagaucaagccccacaacucccacgagggcaagacguucuacgugcucccgaacgacgacacccugcgggucgaggccuucgaguacuaccacaccaccgaccccagcuuccuggggcgcuacauguccgcccucaaccacacgaagaaguggaaguacccccaggugaacggccugaccagcaucaagugggccgacaacaacugcuaccuggcgaccgcccuccugacccugcagcagaucgagcucaaguucaaccccccggcccugcaggacgccuacuaccgggcgcgcgccggggaggccgccaacuucugcgcccugauccucgcguacugcaacaagacggugggcgagcugggcgacguccgggagaccauguccuaccuguuccagcacgccaaccucgacagcugcaagcgcgugcugaacgucgugugcaagaccugcgggcagcagcagaccacccugaagggcguggaggccgucauguacauggggacgcucuccuacgagcaguucaagaagggcgugcagauccccugcaccugcgggaagcaggccaccaaguaccuggugcagcaggagagccccuucgucaugauguccgcccccccggcgcaguacgagcugaagcacggcaccuucacgugcgccagcgaguacaccggcaacuaccagugcgggcacuacaagcacaucaccuccaaggagacccucuacugcaucgacggcgcccugcugacgaagagcagcgaguacaaggggcccaucaccgacguguucuacaaggagaacuccuacaccaccacgaucaagcccgugaccuacaagcucgacggcgucgugugcaccgagaucgaccccaagcuggacaacuacuacaagaaggacaacagcuacuucaccgagcagccgaucgaccuggugcccaaccagcccuaccccaacgccuccuucgacaacuucaaguucgucugcgacaacaucaaguucgccgacgaccucaaccagcugacgggguacaagaagccggcgagccgggagcugaaggugaccuucuuccccgaccucaacggcgacguggucgccaucgacuacaagcacuacacccccuccuucaagaagggcgccaagcugcugcacaagcccaucguguggcacgugaacaacgccaccaacaaggcgacguacaagccgaacaccuggugcauccgcugccucuggagcaccaagcccgucgagaccuccaacagcuucgacgugcugaaguccgaggacgcccaggggauggacaaccuggccugcgaggaccucaagcccgugagcgaggaggucguggagaaccccacgauccagaaggacgugcuggagugcaacgucaagaccaccgagguggugggcgacaucauccugaagccggccaacaacucccucaagaucaccgaggaggucgggcacacggaccugauggccgcguacguggacaacagcucccugaccaucaagaagcccaacgagcucagccgggugcugggccugaagacccucgccacccacgggcuggccgccgucaacuccgugcccugggacacgaucgccaacuacgcgaagccguuccugaacaagguggucagcaccaccaccaacaucgugacgcgcugccucaaccgcgugugcaccaacuacaugcccuacuucuucacccugcugcuccagcugugcaccuucacccgguccacgaacagccgcaucaaggccuccaugcccaccaccaucgccaagaacaccgucaagagcgugggcaaguucugccuggaggccagcuucaacuaccucaagucccccaacuucagcaagcugaucaacaucaucaucugguuccugcuccuguccgugugccugggcagccucaucuacuccacggccgcgcuggggguccugaugagcaaccucggcaugccguccuacugcaccggguaccgggagggcuaccugaacagcaccaacgugaccaucgccacguacugcaccggcuccauccccugcagcgugugccuguccgggcucgacagccuggacaccuaccccucccuggagaccauccagaucacgaucagcuccuucaagugggaccucaccgccuucggccuggucgccgagugguuccuggccuacauccucuucacccgcuucuucuacgugcuggggcuggcggccaucaugcagcucuucuucagcuacuucgccgugcacuucaucuccaacagcuggcugauguggcugaucaucaaccugguccagauggcccccaucuccgcgauggugcggauguacaucuucuucgccagcuucuacuacguguggaagagcuacguccacgugguggacggcugcaacuccagcaccugcaugaugugcuacaagcgcaaccgggccacgcgcgucgagugcaccaccaucgugaacgggguccggcgcuccuucuacguguacgccaacggcggcaagggguucugcaagcuccacaacuggaacugcgugaacugcgacaccuucugcgccggcagcacguucaucuccgacgaggucgcgcgggaccugagccugcaguucaagcgcccgaucaaccccaccgaccaguccagcuacaucguggacuccgugaccgucaagaacgggagcauccaccucuacuucgacaaggccggccagaagaccuacgagcggcacucccugagccacuucgugaaccuggacaaccuccgcgccaacaacacgaaggggucccugcccaucaacgugaucgucuucgacggcaagagcaagugcgaggaguccagcgccaaguccgccagcguguacuacucccagcugaugugccagcccauccuccugcuggaccaggcgcucgugagcgacgucggcgacagcgccgagguggccgugaagauguucgacgccuacgucaacaccuucuccagcaccuucaacgugccgauggagaagcugaagacccugguggccacggcggaggccgagcucgccaagaacgucucccuggacaacgugcugagcaccuucaucuccgccgcgcggcagggguucguggacagcgacgucgagaccaaggacgugguggagugccucaagcugucccaccagagcgacaucgaggucaccggcgacuccugcaacaacuacaugcugacguacaacaagguggagaacaugaccccccgcgaccucggggccugcaucgacugcagcgcccggcacaucaacgcccagguggccaagucccacaacaucgcgcugaucuggaacgucaaggacuucaugagccuguccgagcagcuccgcaagcagauccggagcgccgccaagaagaacaaccugcccuucaagcugaccugcgccaccacgcgccagguggugaacgucgugaccaccaagaucgcccucaagggcgggugaggacuagucccuguucccagagcccacuuuuuuuucuuuuuuugaaauaaaauagccugucuuucagaucucaaaggcucuuuucagagccaccaaaaaaaaaaaaaaaaaaaaaaaaaaaaaaaaaaaaaaaaaaaaaaaaaaaaaaaaaaaaaaaaaaaaaaaaaaaaaaaaaaaaaaaaaaaaaaaaaaaaa

SEQ ID NO: 19726 - RNA, 6113 nt, Artificial Sequence
  SARS-CoV-2__MT810916.1__non-structural protein 3 (NSP3) mRNA gc
aggagagucccgcagucggcguccagcggcucugcuuguucgugugugugucguugcaggccuuauucaagcuuaccauggcccccaccaaggugaccuucggcgacgacacggucaucgaggugcagggguacaagagcgugaacaucaccuucgagcuggacgagcgcaucgacaagguccucaacgagaagugcuccgccuacaccguggagcugggcaccgaggugaacgaguucgcgugcgucguggccgacgccgugaucaagacgcugcagccggucagcgagcuccugaccccccuggggaucgaccucgacgagugguccauggccaccuacuaccuguucgacgagagcggcgaguucaagcuggccucccacauguacugcagcuucuacccccccgacgaggacgaggaggagggggacugcgaggaggaggaguucgagccguccacccaguacgaguacggcacggaggacgacuaccagggcaagccccucgaguucggggcgaccagcgccgcccugcagcccgaggaggagcaggaggaggacuggcuggacgacgacucccagcagaccgugggccagcaggacgggagcgaggacaaccagaccacgaccauccagaccaucguggagguccagccccagcucgagauggagcugaccccgguggugcagacgaucgaggucaacuccuucagcggcuaccugaagcucaccgacaacguguacaucaagaacgccgacaucguggaggaggcgaagaaggucaagcccaccgugguggucaacgccgccaacguguaccugaagcacgggggcggcguggccggggcccugaacaaggcgaccaacaacgccaugcaggucgaguccgacgacuacaucgccacgaacggcccccucaagguggggggcagcugcguccuguccggccacaaccuggccaagcacugccuccacgugguggggcccaacgucaacaagggcgaggacauccagcugcugaagagcgccuacgagaacuucaaccagcacgaggugcuccuggcgccgcugcucuccgccgggaucuucggcgccgaccccauccacagccugcgggugugcgucgacaccgugcgcaccaacguguaccuggccgucuucgacaagaaccucuacgacaagcugguguccagcuuccuggagaugaagagcgagaagcagguggagcagaagaucgccgagauccccaaggaggaggucaagcccuucaucaccgaguccaagccgagcguggagcagcggaagcaggacgacaagaagaucaaggcgugcguggaggaggucacgaccacccucgaggagaccaaguuccugacggagaaccugcuccuguacaucgacaucaacgggaaccugcaccccgacuccgccacccucgugagcgacaucgacaucaccuuccugaagaaggacgcccccuacaucgugggcgacgucgugcaggagggcgugcugaccgccgucgugauccccacgaagaaggccgggggcaccaccgagaugcucgcgaaggcccugcgcaaggugccgaccgacaacuacaucacgaccuaccccgggcagggccugaacggguacaccgucgaggaggccaagaccgugcucaagaagugcaaguccgccuucuacauccugcccagcaucaucuccaacgagaagcaggagauccugggcaccgugagcuggaaccuccgggagaugcuggcgcacgccgaggagacgcgcaagcugaugcccgucugcguggagaccaaggccaucguguccaccauccagcggaaguacaagggcaucaagauccaggagggggucguggacuacggcgcccgcuucuacuucuacaccagcaagacgaccguggccucccugaucaacacccucaacgaccugaacgagacccuggucacgaugccgcucggguacgugacccacggccugaaccuggaggaggcggcccgguacaugcgcagccucaaggugcccgccaccgucuccgugagcucccccgacgccgugaccgccuacaacggguaccugacgagcuccagcaagacccccgaggagcacuucaucgagaccaucucccuggcgggcagcuacaaggacuggagcuacuccggccagagcacccagcucgggaucgaguuccugaagcggggcgacaaguccgucuacuacacgagcaacccgaccaccuuccaccuggacggggaggugaucaccuucgacaaccucaagacgcugcugucccuccgcgaggugcggaccaucaaggucuucaccaccguggacaacaucaaccugcacacgcagguggucgacaugagcaugaccuacggccagcaguucggccccaccuaccuggacggggccgacgugaccaagaucaagccccacaacucccacgagggcaagacguucuacgugcucccgaacgacgacacccugcgcgucgaggccuucgaguacuaccacaccaccgaccccagcuuccuggggcgguacauguccgcccucaaccacacgaagaaguggaaguacccccaggugaacggccugaccagcaucaagugggccgacaacaacugcuaccuggcgaccgcccuccugacccugcagcagaucgagcucaaguucaaccccccggcccugcaggacgccuacuaccgcgcgcgggccggggaggccgccaacuucugcgcccugauccucgcguacugcaacaagacggugggcgagcugggcgacguccgcgagaccauguccuaccuguuccagcacgccaaccucgacagcugcaagcgggugcugaacgucgugugcaagaccugcgggcagcagcagaccacccugaagggcguggaggccgucauguacauggggacgcucuccuacgagcaguucaagaagggcgugcagauccccugcaccugcgggaagcaggccaccaaguaccuggugcagcaggagagccccuucgucaugauguccgcccccccggcgcaguacgagcugaagcacggcaccuucacgugcgccagcgaguacaccggcaacuaccagugcgggcacuacaagcacaucaccuccaaggagacccucuacugcaucgacggcgcccugcugacgaagagcagcgaguacaaggggcccaucaccgacguguucuacaaggagaacuccuacaccaccacgaucaagcccgugaccuacaagcucgacggcgucgugugcaccgagaucgaccccaagcuggacaacuacuacaagaaggacaacagcuacuucaccgagcagccgaucgaccuggugcccaaccagcccuaccccaacgccuccuucgacaacuucaaguucgucugcgacaacaucaaguucgccgacgaccucaaccagcugacgggguacaagaagccggcgagccgcgagcugaaggugaccuucuuccccgaccucaacggcgacguggucgccaucgacuacaagcacuacacccccuccuucaagaagggcgccaagcugcugcacaagcccaucguguggcacgugaacaacgucaccaacaaggccacguacaagccgaacaccuggugcauccggugccucuggagcaccaagcccguggagaccuccaacagcuucgacgugcugaaguccgaggacgcgcaggggauggacaaccuggccugcgaggaccucaagcccgucagcgaggaggugguggagaaccccacgauccagaaggacguccuggagugcaacgugaagaccaccgagguggucggcgacaucauccugaagccggccaacaacucccucaagaucaccgaggagguggggcacacggaccugauggccgccuacguggacaacagcucccugaccaucaagaagcccaacgagcucagccgcguccugggccugaagacccucgcgacccacgggcuggccgccgugaacuccgugcccugggacacgaucgccaacuacgccaagccguuccugaacaaggucgugagcaccaccaccaacaucgugacgcgcugccucaaccgggucugcaccaacuacaugcccuacuucuucacccugcugcuccagcugugcaccuucacccgcuccacgaacagccggaucaaggcguccaugcccaccaccaucgccaagaacaccgugaagagcgugggcaaguucugccuggaggccagcuucaacuaccucaagucccccaacuucagcaagcugaucaacaucaucaucugguuccugcuccuguccgucugccugggcagccucaucuacuccacggccgcccugggggugcugaugagcaaccucggcaugccguccuacugcaccggguaccgcgagggcuaccugaacagcaccaacgugaccaucgcgacguacugcaccggcuccauccccugcagcgucugccuguccgggcucgacagccuggacaccuaccccucccuggagaccauccagaucacgaucagcuccuucaagugggaccucaccgccuucggccugguggccgagugguuccuggccuacauccucuucacccgguucuucuacgugcuggggcuggccgcgaucaugcagcucuucuucagcuacuucgccguccacuucaucuccaacagcuggcugauguggcugaucaucaaccuggugcagauggcccccaucuccgccauggugcgcauguacaucuucuucgcgagcuucuacuacgucuggaagagcuacgugcacguggucgacggcugcaacuccagcaccugcaugaugugcuacaagcggaaccgcgccacgcggguggagugcaccaccaucgucaacggggugcgccgguccuucuacguguacgccaacggcggcaagggguucugcaagcuccacaacuggaacugcgucaacugcgacaccuucugcgccggcagcacguucaucuccgacgagguggcccgcgaccugagccugcaguucaagcggccgaucaaccccaccgaccaguccagcuacaucguggacuccgucaccgugaagaacgggagcauccaccucuacuucgacaaggcgggccagaagaccuacgagcgccacucccugagccacuucgugaaccuggacaaccuccgggccaacaacacgaaggggucccugcccaucaacgucaucguguucgacggcaagagcaagugcgaggaguccagcgccaaguccgccagcguguacuacucccagcugaugugccagcccauccuccugcuggaccaggcccucgucagcgacgugggcgacagcgcggagguggccgucaagauguucgacgccuacgugaacaccuucuccagcaccuucaacgugccgauggagaagcugaagacccuggucgccacggccgaggcggagcucgccaagaacgugucccuggacaacgugcugagcaccuucaucuccgccgcccgccagggguucgucgacagcgacguggagaccaaggacguggucgagugccucaagcugucccaccagagcgacaucgaggugaccggcgacuccugcaacaacuacaugcugacguacaacaagguggagaacaugaccccccgggaccucggggcgugcaucgacugcagcgcccgccacaucaacgcccaggucgccaagucccacaacaucgcccugaucuggaacgugaaggacuucaugagccuguccgagcagcuccggaagcagauccgcagcgcggccaagaagaacaaccugcccuucaagcugaccugcgccaccacgcgccagguggucaacguggugaccaccaagaucgcccucaagggcgggugaggacuagucccuguucccagagcccacuuuuuuuucuuuuuuugaaauaaaauagccugucuuucagaucucaaaggcucuuuucagagccaccaaaaaaaaaaaaaaaaaaaaaaaaaaaaaaaaaaaaaaaaaaaaaaaaaaaaaaaaaaaaaaaaaaaaaaaaaaaaaaaaaaaaaaaaaaaaaaaaaaaaa

SEQ ID NO: 19727 - RNA, 6113 nt, Artificial Sequence
  SARS-CoV-2__MT810930.1__non-structural protein 3 (NSP3) mRNA gc
aggagagucccgcagucggcguccagcggcucugcuuguucgugugugugucguugcaggccuuauucaagcuuaccauggcccccaccaaggugaccuucggcgacgacacggucaucgaggugcagggguacaagagcgugaacaucaccuucgagcuggacgagcgcaucgacaagguccucaacgagaagugcuccgccuacaccguggagcugggcaccgaggugaacgaguucgcgugcgucguggccgacgccgugaucaagacgcugcagccggucagcgagcuccugaccccccuggggaucgaccucgacgagugguccauggccaccuacuaccuguucgacgagagcggcgaguucaagcuggccucccacauguacugcagcuucuacccccccgacgaggacgaggaggagggggacugcgaggaggaggaguucgagccguccacccaguacgaguacggcacggaggacgacuaccagggcaagccccucgaguucggggcgaccagcgccgcccugcagcccgaggaggagcaggaggaggacuggcuggacgacgacucccagcagaccgugggccagcaggacgggagcgaggacaaccagaccacgaccauccagaccaucguggagguccagccccagcucgagauggagcugaccccgguggugcagacgaucgaggucaacuccuucagcggcuaccugaagcucaccgacaacguguacaucaagaacgccgacaucguggaggaggcgaagaaggucaagcccaccgugguggucaacgccgccaacguguaccugaagcacgggggcggcguggccggggcccugaacaaggcgaccaacaacgccaugcaggucgaguccgacgacuacaucgccacgaacggcccccucaagguggggggcagcugcguccuguccggccacaaccuggccaagcacugccuccacgugguggggcccaacgucaacaagggcgaggacauccagcugcugaagagcgccuacgagaacuucaaccagcacgaggugcuccuggcgccgcugcucuccgccgggaucuucggcgccgaccccauccacagccugcgggugugcgucgacaccgugcgcaccaacguguaccuggccgucuucgacaagaaccucuacgacaagcugguguccagcuuccuggagaugaagagcgagaagcagguggagcagaagaucgccgagauccccaaggaggaggucaagcccuucaucaccgaguccaagccgagcguggagcagcggaagcaggacgacaagaagaucaaggcgugcguggaggaggucacgaccacccucgaggagaccaaguuccugacggagaaccugcuccuguacaucgacaucaacgggaaccugcaccccgacuccgccacccucgugagcgacaucgacaucaccuuccugaagaaggacgcccccuacaucgugggcgacgucgugcaggagggcgugcugaccgccgucgugauccccacgaagaaggccgggggcaccaccgacaugcucgcgaaggcccugcgcaaggugccgaccgacaacuacaucacgaccuaccccgggcagggccugaacggguacaccgucgaggaggccaagaccgugcucaagaagugcaaguccgccuucuacauccugcccagcaucaucuccaacgagaagcaggagauccugggcaccgugagcuggaaccuccgggagaugcuggcgcacgccgaggagacgcgcaagcugaugcccgucugcguggagaccaaggccaucguguccaccauccagcggaaguacaagggcaucaagauccaggagggggucguggacuacggcgcccgcuucuacuucuacaccagcaagacgaccguggccucccugaucaacacccucaacgaccugaacgagacccuggucacgaugccgcucggguacgugacccacggccugaaccuggaggaggcggcccgguacaugcgcagccucaaggugcccgccaccgucuccgugagcucccccgacgccgugaccgccuacaacggguaccugacgagcuccagcaagacccccgaggagcacuucaucgagaccaucucccuggcgggcagcuacaaggacuggagcuacuccggccagagcacccagcucgggaucgaguuccugaagcggggcgacaaguccgucuacuacacgagcaacccgaccaccuuccaccuggacggggaggugaucaccuucgacaaccucaagacgcugcugucccuccgcgaggugcggaccaucaaggucuucaccaccguggacaacaucaaccugcacacgcagguggucgacaugagcaugaccuacggccagcaguucggccccaccuaccuggacggggccgacgugaccaagaucaagccccacaacucccacgagggcaagacguucuacgugcucccgaacgacgacacccugcgcgucgaggccuucgaguacuaccacaccaccgaccccagcuuccuggggcgguacauguccgcccucaaccacacgaagaaguggaaguacccccaggugaacggccugaccagcaucaagugggccgacaacaacugcuaccuggcgaccgcccuccugacccugcagcagaucgagcucaaguucaaccccccggcccugcaggacgccuacuaccgcgcgcgggccggggaggccgccaacuucugcgcccugauccucgcguacugcaacaagacggugggcgagcugggcgacguccgcgagaccauguccuaccuguuccagcacgccaaccucgacagcugcaagcgggugcugaacgucgugugcaagaccugcgggcagcagcagaccacccugaagggcguggaggccgucauguacauggggacgcucuccuacgagcaguucaagaagggcgugcagauccccugcaccugcgggaagcaggccaccaaguaccuggugcagcaggagagccccuucgucaugauguccgcccccccggcgcaguacgagcugaagcacggcaccuucacgugcgccagcgaguacaccggcaacuaccagugcgggcacuacaagcacaucaccuccaaggagacccucuacugcaucgacggcgcccugcugacgaagagcagcgaguacaaggggcccaucaccgacguguucuacaaggagaacuccuacaccaccacgaucaagcccgugaccuacaagcucgacggcgucgugugcaccgagaucgaccccaagcuggacaacuacuacaagaaggacaacagcuacuucaccgagcagccgaucgaccuggugcccaaccagcccuaccccaacgccuccuucgacaacuucaaguucgucugcgacaacaucaaguucgccgacgaccucaaccagcugacgggguacaagaagccggcgagccgcgagcugaaggugaccuucuuccccgaccucaacggcgacguggucgccaucgacuacaagcacuacacccccuccuucaagaagggcgccaagcugcugcacaagcccaucguguggcacgugaacaacgccaccaacaaggcgacguacaagccgaacaccuggugcauccggugccucuggagcaccaagcccgucgagaccuccaacagcuucgacgugcugaaguccgaggacgcccaggggauggacaaccuggccugcgaggaccucaagcccgugagcgaggaggucguggagaaccccacgauccagaaggacgugcuggagugcaacgucaagaccaccgagguggugggcgacaucauccugaagccggccaacaacucccucaagaucaccgaggaggucgggcacacggaccugauggccgcguacguggacaacagcucccugaccaucaagaagcccaacgagcucagccgcgugcugggccugaagacccucgccacccacgggcuggccgccgucaacuccgugcccugggacacgaucgccaacuacgcgaagccguuccugaacaagguggucagcaccaccaccaacaucgugacgcgcugccucaaccgggugugcaccaacuacaugcccuacuucuucacccugcugcuccagcugugcaccuucacccgcuccacgaacagccggaucaaggccuccaugcccaccaccaucgccaagaacaccgucaagagcgugggcaaguucugccuggaggccagcuucaacuaccucaagucccccaacuucagcaagcugaucaacaucaucaucugguuccugcuccuguccgugugccugggcagccucaucuacuccacggccgcgcuggggguccugaugagcaaccucggcaugccguccuacugcaccggguaccgcgagggcuaccugaacagcaccaacgugaccaucgccacguacugcaccggcuccauccccugcagcgugugccuguccgggcucgacagccuggacaccuaccccucccuggagaccauccagaucacgaucagcuccuucaagugggaccucaccgccuucggccuggucgccgagugguuccuggccuacauccucuucacccgguucuucuacgugcuggggcuggcggccaucaugcagcucuucuucagcuacuucgccgugcacuucaucuccaacagcuggcugauguggcugaucaucaaccugguccagauggcccccaucuccgcgauggugcgcauguacaucuucuucgccagcuucuacuacguguggaagagcuacguccacgugguggacggcugcaacuccagcaccugcaugaugugcuacaagcggaaccgcgccacgcgggucgagugcaccaccaucgugaacgggguccgccgguccuucuacguguacgccaacggcggcaagggguucugcaagcuccacaacuggaacugcgugaacugcgacaccuucugcgccggcagcacguucaucuccgacgaggucgcgcgcgaccugagccugcaguucaagcggccgaucaaccccaccgaccaguccagcuacaucguggacuccgugaccgucaagaacgggagcauccaccucuacuucgacaaggccggccagaagaccuacgagcgccacucccugagccacuucgugaaccuggacaaccuccgggccaacaacacgaaggggucccugcccaucaacgugaucgucuucgacggcaagagcaagugcgaggaguccagcgccaaguccgccagcguguacuacucccagcugaugugccagcccauccuccugcuggaccaggcgcucgugagcgacgucggcgacagcgccgagguggccgugaagauguucgacgccuacgucaacaccuucuccagcaccuucaacgugccgauggagaagcugaagacccugguggccacggcggaggccgagcucgccaagaacgucucccuggacaacgugcugagcaccuucaucuccgccgcgcgccagggguucguggacagcgacgucgagaccaaggacgugguggagugccucaagcugucccaccagagcgacaucgaggucaccggcgacuccugcaacaacuacaugcugacguacaacaagguggagaacaugaccccccgggaccucggggccugcaucgacugcagcgcccgccacaucaacgcccagguggccaagucccacaacaucgcgcugaucuggaacgucaaggacuucaugagccuguccgagcagcuccggaagcagauccgcagcgccgccaagaagaacaaccugcccuucaagcugaccugcgccaccacgcgccagguggugaacgucgugaccaccaagaucgcccucaagggcgggugaggacuagucccuguucccagagcccacuuuuuuuucuuuuuuugaaauaaaauagccugucuuucagaucucaaaggcucuuuucagagccaccaaaaaaaaaaaaaaaaaaaaaaaaaaaaaaaaaaaaaaaaaaaaaaaaaaaaaaaaaaaaaaaaaaaaaaaaaaaaaaaaaaaaaaaaaaaaaaaaaaaaa

SEQ ID NO: 19728 - RNA, 6113 nt, Artificial Sequence
  SARS-CoV-2__MT810941.1__non-structural protein 3 (NSP3) mRNA gc
aggagagucccgcagucggcguccagcggcucugcuuguucgugugugugucguugcaggccuuauucaagcuuaccauggcccccaccaaggugaccuucggcgacgacacggucaucgaggugcagggguacaagagcgugaacaucaccuucgagcuggacgagcgcaucgacaagguccucaacgagaagugcuccgccuacaccguggagcugggcaccgaggugaacgaguucgcgugcgucguggccgacgccgugaucaagacgcugcagccggucagcgagcuccugaccccccuggggaucgaccucgacgagugguccauggccaccuacuaccuguucgacgagagcggcgaguucaagcuggccucccacauguacugcagcuucuacccccccgacgaggacgaggaggagggggacugcgaggaggaggaguucgagccguccacccaguacgaguacggcacggaggacgacuaccagggcaagccccucgaguucggggcgaccagcgccgcccugcagcccgaggaggagcaggaggaggacuggcuggacgacgacucccagcagaccgugggccagcaggacgggagcgaggacaaccagaccacgaccauccagaccaucguggagguccagccccagcucgagauggagcugaccccgguggugcagacgaucgaggucaacuccuucagcggcuaccugaagcucaccgacaacguguacaucaagaacgccgacaucguggaggaggcgaagaaggucaagcccaccgugguggucaacgccgccaacguguaccugaagcacgggggcggcguggccggggcccugaacaaggcgaccaacaacgccaugcaggucgaguccgacgacuacaucgccacgaacggcccccucaagguggggggcagcugcguccuguccggccacaaccuggccaagcacugccuccacgugguggggcccaacgucaacaagggcgaggacauccagcugcugaagagcgccuacgagaacuucaaccagcacgaggugcuccuggcgccgcugcucuccgccgggaucuucggcgccgaccccauccacagccugcgggugugcgucgacaccgugcgcaccaacguguaccuggccgucuucgacaagaaccucuacgacaagcugguguccagcuuccuggagaugaagagcgagaagcagguggagcagaagaucgccgagauccccaaggaggaggucaagcccuucaucaccgaguccaagccgagcguggagcagcggaagcaggacgacaagaagaucaaggcgugcguggaggaggucacgaccacccucgaggagaccaaguuccugacggagaaccugcuccuguacaucgacaucaacgggaaccugcaccccgacuccgccacccucgugagcgacaucgacaucaccuuccugaagaaggacgcccccuacaucgugggcgacgucgugcaggagggcgugcugaccgccgucgugauccccacgaagaaggccgggggcaccaccgagaugcucgcgaaggcccugcgcaaggugccgaccgacaacuacaucacgaccuaccccgggcagggccugaacggguacaccgucgaggaggccaagaccgugcucaagaagugcaaguccgccuucuacauccugcccagcaucaucuccaacgagaagcaggagauccugggcaccgugagcuggaaccuccgggagaugcuggcgcacgccgaggagacgcgcaagcugaugcccgucugcguggagaccaaggccaucguguccaccauccagcggaaguacaagggcaucaagauccaggagggggucguggacuacggcgcccgcuucuacuucuacaccagcaagacgaccguggccucccugaucaacacccucaacgaccugaacgagacccuggucacgaugccgcucggguacgugacccacggccugaaccuggaggaggcggcccgguacaugcgcagccucaaggugcccgccaccgucuccgugagcucccccgacgccgugaccgccuacaacggguaccugacgagcuccagcaagacccccgaggagcacuucaucgagaccaucucccuggcgggcagcuacaaggacuggagcuacuccggccagagcacccagcucgggaucgaguuccugaagcggggcgacaaguccgucuacuacacgagcaacccgaccaccuuccaccuggacggggaggugaucaccuucgacaaccucaagacgcugcugucccuccgcgaggugcggaccaucaaggucuucaccaccguggacaacaucaaccugcacacgcagguggucgacaugagcaugaccuacggccagcaguucggccccaccuaccuggacggggccgacgugaccaagaucaagccccacaacucccacgagggcaagacguucuacgugcucccgaacgacgacacccugcgcgucgaggccuucgaguacuaccacaccaccgaccccagcuuccuggggcgguacauguccgcccucaaccacacgaagaaguggaaguacccccaggugaacggccugaccagcaucaagugggccgacaacaacugcuaccuggcgaccgcccuccugacccugcagcagaucgagcucaaguucaaccccccggcccugcaggacgccuacuaccgcgcgcgggccggggaggccgccaacuucugcgcccuggugcucgcguacugcaacaagacggucggcgagcugggcgacgugcgcgagaccauguccuaccuguuccagcacgccaaccucgacagcugcaagcggguccugaacguggugugcaagaccugcgggcagcagcagaccacccugaagggcgucgaggccgugauguacauggggacgcucuccuacgagcaguucaagaagggcgugcagauccccugcaccugcgggaagcaggccaccaaguaccugguccagcaggagagccccuucgugaugauguccgcccccccggcgcaguacgagcugaagcacggcaccuucacgugcgccagcgaguacaccggcaacuaccagugcgggcacuacaagcacaucaccuccaaggagacccucuacugcaucgacggcgcccugcugacgaagagcagcgaguacaaggggcccaucaccgacguguucuacaaggagaacuccuacaccaccacgaucaagcccgucaccuacaagcucgacggcguggugugcaccgagaucgaccccaagcuggacaacuacuacaagaaggacaacagcuacuucaccgagcagccgaucgaccugguccccaaccagcccuaccccaacgccuccuucgacaacuucaaguucgugugcgacaacaucaaguucgccgacgaccucaaccagcugacgggguacaagaagccggcgagccgcgagcugaaggugaccuucuuccccgaccucaacggcgacgucguggccaucgacuacaagcacuacacccccuccuucaagaagggcgccaagcugcugcacaagcccaucguguggcacgucaacaacgccaccaacaaggcgacguacaagccgaacaccuggugcauccggugccucuggagcaccaagcccguggagaccuccaacagcuucgacgugcugaaguccgaggacgcccaggggauggacaaccuggccugcgaggaccucaagcccgucagcgaggaggugguggagaaccccacgauccagaaggacguccuggagugcaacgugaagaccaccgagguggucggcgacaucauccugaagccggccaacaacucccucaagaucaccgaggagguggggcacacggaccugauggccgcguacguggacaacagcucccugaccaucaagaagcccaacgagcucagccgcguccugggccugaagacccucgccacccacgggcuggccgccgugaacuccgugcccugggacacgaucgccaacuacgcgaagccguuccugaacaaggucgugagcaccaccaccaacaucgugacgcgcugccucaaccgggucugcaccaacuacaugcccuacuucuucacccugcugcuccagcugugcaccuucacccgcuccacgaacagccggaucaaggccuccaugcccaccaccaucgccaagaacaccgugaagagcgugggcaaguucugccuggaggccagcuucaacuaccucaagucccccaacuucagcaagcugaucaacaucaucaucugguuccugcuccuguccgucugccugggcagccucaucuacuccacggccgcgcugggggugcugaugagcaaccucggcaugccguccuacugcaccggguaccgcgagggcuaccugaacagcaccaacgugaccaucgccacguacugcaccggcuccauccccugcagcgucugccuguccgggcucgacagccuggacaccuaccccucccuggagaccauccagaucacgaucagcuccuucaagugggaccucaccgccuucggccugguggccgagugguuccuggccuacauccucuucacccgguucuucuacgugcuggggcuggcggccaucaugcagcucuucuucagcuacuucgccguccacuucaucuccaacagcuggcugauguggcugaucaucaaccuggugcagauggcccccaucuccgcgauggugcgcauguacaucuucuucgccagcuucuacuacgucuggaagagcuacgugcacguggucgacggcugcaacuccagcaccugcaugaugugcuacaagcggaaccgcgccacgcggguggagugcaccaccaucgucaacggggugcgccgguccuucuacguguacgccaacggcggcaagggguucugcaagcuccacaacuggaacugcgucaacugcgacaccuucugcgccggcagcacguucaucuccgacgagguggcgcgcgaccugagccugcaguucaagcggccgaucaaccccaccgaccaguccagcuacaucguggacuccgucaccgugaagaacgggagcauccaccucuacuucgacaaggccggccagaagaccuacgagcgccacucccugagccacuucgugaaccuggacaaccuccgggccaacaacacgaaggggucccugcccaucaacgucaucguguucgacggcaagagcaagugcgaggaguccagcgccaaguccgccagcguguacuacucccagcugaugugccagcccauccuccugcuggaccaggcgcucgucagcgacgugggcgacagcgccgagguggccgucaagauguucgacgccuacgugaacaccuucuccagcaccuucaacgugccgauggagaagcugaagacccuggucgccacggcggaggccgagcucgccaacaacgugucccuggacaacgugcugagcaccuucaucuccgccgcgcgccagggguucgucgacagcgacguggagaccaaggacguggucgagugccucaagcugucccaccagagcgacaucgaggugaccggcgacuccugcaacaacuacaugcugacguacaacaagguggagaacaugaccccccgggaccucggggccugcaucgacugcagcgcccgccacaucaacgcccaggucgccaagucccacaacaucgcgcugaucuggaacgugaaggacuucaugagccuguccgagcagcuccggaagcagauccgcagcgccgccaagaagaacaaccugcccuucaagcugaccugcgccaccacgcgccagguggucaacguggugaccaccaagaucgcccucaagggcgggugaggacuagucccuguucccagagcccacuuuuuuuucuuuuuuugaaauaaaauagccugucuuucagaucucaaaggcucuuuucagagccaccaaaaaaaaaaaaaaaaaaaaaaaaaaaaaaaaaaaaaaaaaaaaaaaaaaaaaaaaaaaaaaaaaaaaaaaaaaaaaaaaaaaaaaaaaaaaaaaaaaaaa

SEQ ID NO: 19729 - RNA, 6113 nt, Artificial Sequence
  SARS-CoV-2__MT810979.1__non-structural protein 3 (NSP3) mRNA gc
aggagagucccgcagucggcguccagcggcucugcuuguucgugugugugucguugcaggccuuauucaagcuuaccauggcccccaccaaggugaccuucggcgacgacacggucaucgaggugcagggguacaagagcgugaacaucaccuucgagcuggacgagcgcaucgacaagguccucaacgagaagugcuccgccuacaccguggagcugggcaccgaggugaacgaguucgcgugcgucguggccgacgccgugaucaagacgcugcagccggucagcgagcuccugaccccccuggggaucgaccucgacgagugguccauggccaccuacuaccuguucgacgagagcggcgaguucaagcuggccucccacauguacugcagcuucuacccccccgacgaggacgaggaggagggggacugcgaggaggaggaguucgagccguccacccaguacgaguacggcacggaggacgacuaccagggcaagccccucgaguucggggcgaccagcgccgcccugcagcccgaggaggagcaggaggaggacuggcuggacgacgacucccagcagaccgugggccagcaggacgggagcgaggacaaccagaccacgaccauccagaccaucguggagguccagccccagcucgagauggagcugaccccgguggugcagacgaucgaggucaacuccuucagcggcuaccugaagcucaccgacaacguguacaucaagaacgccgacaucguggaggaggcgaagaaggucaagcccaccgugguggucaacgccgccaacguguaccugaagcacgggggcggcguggccggggcccugaacaaggcgaccaacaacgccaugcaggucgaguccgacgacuacaucgccacgaacggcccccucaagguggggggcagcugcguccuguccggccacaaccuggccaagcacugccuccacgugguggggcccaacgucaacaagggcgaggacauccagcugcugaagagcgccuacgagaacuucaaccagcacgaggugcuccuggcgccgcugcucuccgccgggaucuucggcgccgaccccauccacagccugcgggugugcgucgacaccgugcgcaccaacguguaccuggccgucuucgacaagaaccucuacgacaagcugguguccagcuuccuggagaugaagagcgagaagcagguggagcagaagaucgccgagauccccaaggaggaggucaagcccuucaucaccgaguccaagccgagcguggagcagcggaagcaggacgacaagaagaucaaggcgugcguggaggaggucacgaccacccucgaggagaccaaguuccugacggagaaccugcuccuguacaucgacaucaacgggaaccugcaccccgacuccgccacccucgugagcgacaucgacaucaccuuccugaagaaggacgcccccuacaucgugggcgacgucgugcaggagggcgugcugaccgccgucgugauccccacgaagaaggccgggggcaccaccgagaugcucgcgaaggcccugcgcaaggugccgaccgacaacuacaucacgaccuaccccgggcagggccugaacggguacaccgucgaggaggccaagaccgugcucaagaagugcaaguccgccuucuacauccugcccagcaucaucuccaacgagaagcaggagauccugggcaccgugagcuggaaccuccgggagaugcuggcgcacgccgaggagacgcgcaagcugaugcccgucugcguggagaccaaggccaucguguccaccauccagcggaaguacaagggcaucaagauccaggagggggucguggacuacggcgcccgcuucuacuucuacaccagcaagacgaccguggccucccugaucaacacccucaacgaccugaacgagacccuggucacgaugccgcucggguacgugacccacggccugaaccuggaggaggcggcccgguacaugcgcagccucaaggugcccgccaccgucuccgugagcucccccgacgccgugaccgccuacaacggguaccugacgagcuccagcaagacccccgaggagcacuucaucgagaccaucucccuggcgggcagcuacaaggacuggagcuacuccggccagagcacccagcucgggaucgaguuccugaagcggggcgacaaguccgucuacuacacgagcaacccgaccaccuuccaccuggacggggaggugaucaccuucgacaaccucaagacgcugcugucccuccgcgaggugcggaccaucaaggucuucaccaccguggacaacaucaaccugcacacgcagguggucgacaugagcaugaccuacggccagcaguucggccccaccuaccuggacggggccgacgugaccaagaucaagccccacaacucccacgagggcaagacguucuacgugcucccgaacgacgacacccugcgcgucgaggccuucgaguacuaccacaccaccgaccccagcuuccuggggcgguacauguccgcccucaaccacacgaagaaguggaaguacccccaggugaacggccugaccagcaucaagugggccgacaacaacugcuaccuggcgaccgcccuccugacccugcagcagaucgagcucaaguucaaccccccggcccugcaggacgccuacuaccgcgcgcgggccggggaggccgccaacuucugcgcccugauccucgcguacugcaacaagacggugggcgagcugggcgacguccgcgagaccauguccuaccuguuccagcacgccaaccucgacagcugcaagcgggugcugaacgucgugugcaagaccugcgggcagcagcagaccacccugaagggcguggaggccgucauguacauggggacgcucuccuacgagcaguucaagaagggcgugcagauccccugcaccugcgggaagcaggccaccaaguaccuggugcagcaggagagccccuucgucaugauguccgcccccccggcgcaguacgagcugaagcacggcaccuucacgugcgccagcgaguacaccggcaacuaccagugcgggcacuacaagcacaucaccuccaaggagacccucuacugcaucgacggcgcccugcugacgaagagcagcgaguacaaggggcccaucaccgacguguucuacaaggagaacuccuacaccaccacgaucaagcccgugaccuacaagcucgacggcgucgugugcaccgagaucgaccccaagcuggacaacuacuacaagaaggacaacagcuacuucaccgagcagccgaucgaccuggugcccaaccagcccuaccccaacgccuccuucgacaacuucaaguucgucugcgacaacaucaaguucgccgacgaccucaaccagcugacgggguacaagaagccggcgagccgcgagcugaaggugaccuucuuccccgaccucaacggcgacguggucgccaucgacuacaagcacuacacccccuccuucaagaagggcgccaagcugcugcacaagcccaucguguggcacgugaacaacgccaccaacaaggcgacguacaagccgaacaccuggugcauccggugccucuggagcaccaagcccgucgagaccuccaacagcuucgacgugcugaaguccgaggacgcccaggggauggacaaccuggccugcgaggaccucaagcccgugagcgaggaggucguggagaaccccacgauccagaaggacgugcuggagugcaacgucaagaccaccgagguggugggcgacaucauccugaagccggccaacaacucccucaagaucaccgaggaggucgggcacacggaccugauggccgcguacguggacaacagcucccugaccaucaagaagcccaacgagcucagccgcgugcugggccugaagaccuucgccacccacgggcucgccgccgucaacuccgugcccugggacacgaucgccaacuacgcgaagccguuccugaacaagguggucagcaccaccaccaacaucgugacgcgcugccugaaccgggugugcaccaacuacaugcccuacuucuucacccuccugcugcagcucugcaccuucacccgcuccacgaacagccggaucaaggccuccaugcccaccaccaucgccaagaacaccgucaagagcgugggcaaguucugccuggaggccagcuucaacuaccugaagucccccaacuucagcaagcucaucaacaucaucaucugguuccugcugcucuccgugugccugggcagccugaucuacuccacggccgcgcucgggguccugaugagcaaccugggcaugccguccuacugcaccggguaccgcgagggcuaccucaacagcaccaacgugaccaucgccacguacugcaccggcuccauccccugcagcgugugccuguccgggcuggacagccucgacaccuaccccucccuggagaccauccagaucacgaucagcuccuucaagugggaccugaccgccuucggccucgucgccgagugguuccuggccuacauccuguucacccgguucuucuacgugcucgggcuggcggccaucaugcagcuguucuucagcuacuucgccgugcacuucaucuccaacagcuggcucauguggcugaucaucaaccugguccagauggcccccaucuccgcgauggugcgcauguacaucuucuucgccagcuucuacuacguguggaagagcuacguccacgugguggacggcugcaacuccagcaccugcaugaugugcuacaagcggaaccgcgccacgcgggucgagugcaccaccaucgugaacgggguccgccgguccuucuacguguacgccaacggcggcaagggguucugcaagcugcacaacuggaacugcgugaacugcgacaccuucugcgccggcagcacguucaucuccgacgaggucgcgcgcgaccucagccugcaguucaagcggccgaucaaccccaccgaccaguccagcuacaucguggacuccgugaccgucaagaacgggagcauccaccuguacuucgacaaggccggccagaagaccuacgagcgccacucccucagccacuucgugaaccuggacaaccugcgggccaacaacacgaaggggucccuccccaucaacgugaucgucuucgacggcaagagcaagugcgaggaguccagcgccaaguccgccagcguguacuacucccagcugaugugccagcccauccugcuccuggaccaggcgcuggugagcgacgucggcgacagcgccgagguggccgugaagauguucgacgccuacgucaacaccuucuccagcaccuucaacgugccgauggagaagcucaagacccugguggccacggcggaggccgagcuggccaagaacgucucccucgacaacgugcugagcaccuucaucuccgccgcgcgccagggguucguggacagcgacgucgagaccaaggacgugguggagugccugaagcucucccaccagagcgacaucgaggucaccggcgacuccugcaacaacuacaugcugacguacaacaagguggagaacaugaccccccgggaccugggggccugcaucgacugcagcgcccgccacaucaacgcccagguggccaagucccacaacaucgcgcucaucuggaacgucaaggacuucaugagccuguccgagcagcugcggaagcagauccgcagcgccgccaagaagaacaaccuccccuucaagcugaccugcgccaccacgcgccagguggugaacgucgugaccaccaagaucgcccugaagggcgggugaggacuagucccuguucccagagcccacuuuuuuuucuuuuuuugaaauaaaauagccugucuuucagaucucaaaggcucuuuucagagccaccaaaaaaaaaaaaaaaaaaaaaaaaaaaaaaaaaaaaaaaaaaaaaaaaaaaaaaaaaaaaaaaaaaaaaaaaaaaaaaaaaaaaaaaaaaaaaaaaaaaaa

SEQ ID NO: 19730 - RNA, 6113 nt, Artificial Sequence
  SARS-CoV-2__MT810984.1__non-structural protein 3 (NSP3) mRNA gc
aggagagucccgcagucggcguccagcggcucugcuuguucgugugugugucguugcaggccuuauucaagcuuaccauggcccccaccaaggugaccuucggcgacgacacggucaucgaggugcagggguacaagagcgugaacaucaccuucgagcuggacgagcgcaucgacaagguccucaacgagaagugcuccgccuacaccguggagcugggcaccgaggugaacgaguucgcgugcgucguggccgacgccgugaucaagacgcugcagccggucagcgagcuccugaccccccuggggaucgaccucgacgagugguccauggccaccuacuaccuguucgacgagagcggcgaguucaagcuggccucccacauguacugcagcuucuacccccccgacgaggacgaggaggagggggacugcgaggaggaggaguucgagccguccacccaguacgaguacggcacggaggacgacuaccagggcaagccccucgaguucggggcgaccagcgccgcccugcagcccgaggaggagcaggaggaggacuggcuggacgacgacucccagcagaccgugggccagcaggacgggagcgaggacaaccagaccacgaccauccagaccaucguggagguccagccccagcucgagauggagcugaccccgguggugcagacgaucgaggucaacuccuucagcggcuaccugaagcucaccgacaacguguacaucaagaacgccgacaucguggaggaggcgaagaaggucaagcccaccgugguggucaacgccgccaacguguaccugaagcacgggggcggcguggccggggcccugaacaaggcgaccaacaacgccaugcaggucgaguccgacgacuacaucgccacgaacggcccccucaagguggggggcagcugcguccuguccggccacaaccuggccaagcacugccuccacgugguggggcccaacgucaacaagggcgaggacauccagcugcugaagagcgccuacgagaacuucaaccagcacgaggugcuccuggcgccgcugcucuccgccgggaucuucggcgccgaccccauccacagccugcgggugugcgucgacaccgugcgcaccaacguguaccuggccgucuucgacaagaaccucuacgacaagcugguguccagcuuccuggagaugaagagcgagaagcagguggagcagaagaucgccgagauccccaaggaggaggucaagcccuucaucaccgaguccaagccgagcguggagcagcggaagcaggacgacaagaagaucaaggcgugcguggaggaggucacgaccacccucgaggagaccaaguuccugacggagaaccugcuccuguacaucgacaucaacgggaaccugcaccccgacuccgccacccucgugagcgacaucgacaucaccuuccugaagaaggacgcccccuacaucgugggcgacgucgugcaggagggcgugcugaccgccgucgugauccccacgaagaaggccgggggcaccaccgagaugcucgcgaaggcccugcgcaaggugccgaccgacaacuacaucacgaccuaccccgggcagggccugaacggguacaccgucgaggaggccaagaccgugcucaagaagugcaaguccguguucuacauccugcccagcaucaucuccaacgagaagcaggagauccugggcaccgucagcuggaaccuccgggagaugcuggcccacgcggaggagacgcgcaagcugaugcccgugugcguggagaccaaggccaucgucuccaccauccagcggaaguacaagggcaucaagauccaggagggggugguggacuacggcgcccgcuucuacuucuacaccagcaagacgaccgucgccucccugaucaacacccucaacgaccugaacgagacccuggugacgaugccgcucggguacgugacccacggccugaaccuggaggaggccgcgcgguacaugcgcagccucaagguccccgccaccguguccgugagcucccccgacgccgucaccgccuacaacggguaccugacgagcuccagcaagacccccgaggagcacuucaucgagaccaucucccuggccggcagcuacaaggacuggagcuacuccggccagagcacccagcucgggaucgaguuccugaagcggggcgacaaguccguguacuacacgagcaacccgaccaccuuccaccuggacggggaggugaucaccuucgacaaccucaagacgcugcugucccuccgcgagguccggaccaucaagguguucaccaccguggacaacaucaaccugcacacgcaggucguggacaugagcaugaccuacggccagcaguucggccccaccuaccuggacggggcggacgugaccaagaucaagccccacaacucccacgagggcaagacguucuacguccucccgaacgacgacacccugcgcguggaggccuucgaguacuaccacaccaccgaccccagcuuccuggggcgguacauguccgcccucaaccacacgaagaaguggaaguacccccaggugaacggccugaccagcaucaagugggccgacaacaacugcuaccuggccaccgcgcuccugacccugcagcagaucgagcucaaguucaaccccccggcccugcaggacgccuacuaccgcgcccgggcgggggaggccgccaacuucugcgcccugauccucgccuacugcaacaagacggucggcgagcugggcgacgugcgcgagaccauguccuaccuguuccagcacgcgaaccucgacagcugcaagcggguccugaacguggugugcaagaccugcgggcagcagcagaccacccugaagggcgucgaggccgugauguacauggggacgcucuccuacgagcaguucaagaagggcgugcagauccccugcaccugcgggaagcaggccaccaaguaccugguccagcaggagagccccuucgugaugauguccgcccccccggcccaguacgagcugaagcacggcaccuucacgugcgcgagcgaguacaccggcaacuaccagugcgggcacuacaagcacaucaccuccaaggagacccucuacugcaucgacggcgcccugcugacgaagagcagcgaguacaaggggcccaucaccgacguguucuacaaggagaacuccuacaccaccacgaucaagcccgucaccuacaagcucgacggcguggugugcaccgagaucgaccccaagcuggacaacuacuacaagaaggacaacagcuacuucaccgagcagccgaucgaccugguccccaaccagcccuaccccaacgccuccuucgacaacuucaaguucgugugcgacaacaucaaguucgccgacgaccucaaccagcugacgggguacaagaagccggccagccgcgagcugaaggugaccuucuuccccgaccucaacggcgacgucguggcgaucgacuacaagcacuacacccccuccuucaagaagggcgccaagcugcugcacaagcccaucguguggcacgucaacaacgccaccaacaaggccacguacaagccgaacaccuggugcauccggugccucuggagcaccaagcccguggagaccuccaacagcuucgacgugcugaaguccgaggacgcgcaggggauggacaaccuggccugcgaggaccucaagcccgucagcgaggaggugguggagaaccccacgauccagaaggacguccuggagugcaacgugaagaccaccgagguggucggcgacaucauccugaagccggccaacaacucccucaagaucaccgaggagguggggcacacggaccugauggccgccuacguggacaacagcucccugaccaucaagaagcccaacgagcucagccgcguccugggccugaagacccucgcgacccacgggcuggccgccgugaacuccgugcccugggacacgaucgccaacuacgccaagccguuccugaacaaggucgugagcaccaccaccaacaucgugacgcgcugccucaaccgggucugcaccaacuacaugcccuacuucuucacccugcugcuccagcugugcaccuucacccgcuccacgaacagccggaucaaggcguccaugcccaccaccaucgccaagaacaccgugaagagcgugggcaaguucugccuggaggccagcuucaacuaccucaagucccccaacuucagcaagcugaucaacaucaucaucugguuccugcuccuguccgucugccugggcagccucaucuacuccacggccgcccugggggugcugaugagcaaccucggcaugccguccuacugcaccggguaccgcgagggcuaccugaacagcaccaacgugaccaucgcgacguacugcaccggcuccauccccugcagcgucugccuguccgggcucgacagccuggacaccuaccccucccuggagaccauccagaucacgaucagcuccuucaagugggaccucaccgccuucggccugguggccgagugguuccuggccuacauccucuucacccgguucuucuacgugcuggggcuggccgcgaucaugcagcucuucuucagcuacuucgccguccacuucaucuccaacagcuggcugauguggcugaucaucaaccuggugcagauggcccccaucuccgccauggugcgcauguacaucuucuucgcgagcuucuacuacgucuggaagagcuacgugcacguggucgacggcugcaacuccagcaccugcaugaugugcuacaagcggaaccgcgccacgcggguggagugcaccaccaucgucaacggggugcgccgguccuucuacguguacgccaacggcggcaagggguucugcaagcuccacaacuggaacugcgucaacugcgacaccuucugcgccggcagcacguucaucuccgacgagguggcccgcgaccugagccugcaguucaagcggccgaucaaccccaccgaccaguccagcuacaucguggacuccgucaccgugaagaacgggagcauccaccucuacuucgacaaggcgggccagaagaccuacgagcgccacucccugagccacuucgugaaccuggacaaccuccgggccaacaacacgaaggggucccugcccaucaacgucaucguguucgacggcaagagcaagugcgaggaguccagcgccaaguccgccagcguguacuacucccagcugaugugccagcccauccuccugcuggaccaggcccucgucagcgacgugggcgacagcgcggagguggccgucaagauguucgacgccuacgugaacaccuucuccagcaccuucaacgugccgauggagaagcugaagacccuggucgccacggccgaggcggagcucgccaagaacgugucccuggacaacgugcugagcaccuucaucuccgccgcccgccagggguucgucgacagcgacguggagaccaaggacguggucgagugccucaagcugucccaccagagcgacaucgaggugaccggcgacuccugcaacaacuacaugcugacguacaacaagguggagaacaugaccccccgggaccucggggcgugcaucgacugcagcgcccgccacaucaacgcccaggucgccaagucccacaacaucgcccugaucuggaacgugaaggacuucaugagccuguccgagcagcuccggaagcagauccgcagcgcggccaagaagaacaaccugcccuucaagcugaccugcgccaccacgcgccagguggucaacguggugaccaccaagaucgcccucaagggcgggugaggacuagucccuguucccagagcccacuuuuuuuucuuuuuuugaaauaaaauagccugucuuucagaucucaaaggcucuuuucagagccaccaaaaaaaaaaaaaaaaaaaaaaaaaaaaaaaaaaaaaaaaaaaaaaaaaaaaaaaaaaaaaaaaaaaaaaaaaaaaaaaaaaaaaaaaaaaaaaaaaaaaa

SEQ ID NO: 19731 - RNA, 6113 nt, Artificial Sequence
  SARS-CoV-2__MT810985.1__non-structural protein 3 (NSP3) mRNA gc
aggagagucccgcagucggcguccagcggcucugcuuguucgugugugugucguugcaggccuuauucaagcuuaccauggcccccaccaaggugaccuucggcgacgacacggucaucgaggugcagggguacaagagcgugaacaucaccuucgagcuggacgagcgcaucgacaagguccucaacgagaagugcuccgccuacaccguggagcugggcaccgaggugaacgaguucgcgugcgucguggccgacgccgugaucaagacgcugcagccggucagcgagcuccugaccccccuggggaucgaccucgacgagugguccauggccaccuacuaccuguucgacgagagcggcgaguucaagcuggccucccacauguacugcagcuucuacccccccgacgaggacgaggaggagggggacugcgaggaggaggaguucgagccguccacccaguacgaguacggcacggaggacgacuaccagggcaagccccucgaguucggggcgaccagcgccgcccugcagcccgaggaggagcaggaggaggacuggcuggacgacgacucccagcagaccgugggccagcaggacgggagcgaggacaaccagaccacgaccauccagaccaucguggagguccagccccagcucgagauggagcugaccccgguggugcagacgaucgaggucaacuccuucagcggcuaccugaagcucaccgacaacguguacaucaagaacgccgacaucguggaggaggcgaagaaggucaagcccaccgugguggucaacgccgccaacguguaccugaagcacgggggcggcguggccggggcccugaacaaggcgaccaacaacgccaugcaggucgaguccgacgacuacaucgccacgaacggcccccucaagguggggggcagcugcguccuguccggccacaaccuggccaagcacugccuccacgugguggggcccaacgucaacaagggcgaggacauccagcugcugaagagcgccuacgagaacuucaaccagcacgaggugcuccuggcgccgcugcucuccgccgggaucuucggcgccgaccccauccacagccugcgggugugcgucgacaccgugcgcaccaacguguaccuggccgucuucgacaagaaccucuacgacaagcugguguccagcuuccuggagaugaagagcgagaagcagguggagcagaagaucgccgagauccccaaggaggaggucaagcccuucaucaccgaguccaagccgagcguggagcagcggaagcaggacgacaagaagaucaaggcgugcguggaggaggucacgaccacccucgaggagaccaaguuccugacggagaaccugcuccuguacaucgacaucaacgggaaccugcaccccgacuccgccacccucgugagcgacaucgacaucaccuuccugaagaaggacgcccccuacaucgugggcgacgucauccaggagggcgugcugaccgccguggucauccccacgaagaaggccgggggcaccaccgagaugcucgcgaaggcccugcgcaaggugccgaccgacaacuacaucacgaccuaccccgggcagggccugaacggguacaccguggaggaggccaagaccguccucaagaagugcaaguccgccuucuacauccugcccagcaucaucuccaacgagaagcaggagauccugggcaccgugagcuggaaccuccgggagaugcuggcgcacgccgaggagacgcgcaagcugaugcccgugugcgucgagaccaaggccaucguguccaccauccagcggaaguacaagggcaucaagauccaggaggggguggucgacuacggcgcccgcuucuacuucuacaccagcaagacgaccguggccucccugaucaacacccucaacgaccugaacgagacccuggugacgaugccgcucggguacgucacccacggccugaaccuggaggaggcggcccgguacaugcgcagccucaaggugcccgccaccguguccgucagcucccccgacgccgugaccgccuacaacggguaccugacgagcuccagcaagacccccgaggagcacuucaucgagaccaucucccuggcgggcagcuacaaggacuggagcuacuccggccagagcacccagcucgggaucgaguuccugaagcggggcgacaaguccguguacuacacgagcaacccgaccaccuuccaccuggacggggaggucaucaccuucgacaaccucaagacgcugcugucccuccgcgaggugcggaccaucaagguguucaccaccgucgacaacaucaaccugcacacgcaggugguggacaugagcaugaccuacggccagcaguucggccccaccuaccuggacggggccgacgucaccaagaucaagccccacaacucccacgagggcaagacguucuacgugcucccgaacgacgacacccugcgcguggaggccuucgaguacuaccacaccaccgaccccagcuuccuggggcgguacauguccgcccucaaccacacgaagaaguggaaguacccccaggucaacggccugaccagcaucaagugggccgacaacaacugcuaccuggcgaccgcccuccugacccugcagcagaucgagcucaaguucaaccccccggcccugcaggacgccuacuaccgcgcgcgggccggggaggccgccaacuucugcgcccugauccucgcguacugcaacaagacggugggcgagcugggcgacgugcgcgagaccauguccuaccuguuccagcacgccaaccucgacagcugcaagcggguccugaacguggucugcaagaccugcgggcagcagcagaccacccugaagggcguggaggccgugauguacauggggacgcucuccuacgagcaguucaagaagggcguccagauccccugcaccugcgggaagcaggccaccaaguaccuggugcagcaggagagccccuucgugaugauguccgcccccccggcgcaguacgagcugaagcacggcaccuucacgugcgccagcgaguacaccggcaacuaccagugcgggcacuacaagcacaucaccuccaaggagacccucuacugcaucgacggcgcccugcugacgaagagcagcgaguacaaggggcccaucaccgacgucuucuacaaggagaacuccuacaccaccacgaucaagcccgugaccuacaagcucgacggcguggucugcaccgagaucgaccccaagcuggacaacuacuacaagaaggacaacagcuacuucaccgagcagccgaucgaccuggugcccaaccagcccuaccccaacgccuccuucgacaacuucaaguucgugugcgacaacaucaaguucgccgacgaccucaaccagcugacgggguacaagaagccggcgagccgcgagcugaaggucaccuucuuccccgaccucaacggcgacgugguggccaucgacuacaagcacuacacccccuccuucaagaagggcgccaagcugcugcacaagcccaucgucuggcacgugaacaacgccaccaacaaggcgacguacaagccgaacaccuggugcauccggugccucuggagcaccaagcccguggagaccuccaacagcuucgacguccugaaguccgaggacgcccaggggauggacaaccuggccugcgaggaccucaagcccgugagcgaggagguggucgagaaccccacgauccagaaggacgugcuggagugcaacgugaagaccaccgaggucgugggcgacaucauccugaagccggccaacaacucccucaagaucaccgaggagguggggcacacggaccugauggccgcguacgucgacaacagcucccugaccaucaagaagcccaacgagcucagccgcgugcugggccugaagacccucgccacccacgggcuggccgccgugaacuccguccccugggacacgaucgccaacuacgcgaagccguuccugaacaagguggugagcaccaccaccaacaucgucacgcgcugccucaaccgggugugcaccaacuacaugcccuacuucuucacccugcugcuccagcugugcaccuucacccgcuccacgaacagccggaucaaggccuccaugcccaccaccaucgccaagaacaccgugaagagcgucggcaaguucugccuggaggccagcuucaacuaccucaagucccccaacuucagcaagcugaucaacaucaucaucugguuccugcuccuguccgugugccugggcagccucaucuacuccacggccgcgcugggggugcugaugagcaaccucggcaugccguccuacugcaccggguaccgcgagggcuaccugaacagcaccaacgucaccaucgccacguacugcaccggcuccauccccugcagcgugugccuguccgggcucgacagccuggacaccuaccccucccuggagaccauccagaucacgaucagcuccuucaagugggaccucaccgccuucggccugguggccgagugguuccuggccuacauccucuucacccgguucuucuacguccuggggcuggcggccaucaugcagcucuucuucagcuacuucgccgugcacuucaucuccaacagcuggcugauguggcugaucaucaaccuggugcagauggcccccaucuccgcgaugguccgcauguacaucuucuucgccagcuucuacuacguguggaagagcuacgugcacgucguggacggcugcaacuccagcaccugcaugaugugcuacaagcggaaccgcgccacgcggguggagugcaccaccaucgucaacggggugcgccgguccuucuacgucuacgccaacggcggcaagggguucugcaagcuccacaacuggaacugcgugaacugcgacaccuucugcgccggcagcacguucaucuccgacgagguggcgcgcgaccugagccugcaguucaagcggccgaucaaccccaccgaccaguccagcuacaucgucgacuccgugaccgugaagaacgggagcauccaccucuacuucgacaaggccggccagaagaccuacgagcgccacucccugagccacuucgucaaccuggacaaccuccgggccaacaacacgaaggggucccugcccaucaacgugaucguguucgacggcaagagcaagugcgaggaguccagcgccaaguccgccagcgucuacuacucccagcugaugugccagcccauccuccugcuggaccaggcgcucgugagcgacgugggcgacagcgccgaggucgccgugaagauguucgacgccuacgugaacaccuucuccagcaccuucaacgucccgauggagaagcugaagacccugguggccacggcggaggccgagcucgccaagaacgugucccuggacaacguccugagcaccuucaucuccgccgcgcgccagggguucguggacagcgacguggagaccaaggacgucguggagugccucaagcugucccaccagagcgacaucgaggugaccggcgacuccugcaacaacuacaugcugacguacaacaaggucgagaacaugaccccccgggaccucggggccugcaucgacugcagcgcccgccacaucaacgcccagguggccaagucccacaacaucgcgcugaucuggaacgugaaggacuucaugagccuguccgagcagcuccggaagcagauccgcagcgccgccaagaagaacaaccugcccuucaagcugaccugcgccaccacgcgccaggucgugaacguggucaccaccaagaucgcccucaagggcgggugaggacuagucccuguucccagagcccacuuuuuuuucuuuuuuugaaauaaaauagccugucuuucagaucucaaaggcucuuuucagagccaccaaaaaaaaaaaaaaaaaaaaaaaaaaaaaaaaaaaaaaaaaaaaaaaaaaaaaaaaaaaaaaaaaaaaaaaaaaaaaaaaaaaaaaaaaaaaaaaaaaaaa

SEQ ID NO: 19732 - RNA, 6113 nt, Artificial Sequence
  SARS-CoV-2__MT811197.1__non-structural protein 3 (NSP3) mRNA gc
aggagagucccgcagucggcguccagcggcucugcuuguucgugugugugucguugcaggccuuauucaagcuuaccauggcccccaccaaggugaccuucggcgacgacacggucaucgaggugcagggguacaagagcgugaacaucaccuucgagcuggacgagcgcaucgacaagguccucaacgagaagugcuccgccuacaccguggagcugggcaccgaggugaacgaguucgcgugcgucguggccgacgccgugaucaagacgcugcagccggucagcgagcuccugaccccccuggggaucgaccucgacgagugguccauggccaccuacuaccuguucgacgagagcggcgaguucaagcuggccucccacauguacugcagcuucuacccccccgacgaggacgaggaggagggggacugcgaggaggaggaguucgagccguccacccaguacgaguacggcacggaggacgacuaccagggcaagccccucgaguucggggcgaccagcgccgcccugcagcccgaggaggagcaggaggaggacuggcuggacgacgacucccagcagaccgugggccagcaggacgggagcgaggacaaccagaccacgaccauccagaccaucguggagguccagccccagcucgagauggagcugaccccgguggugcagacgaucgaggucaacuccuucagcggcuaccugaagcucaccgacaacguguacaucaagaacgccgacaucguggaggaggcgaagaaggucaagcccaccgugguggucaacgccgccaacguguaccugaagcacgggggcggcguggccggggcccugaacaaggcgaccaacaacgccaugcaggucgaguccgacgacuacaucgccacgaacggcccccucaagguggggggcagcugcguccuguccggccacaaccuggccaagcacugccuccacgugguggggcccaacgucaacaagggcgaggacauccagcugcugaagagcgccuacgagaacuucaaccagcacgaggugcuccuggcgccgcugcucuccgccgggaucuucggcgccgaccccauccacagccugcgggugugcgucgacaccgugcgcaccaacguguaccuggccgucuucgacaagaaccucuacgacaagcugguguccagcuuccuggagaugaagagcgagaagcagguggagcagaagaucgccgagauccccaaggaggaggucaagcccuucaucaccgaguccaagccgagcguggagcagcggaagcaggacgacaagaagaucaaggcgugcguggaggaggucacgaccacccucgaggagaccaaguuccugacggagaaccugcuccuguacaucgacaucaacgggaaccugcaccccgacuccgccacccucgugagcgacaucgacaucaccuuccugaagaaggacgcccccuacaucgugggcgacgucgugcaggagggcgugcugaccgccgucgugauccccacgaagaaggccgggggcaccaccgagaugcucgcgaaggcccugcgcaaggugccgaccgacaacuacaucacgaccuaccccgggcagggccugaacggguacaccgucgaggaggccaagaccgugcucaagaagugcaaguccgccuucuacauccugcccagcaucaucuccaacgagaagcaggagauccugggcaccgugagcuggaaccuccgggagaugcuggcgcacgccgaggagacgcgcaagcugaugcccgucugcguggagaccaaggccaucguguccaccauccagcggaaguacaagggcaucaagauccaggagggggucguggacuacggcgcccgcuucuacuucuacaccagcaagacgaccguggccucccugaucaacacccucaacgaccugaacgagacccuggucacgaugccgcucggguacgugacccacggccugaaccuggaggaggcggcccgguacaugcgcagccucaaggugcccgccaccgucuccgugagcucccccgacgccgugaccgccuacaacggguaccugacgagcuccagcaagacccccgaggagcacuucaucgagaccaucucccuggcgggcagcuacaaggacuggagcuacuccggccagagcacccagcucgggaucgaguuccugaagcggggcgacaaguccgucuacuacacgagcaacccgaccaccuuccaccuggacggggaggugaucaccuucgacaaccucaagacgcugcugucccuccgcgaggugcggaccaucaaggucuucaccaccguggacaacaucaaccugcacacgcagguggucgacaugagcaugaccuacggccagcaguucggccccaccuaccuggacggggccgacgugaccaagaucaagccccacaacucccacgagggcaagacguucuacgugcucccgaacgacgacacccugcgcgucgaggccuucgaguacuaccacaccaccgaccccagcuuccuggggcgguacauguccgcccucaaccacacgaagaaguggaaguacccccaggugaacggccugaccagcaucaagugggccgacaacaacugcuaccuggcgaccgcccuccugacccugcagcagaucgagcucaaguucaaccccccggcccugcaggacgccuacuaccgcgcgcgggccggggaggccgccaacuucugcgcccugauccucgcguacugcaacaagacggugggcgagcugggcgacguccgcgagaccauguccuaccuguuccagcacgccaaccucgacagcugcaagcgggugcugaacgucgugugcaagaccugcgggcagcagcagaccacccugaagggcguggaggccgucauguacauggggacgcucuccuacgagcaguucaagaagggcgugcagauccccugcaccugcgggaagcaggccaccaaguaccuggugcagcaggagagccccuucgucaugauguccgcccccccggcgcaguacgagcugaagcacggcaccuucacgugcgccagcgaguacaccggcaacuaccagugcgggcacuacaagcacaucaccuccaaggagacccucuacugcaucgacggcgcccugcugacgaagagcagcgaguacaaggggcccaucaccgacguguucuacaaggagaacuccuacaccaccacgaucaagcccgugaccuacaagcucgacggcgucgugugcaccgagaucgaccccaagcuggacaacuacuacaagaaggacaacagcuacuucaccgagcagccgaucgaccuggugcccaaccagcccuaccccaacgccuccuucgacaacuucaaguucgucugcgacaacaucaaguucgccgacgaccucaaccagcugacgggguacaagaagccggcgagccgcgagcugaaggugaccuucuuccccgaccucaacggcgacguggucgccaucgacuacaagcacuacacccccuccuucaagaagggcgccaagcugcugcacaagcccaucguguggcacgugaacaacgccaccaacaaggcgacguacaagccgaacaccuggugcauccggugccucuggagcaccaagcccgucgagaccuccaacagcuucgacgugcugaaguccgaggacgcccaggggauggacaaccuggccugcgaggaccucaagcccgugagcgaggaggucguggagaaccccacgauccagaaggacgugcuggagugcaacgucaagaccaccgagguggugggcgacaucauccugaagccggccaacaacucccucaagaucaccgaggaggucgggcacacggaccugauggccgcguacguggacaacagcucccugaccaucaagaagcccaacgagcucagccgcgugcugggccugaagacccucgccacccacgggcuggccgccgucaacuccgugcccugggacacgaucgccaacuacgcgaagccguuccugaacaagguggucagcaccaccaccaacaucgugacgcgcugccucaaccgggugugcaccaacuacaugcccuacuucuucacccugcugcuccagcugugcaccuucacccgcuccacgaacagccggaucaaggccuccaugcccaccaccaucgccaagaacaccgucaagagcgugggcaaguucugccuggaggccagcuucaacuaccucaagucccccaacuucagcaagcugaucaacaucaucaucugguuccugcuccuguccgugugccugggcagccucaucuacuccacggccgcgcuggggguccugaugagcaaccucggcaugccguccuacugcaccggguaccgcgagggcuaccugaacagcaccaacgugaccaucgccacguacugcaccggcuucauccccugcuccgugugccugagcgggcucgacucccuggacaccuaccccagccuggagaccauccagaucacgaucuccagcuucaagugggaccucaccgccuucggccuggucgccgagugguuccuggccuacauccucuucacccgguucuucuacgugcuggggcuggcggccaucaugcagcucuucuucuccuacuucgccgugcacuucaucagcaacuccuggcugauguggcugaucaucaaccugguccagauggcccccaucagcgcgauggugcgcauguacaucuucuucgccuccuucuacuacguguggaagagcuacguccacgugguggacggcugcaacagcuccaccugcaugaugugcuacaagcggaaccgcgccacgcgggucgagugcaccaccaucgugaacgggguccgccggagcuucuacguguacgccaacggcggcaagggguucugcaagcuccacaacuggaacugcgugaacugcgacaccuucugcgccggcuccacguucaucagcgacgaggucgcgcgcgaccugucccugcaguucaagcggccgaucaaccccaccgaccagagcuccuacaucguggacagcgugaccgucaagaacggguccauccaccucuacuucgacaaggccggccagaagaccuacgagcgccacagccugucccacuucgugaaccuggacaaccuccgggccaacaacacgaaggggagccugcccaucaacgugaucgucuucgacggcaaguccaagugcgaggagagcuccgccaagagcgccuccguguacuacagccagcugaugugccagcccauccuccugcuggaccaggcgcucguguccgacgucggcgacagcgccgagguggccgugaagauguucgacgccuacgucaacaccuucagcuccaccuucaacgugccgauggagaagcugaagacccugguggccacggcggaggccgagcucgccaagaacgucagccuggacaacgugcuguccaccuucaucagcgccgcgcgccagggguucguggacuccgacgucgagaccaaggacgugguggagugccucaagcugagccaccaguccgacaucgaggucaccggcgacagcugcaacaacuacaugcugacguacaacaagguggagaacaugaccccccgggaccucggggccugcaucgacugcuccgcccgccacaucaacgcccagguggccaagagccacaacaucgcgcugaucuggaacgucaaggacuucaugucccugagcgagcagcuccggaagcagauccgcuccgccgccaagaagaacaaccugcccuucaagcugaccugcgccaccacgcgccagguggugaacgucgugaccaccaagaucgcccucaagggcgggugaggacuagucccuguucccagagcccacuuuuuuuucuuuuuuugaaauaaaauagccugucuuucagaucucaaaggcucuuuucagagccaccaaaaaaaaaaaaaaaaaaaaaaaaaaaaaaaaaaaaaaaaaaaaaaaaaaaaaaaaaaaaaaaaaaaaaaaaaaaaaaaaaaaaaaaaaaaaaaaaaaaaa

SEQ ID NO: 19733 - RNA, 6113 nt, Artificial Sequence
  SARS-CoV-2__MT811244.1__non-structural protein 3 (NSP3) mRNA gc
aggagagucccgcagucggcguccagcggcucugcuuguucgugugugugucguugcaggccuuauucaagcuuaccauggcccccaccaaggugaccuucggcgacgacacggucaucgaggugcagggguacaagagcgugaacaucaccuucgagcuggacgagcgcaucgacaagguccucaacgagaagugcuccgccuacaccguggagcugggcaccgaggugaacgaguucgcgugcgucguggccgacgccgugaucaagacgcugcagccggucagcgagcuccugaccccccuggggaucgaccucgacgagugguccauggccaccuacuaccuguucgacgagagcggcgaguucaagcuggccucccacauguacugcagcuucuacccccccgacgaggacgaggaggagggggacugcgaggaggaggaguucgagccguccacccaguacgaguacggcacggaggacgacuaccagggcaagccccucgaguucggggcgaccagcgccgcccugcagcccgaggaggagcaggaggaggacuggcuggacgacgacucccagcagaccgugggccagcaggacgggagcgaggacaaccagaccacgaccauccagaccaucguggagguccagccccagcucgagauggagcugaccccgguggugcagacgaucgaggucaacuccuucagcggcuaccugaagcucaccgacaacguguacaucaagaacgccgacaucguggaggaggcgaagaaggucaagcccaccgugguggucaacgccgccaacguguaccugaagcacgggggcggcguggccggggcccugaacaaggcgaccaacaacgccaugcaggucgaguccgacgacuacaucgccacgaacggcagccucaagguggggggcuccugcguccugagcggccacaaccuggccaagcacugccuccacgugguggggcccaacgucaacaagggcgaggacauccagcugcugaaguccgccuacgagaacuucaaccagcacgaggugcuccuggcgccccugcucagcgccgggaucuucggcgccgacccgauccacucccugcgggugugcgucgacaccgugcgcaccaacguguaccuggccgucuucgacaagaaccucuacgacaagcuggugagcagcuuccuggagaugaaguccgagaagcagguggagcagaagaucgccgagauccccaaggaggaggucaagcccuucaucaccgagagcaagcccuccguggagcagcggaagcaggacgacaagaagaucaaggcgugcguggaggaggucacgaccacccucgaggagaccaaguuccugacggagaaccugcuccuguacaucgacaucaacgggaaccugcacccggacagcgccacccucguguccgacaucgacaucaccuuccugaagaaggacgcccccuacaucgugggcgacgucgugcaggagggcgugcugaccgccgucgugauccccacgaagaaggccgggggcaccaccgagaugcucgcgaaggcccugcgcaaggugcccaccgacaacuacaucacgaccuacccggggcagggccugaacggguacaccgucgaggaggccaagaccgugcucaagaagugcaagagcgccuucuacauccugcccuccaucaucagcaacgagaagcaggagauccugggcaccguguccuggaaccuccgggagaugcuggcgcacgccgaggagacgcgcaagcugaugcccgucugcguggagaccaaggccaucgugagcaccauccagcggaaguacaagggcaucaagauccaggagggggucguggacuacggcgcccgcuucuacuucuacaccuccaagacgaccguggccagccugaucaacacccucaacgaccugaacgagacccuggucacgaugccccucggguacgugacccacggccugaaccuggaggaggcggcccgguacaugcgcucccucaaggugccggccaccgucagcguguccagccccgacgccgugaccgccuacaacggguaccugacguccagcuccaagacccccgaggagcacuucaucgagaccaucagccuggcgggcagcuacaaggacugguccuacagcggccaguccacccagcucgggaucgaguuccugaagcggggcgacaagagcgucuacuacacguccaaccccaccaccuuccaccuggacggggaggugaucaccuucgacaaccucaagacgcugcugagccuccgcgaggugcggaccaucaaggucuucaccaccguggacaacaucaaccugcacacgcagguggucgacauguccaugaccuacggccagcaguucggcccgaccuaccuggacggggccgacgugaccaagaucaagccccacaacagccacgagggcaagacguucuacgugcuccccaacgacgacacccugcgcgucgaggccuucgaguacuaccacaccaccgacccguccuuccuggggcgguacaugagcgcccucaaccacacgaagaaguggaaguacccccaggugaacggccugaccuccaucaagugggccgacaacaacugcuaccuggcgaccgcccuccugacccugcagcagaucgagcucaaguucaacccccccgcccugcaggacgccuacuaccgcgcgcgggccggggaggccgccaacuucugcgcccugauccucgcguacugcaacaagacggugggcgagcugggcgacguccgcgagaccaugagcuaccuguuccagcacgccaaccucgacuccugcaagcgggugcugaacgucgugugcaagaccugcgggcagcagcagaccacccugaagggcguggaggccgucauguacauggggacgcucagcuacgagcaguucaagaagggcgugcagaucccgugcaccugcgggaagcaggccaccaaguaccuggugcagcaggagucccccuucgucaugaugagcgccccccccgcgcaguacgagcugaagcacggcaccuucacgugcgccuccgaguacaccggcaacuaccagugcgggcacuacaagcacaucaccagcaaggagacccucuacugcaucgacggcgcccugcugacgaagagcuccgaguacaaggggccgaucaccgacguguucuacaaggagaacagcuacaccaccacgaucaagcccgugaccuacaagcucgacggcgucgugugcaccgagaucgaccccaagcuggacaacuacuacaagaaggacaacuccuacuucaccgagcagcccaucgaccuggugccgaaccagcccuaccccaacgccagcuucgacaacuucaaguucgucugcgacaacaucaaguucgccgacgaccucaaccagcugacgggguacaagaagcccgcgucccgcgagcugaaggugaccuucuucccggaccucaacggcgacguggucgccaucgacuacaagcacuacacccccagcuucaagaagggcgccaagcugcugcacaagcccaucguguggcacgugaacaacgccaccaacaaggcgacguacaagcccaacaccuggugcauccggugccucugguccaccaagccggucgagaccagcaacuccuucgacgugcugaagagcgaggacgcccaggggauggacaaccuggccugcgaggaccucaagcccguguccgaggaggucguggagaaccccacgauccagaaggacgugcuggagugcaacgucaagaccaccgagguggugggcgacaucauccugaagcccgccaacaacagccucaagaucaccgaggaggucgggcacacggaccugauggccgcguacguggacaacuccagccugaccaucaagaagccgaacgagcucucccgcgugcugggccugaagacccucgccacccacgggcuggccgccgucaacagcgugcccugggacacgaucgccaacuacgcgaagcccuuccugaacaagguggucuccaccaccaccaacaucgugacgcgcugccucaaccgggugugcaccaacuacaugccguacuucuucacccugcugcuccagcugugcaccuucacccgcagcacgaacucccggaucaaggccagcaugcccaccaccaucgccaagaacaccgucaagagcgugggcaaguucugccuggaggccuccuucaacuaccucaagagccccaacuucuccaagcugaucaacaucaucaucugguuccugcuccugagcgugugccugggcucccucaucuacagcacggccgcgcuggggguccugauguccaaccucggcaugcccagcuacugcaccggguaccgcgagggcuaccugaacuccaccaacgugaccaucgccacguacugcaccggcagcaucccgugcuccgugugccugagcgggcucgacucccuggacaccuaccccagccuggagaccauccagaucacgaucuccagcuucaagugggaccucaccgccuucggccuggucgccgagugguuccuggccuacauccucuucacccgguucuucuacgugcuggggcuggcggccaucaugcagcucuucuucuccuacuucgccgugcacuucaucagcaacuccuggcugauguggcugaucaucaaccugguccagauggcccccaucagcgcgauggugcgcauguacaucuucuucgccagcuucuacuacguguggaaguccuacguccacgugguggacggcugcaacagcuccaccugcaugaugugcuacaagcggaaccgcgccacgcgggucgagugcaccaccaucgugaacgggguccgccggagcuucuacguguacgccaacggcggcaagggguucugcaagcuccacaacuggaacugcgugaacugcgacaccuucugcgccggcuccacguucaucagcgacgaggucgcgcgcgaccugucccugcaguucaagcggcccaucaacccgaccgaccagagcuccuacaucguggacagcgugaccgucaagaacggguccauccaccucuacuucgacaaggccggccagaagaccuacgagcgccacagccugucccacuucgugaaccuggacaaccuccgggccaacaacacgaaggggagccugcccaucaacgugaucgucuucgacggcaaguccaagugcgaggagagcuccgccaagagcgccuccguguacuacagccagcugaugugccagcccauccuccugcuggaccaggcgcucgugagcgacgucggcgacuccgccgagguggccgugaagauguucgacgccuacgucaacaccuucagcuccaccuucaacgugcccauggagaagcugaagacccugguggccacggcggaggccgagcucgccaagaacgucagccuggacaacgugcuguccaccuucaucagcgccgcgcgccagggguucguggacuccgacgucgagaccaaggacgugguggagugccucaagcugagccaccaguccgacaucgaggucaccggcgacagcugcaacaacuacaugcugacguacaacaagguggagaacaugaccccgcgggaccucggggccugcaucgacugcuccgcccgccacaucaacgcccagguggccaagagccacaacaucgcgcugaucuggaacgucaaggacuucaugucccugagcgagcagcuccggaagcagauccgcuccgccgccaagaagaacaaccugcccuucaagcugaccugcgccaccacgcgccagguggugaacgucgugaccaccaagaucgcccucaagggcgggugaggacuagucccuguucccagagcccacuuuuuuuucuuuuuuugaaauaaaauagccugucuuucagaucucaaaggcucuuuucagagccaccaaaaaaaaaaaaaaaaaaaaaaaaaaaaaaaaaaaaaaaaaaaaaaaaaaaaaaaaaaaaaaaaaaaaaaaaaaaaaaaaaaaaaaaaaaaaaaaaaaaaa

SEQ ID NO: 19734 - RNA, 6113 nt, Artificial Sequence
  SARS-CoV-2__MT811247.1__non-structural protein 3 (NSP3) mRNA gc
aggagagucccgcagucggcguccagcggcucugcuuguucgugugugugucguugcaggccuuauucaagcuuaccauggcccccaccaaggugaccuucggcgacgacacggucaucgaggugcagggguacaagagcgugaacaucaccuucgagcuggacgagcgcaucgacaagguccucaacgagaagugcuccgccuacaccguggagcugggcaccgaggugaacgaguucgcgugcgucguggccgacgccgugaucaagacgcugcagccggucagcgagcuccugaccccccuggggaucgaccucgacgagugguccauggccaccuacuaccuguucgacgagagcggcgaguucaagcuggccucccacauguacugcagcuucuacccccccgacgaggacgaggaggagggggacugcgaggaggaggaguucgagccguccacccaguacgaguacggcacggaggacgacuaccagggcaagccccucgaguucggggcgaccagcgccgcccugcagcccgaggaggagcaggaggaggacuggcuggacgacgacucccagcagaccgugggccagcaggacgggagcgaggacaaccagaccacgaccauccagaccaucguggagguccagccccagcucgagauggagcugaccccgguggugcagacgaucgaggucaacuccuucagcggcuaccugaagcucaccgacaacguguacaucaagaacgccgacaucguggaggaggcgaagaaggucaagcccaccgugguggucaacgccgccaacguguaccugaagcacgggggcggcguggccggggcccugaacaaggcgaccaacaacgccaugcaggucgaguccgacgacuacaucgccacgaacggcccccucaagguggggggcagcugcguccuguccggccacaaccuggccaagcacugccuccacgugguggggcccaacgucaacaagggcgaggacauccagcugcugaagagcgccuacgagaacuucaaccagcacgaggugcuccuggcgccgcugcucuccgccgggaucuucggcgccgaccccauccacagccugcgggugugcgucgacaccgugcgcaccaacguguaccuggccgucuucgacaagaaccucuacgacaagcugguguccagcuuccuggagaugaagagcgagaagcagguggagcagaagaucgccgagauccccaaggaggaggucaagcccuucaucaccgaguccaagccgagcguggagcagcggaagcaggacgacaagaagaucaaggcgugcguggaggaggucacgaccacccucgaggagaccaaguuccugacggagaaccugcuccuguacaucgacaucaacgggaaccugcaccccgacuccgccacccucgugagcgacaucgacaucaccuuccugaagaaggacgcccccuacaucgugggcgacgucgugcaggagggcgugcugaccgccgucgugauccccacgaagaaggccgggggcaccaccgagaugcucgcgaaggcccugcgcaaggugccgaccgacaacuacaucacgaccuaccccgggcagggccugaacggguacaccgucgaggaggccaagaccgugcucaagaagugcaaguccgccuucuacauccugcccagcaucaucuccaacgagaagcaggagauccugggcaccgugagcuggaaccuccgggagaugcuggcgcacgccgaggagacgcgcaagcugaugcccgucugcguggagaccaaggccaucguguccaccauccagcggaaguacaagggcaucaagauccaggagggggucguggacuacggcgcccgcuucuacuucuacaccagcaagacgaccguggccucccugaucaacacccucaacgaccugaacgagacccuggucacgaugccgcucggguacgugacccacggccugaaccuggaggaggcggcccgguacaugcgcagccucaaggugcccgccaccgucuccgugagcucccccgacgccgugaccgccuacaacggguaccugacgagcuccagcaagacccccgaggagcacuucaucgagaccaucucccuggcgggcagcuacaaggacuggagcuacuccggccagagcacccagcucgggaucgaguuccugaagcggggcgacaaguccgucuacuacacgagcaacccgaccaccuuccaccuggacggggaggugaucaccuucgacaaccucaagacgcugcugucccuccgcgaggugcggaccaucaaggucuucaccaccguggacaacaucaaccugcacacgcagguggucgacaugagcaugaccuacggccagcaguucggccccaccuaccuggacggggccgacgugaccaagaucaagccccacaacucccacgagggcaagacguucuacgugcucccgaacgacgacacccugcgcgucgaggccuucgaguacuaccacaccaccgaccccagcuuccuggggcgguacauguccgcccucaaccacacgaagaaguggaaguacccccaggugaacggccugaccagcaucaagugggccgacaacaacugcuaccuggcgaccgcccuccugacccugcagcagaucgagcucaaguucaaccccccggcccugcaggacgccuacuaccgcgcgcgggccggggaggccgccaacuucugcgcccugauccucgcguacugcaacaagacggugggcgagcugggcgacguccgcgagaccauguccuaccuguuccagcacgccaaccucgacagcugcaagcgggugcugaacgucgugugcaagaccugcgggcagcagcagaccacccugaagggcguggaggccgucauguacauggggacgcucuccuacgagcaguucaagaagggcgugcagauccccugcaccugcgggaagcaggccaccaaguaccuggugcagcaggagagccccuucgucaugauguccgcccccccggcgcaguacgagcugaagcacggcaccuucacgugcgccagcgaguacaccggcaacuaccagugcgggcacuacaagcacaucaccuccaaggagacccucuacugcaucgacggcgcccugcugacgaagagcagcgaguacaaggggcccaucaccgacguguucuacaaggagaacuccuacaccaccacgaucaagcccgugaccuacaagcucgacggcgucgugugcaccgagaucgaccccaagcuggacaacuacuacaagaaggacaacagcuacuucaccgagcagccgaucgaccuggugcccaaccagcccuaccccaacgccuccuucgacaacuucaaguucgucugcgacaacaucaaguucgccgacgaccucaaccagcugacgggguacaagaagccggcgagccgcgagcugaaggugaccuucuuccccgaccucaacggcgacguggucgccaucgacuacaagcacuacacccccuccuucaagaagggcgccaagcugcugcacaagcccaucguguggcacgugaacaacgccaccaacaaggcgacguacaagccgaacaccuggugcauccggugccucuggagcaccaagcccgucgagaccuccaacagcuucgacgugcugaaguccgaggacgcccacgggauggacaaccuggccugcgaggaccucaagcccgugagcgaggaggucguggagaaccccacgauccagaaggacgugcuggagugcaacgucaagaccaccgagguggugggcgacaucauccugaagccggccaacaacucccucaagaucaccgaggaggucgggcacacggaccugauggccgcguacguggacaacagcucccugaccaucaagaagcccaacgagcucagccgcgugcugggccugaagacccucgccacccacgggcuggccgccgucaacuccgugcccugggacacgaucgccaacuacgcgaagccguuccugaacaagguggucagcaccaccaccaacaucgugacgcgcugccucaaccgggugugcaccaacuacaugcccuacuucuucacccugcugcuccagcugugcaccuucacccgcuccacgaacagccggaucaaggccuccaugcccaccaccaucgccaagaacaccgucaagagcgugggcaaguucugccuggaggccagcuucaacuaccucaagucccccaacuucagcaagcugaucaacaucaucaucugguuccugcuccuguccgugugccugggcagccucaucuacuccacggccgcgcuggggguccugaugagcaaccucggcaugccguccuacugcaccggguaccgcgagggcuaccugaacagcaccaacgugaccaucgccacguacugcaccggcuccauccccugcagcgugugccuguccgggcucgacagccuggacaccuaccccucccuggagaccauccagaucacgaucagcuccuucaagugggaccucaccgccuucggccuggucgccgagugguuccuggccuacauccucuucacccgguucuucuacgugcuggggcuggcggccaucaugcagcucuucuucagcuacuucgccgugcacuucaucuccaacagcuggcugauguggcugaucaucaaccugguccagauggcccccaucuccgcgauggugcgcauguacaucuucuucgccagcuucuacuacguguggaagagcuacguccacgugguggacggcugcaacuccagcaccugcaugaugugcuacaagcggaaccgcgccacgcgggucgagugcaccaccaucgugaacgggguccgccgguccuucuacguguacgccaacggcggcaagggguucugcaagcuccacaacuggaacugcgugaacugcgacaccuucugcgccggcagcacguucaucuccgacgaggucgcgcgcgaccugagccugcaguucaagcggccgaucaaccccaccgaccaguccagcuacaucguggacuccgugaccgucaagaacgggagcauccaccucuacuucgacaaggccggccagaagaccuacgagcgccacucccugagccacuucgugaaccuggacaaccuccgggccaacaacacgaaggggucccugcccaucaacgugaucgucuucgacggcaagagcaagugcgaggaguccagcgccaaguccgccagcguguacuacucccagcugaugugccagcccauccuccugcuggaccaggcgcucgugagcgacgucggcgacagcgccgagguggccgugaagauguucgacgccuacgucaacaccuucuccagcaccuucaacgugccgauggagaagcugaagacccugguggccacggcggaggccgagcucgccaagaacgucucccuggacaacgugcugagcaccuucaucuccgccgcgcgccagggguucguggacagcgacgucgagaccaaggacgugguggagugccucaagcugucccaccagagcgacaucgaggucaccggcgacuccugcaacaacuacaugcugacguacaacaagguggagaacaugaccccccgggaccucggggccugcaucgacugcagcgcccgccacaucaacgcccagguggccaagucccacaacaucgcgcugaucuggaacgucaaggacuucaugagccuguccgagcagcuccggaagcagauccgcagcgccgccaagaagaacaaccugcccuucaagcugaccugcgccaccacgcgccagguggugaacgucgugaccaccaagaucgcccucaagggcgggugaggacuagucccuguucccagagcccacuuuuuuuucuuuuuuugaaauaaaauagccugucuuucagaucucaaaggcucuuuucagagccaccaaaaaaaaaaaaaaaaaaaaaaaaaaaaaaaaaaaaaaaaaaaaaaaaaaaaaaaaaaaaaaaaaaaaaaaaaaaaaaaaaaaaaaaaaaaaaaaaaaaaa

SEQ ID NO: 19735 - RNA, 6113 nt, Artificial Sequence
  SARS-CoV-2__MT811254.1__non-structural protein 3 (NSP3) mRNA gc
aggagagucccgcagucggcguccagcggcucugcuuguucgugugugugucguugcaggccuuauucaagcuuaccauggcccccaccaaggugaccuucggcgacgacacggucaucgaggugcagggguacaagagcgugaacaucaccuucgagcuggacgagcgcaucgacaagguccucaacgagaagugcuccgccuacaccguggagcugggcaccgaggugaacgaguucgcgugcgucguggccgacgccgugaucaagacgcugcagccggucagcgagcuccugaccccccuggggaucgaccucgacgagugguccauggccaccuacuaccuguucgacgagagcggcgaguucaagcuggccucccacauguacugcagcuucuacccccccgacgaggacgaggaggagggggacugcgaggaggaggaguucgagccguccacccaguacgaguacggcacggaggacgacuaccagggcaagccccucgaguucggggcgaccagcgccgcccugcagcccgaggaggagcaggaggaggacuggcuggacgacgacucccagcagaccgugggccagcaggacgggagcgaggacaaccagaccacgaccauccagaccaucguggagguccagccccagcucgagauggagcugaccccgguggugcagacgaucgaggucaacuccuucagcggcuaccugaagcucaccgacaacguguacaucaagaacgccgacaucguggaggaggcgaagaaggucaagcccaccgugguggucaacgccgccaacguguaccugaagcacgggggcggcguggccggggcccugaacaaggcgaccaacaacgccaugcaggucgaguccgacgacuacaucgccacgaacggcccccucaagguggggggcagcugcguccuguccggccacaaccuggccaagcacugccuccacgugguggggcccaacgucaacaagggcgaggacauccagcugcugaagagcgccuacgagaacuucaaccagcacgaggugcuccuggcgccgcugcucuccgccgggaucuucggcgccgaccccauccacagccugcgggugugcgucgacaccgugcgcaccaacguguaccuggccgucuucgacaagaaccucuacgacaagcugguguccagcuuccuggagaugaagagcgagaagcagguggagcagaagaucgccgagauccccaaggaggaggucaagcccuucaucaccgaguccaagccgagcguggagcagcggaagcaggacgacaagaagaucaaggcgugcguggaggaggucacgaccacccucgaggagaccaaguuccugacggagaaccugcuccuguacaucgacaucaacgggaaccugcaccccgacuccgccacccucgugagcgacaucgacaucaccuuccugaagaaggacgcccccuacaucgugggcgacgucgugcaggagggcgugcugaccgccgucgugauccccacgaagaaggccgggggcaccaccgagaugcucgcgaaggcccugcgcaaggugccgaccgacaacuacaucacgaccuaccccgggcagggccugaacggguacaccgucgaggaggccaagaccgugcucaagaagugcaaguccgccuucuacauccugcccagcaucaucuccaacgagaagcaggagauccugggcaccgugagcuggaaccuccgggagaugcuggcgcacgccgaggagacgcgcaagcugaugcccgucugcguggagaccaaggccaucguguccaccauccagcggaaguacaagggcaucaagauccaggagggggucguggacuacggcgcccgcuucuacuucuacaccagcaagacgaccguggccucccugaucaacacccucaacgaccugaacgagacccuggucacgaugccgcucggguacgugacccacggccugaaccuggaggaggcggcccgguacaugcgcagccucaaggugcccgccaccgucuccgugagcucccccgacgccgugaccgccuacaacggguaccugacgagcuccagcaagaccuccgaggagcacuucaucgagaccaucagccuggcgggcagcuacaaggacugguccuacagcggccaguccacccagcucgggaucgaguuccugaagcggggcgacaagagcgucuacuacacguccaaccccaccaccuuccaccuggacggggaggugaucaccuucgacaaccucaagacgcugcugagccuccgcgaggugcggaccaucaaggucuucaccaccguggacaacaucaaccugcacacgcagguggucgacauguccaugaccuacggccagcaguucggcccgaccuaccuggacggggccgacgugaccaagaucaagccccacaacagccacgagggcaagacguucuacgugcuccccaacgacgacacccugcgcgucgaggccuucgaguacuaccacaccaccgacccguccuuccuggggcgguacaugagcgcccucaaccacacgaagaaguggaaguacccccaggugaacggccugaccuccaucaagugggccgacaacaacugcuaccuggcgaccgcccuccugacccugcagcagaucgagcucaaguucaacccccccgcccugcaggacgccuacuaccgcgcgcgggccggggaggccgccaacuucugcgcccugauccucgcguacugcaacaagacggugggcgagcugggcgacguccgcgagaccaugagcuaccuguuccagcacgccaaccucgacuccugcaagcgggugcugaacgucgugugcaagaccugcgggcagcagcagaccacccugaagggcguggaggccgucauguacauggggacgcucagcuacgagcaguucaagaagggcgugcagaucccgugcaccugcgggaagcaggccaccaaguaccuggugcagcaggagucccccuucgucaugaugagcgccccccccgcgcaguacgagcugaagcacggcaccuucacgugcgccuccgaguacaccggcaacuaccagugcgggcacuacaagcacaucaccagcaaggagacccucuacugcaucgacggcgcccugcugacgaagagcuccgaguacaaggggccgaucaccgacguguucuacaaggagaacagcuacaccaccacgaucaagcccgugaccuacaagcucgacggcgucgugugcaccgagaucgaccccaagcuggacaacuacuacaagaaggacaacuccuacuucaccgagcagcccaucgaccuggugccgaaccagcccuaccccaacgccagcuucgacaacuucaaguucgucugcgacaacaucaaguucgccgacgaccucaaccagcugacgggguacaagaagcccgcgucccgcgagcugaaggugaccuucuucccggaccucaacggcgacguggucgccaucgacuacaagcacuacacccccagcuucaagaagggcgccaagcugcugcacaagcccaucguguggcacgugaacaacgccaccaacaaggcgacguacaagcccaacaccuggugcauccggugccucugguccaccaagccggucgagaccagcaacuccuucgacgugcugaagagcgaggacgcccaggggauggacaaccuggccugcgaggaccucaagcccguguccgaggaggucguggagaaccccacgauccagaaggacgugcuggagugcaacgucaagaccaccgagguggugggcgacaucauccugaagcccgccaacaacagccucaagaucaccgaggaggucgggcacacggaccugauggccgcguacguggacaacuccagccugaccaucaagaagccgaacgagcucucccgcgugcugggccugaagacccucgccacccacgggcuggccgccgucaacagcgugcccugggacacgaucgccaacuacgcgaagcccuuccugaacaagguggucuccaccaccaccaacaucgugacgcgcugccucaaccgggugugcaccaacuacaugccguacuucuucacccugcugcuccagcugugcaccuucacccgcagcacgaacucccggaucaaggccagcaugcccaccaccaucgccaagaacaccgucaagagcgugggcaaguucugccuggaggccuccuucaacuaccucaagagccccaacuucuccaagcugaucaacaucaucaucugguuccugcuccugagcgugugccugggcucccucaucuacagcacggccgcgcuggggguccugauguccaaccucggcaugcccagcuacugcaccggguaccgcgagggcuaccugaacuccaccaacgugaccaucgccacguacugcaccggcagcaucccgugcuccgugugccugagcgggcucgacucccuggacaccuaccccagccuggagaccauccagaucacgaucuccagcuucaagugggaccucaccgccuucggccuggucgccgagugguuccuggccuacauccucuucacccgguucuucuacgugcuggggcuggcggccaucaugcagcucuucuucuccuacuucgccgugcacuucaucagcaacuccuggcugauguggcugaucaucaaccugguccagauggcccccaucagcgcgauggugcgcauguacaucuucuucgccagcuucuacuacguguggaaguccuacguccacgugguggacggcugcaacagcuccaccugcaugaugugcuacaagcggaaccgcgccacgcgggucgagugcaccaccaucgugaacgggguccgccggagcuucuacguguacgccaacggcggcaagggguucugcaagcuccacaacuggaacugcgugaacugcgacaccuucugcgccggcuccacguucaucagcgacgaggucgcgcgcgaccugucccugcaguucaagcggcccaucaacccgaccgaccagagcuccuacaucguggacagcgugaccgucaagaacggguccauccaccucuacuucgacaaggccggccagaagaccuacgagcgccacagccugucccacuucgugaaccuggacaaccuccgggccaacaacacgaaggggagccugcccaucaacgugaucgucuucgacggcaaguccaagugcgaggagagcuccgccaagagcgccuccguguacuacagccagcugaugugccagcccauccuccugcuggaccaggcgcucgugagcgacgucggcgacuccgccgagguggccgugaagauguucgacgccuacgucaacaccuucagcuccaccuucaacgugcccauggagaagcugaagacccugguggccacggcggaggccgagcucgccaagaacgucagccuggacaacgugcuguccaccuucaucagcgccgcgcgccagggguucguggacuccgacgucgagaccaaggacgugguggagugccucaagcugagccaccaguccgacaucgaggucaccggcgacagcugcaacaacuacaugcugacguacaacaagguggagaacaugaccccgcgggaccucggggccugcaucgacugcuccgcccgccacaucaacgcccagguggccaagagccacaacaucgcgcugaucuggaacgucaaggacuucaugucccugagcgagcagcuccggaagcagauccgcuccgccgccaagaagaacaaccugcccuucaagcugaccugcgccaccacgcgccagguggugaacgucgugaccaccaagaucgcccucaagggcgggugaggacuagucccuguucccagagcccacuuuuuuuucuuuuuuugaaauaaaauagccugucuuucagaucucaaaggcucuuuucagagccaccaaaaaaaaaaaaaaaaaaaaaaaaaaaaaaaaaaaaaaaaaaaaaaaaaaaaaaaaaaaaaaaaaaaaaaaaaaaaaaaaaaaaaaaaaaaaaaaaaaaaa

SEQ ID NO: 19736 - RNA, 6113 nt, Artificial Sequence
  SARS-CoV-2__MT811262.1__non-structural protein 3 (NSP3) mRNA gc
aggagagucccgcagucggcguccagcggcucugcuuguucgugugugugucguugcaggccuuauucaagcuuaccauggcccccaccaaggugaccuucggcgacgacacggucaucgaggugcagggguacaagagcgugaacaucaccuucgagcuggacgagcgcaucgacaagguccucaacgagaagugcuccgccuacaccguggagcugggcaccgaggugaacgaguucgcgugcgucguggccgacgccgugaucaagacgcugcagccggucagcgagcuccugaccccccuggggaucgaccucgacgagugguccauggccaccuacuaccuguucgacgagagcggcgaguucaagcuggccucccacauguacugcagcuucuacccccccgacgaggacgaggaggagggggacugcgaggaggaggaguucgagccguccacccaguacgaguacggcacggaggacgacuaccagggcaagccccucgaguucggggcgaccagcgccgcccugcagcccgaggaggagcaggaggaggacuggcuggacgacgacucccagcagaccgugggccagcaggacgggagcgaggacaaccagaccacgaccauccagaccaucguggagguccagccccagcucgagauggagcugaccccgguggugcagacgaucgaggucaacuccuucagcggcuaccugaagcucaccgacaacguguacaucaagaacgccgacaucguggaggaggcgaagaaggucaagcccaccgugguggucaacgccgccaacguguaccugaagcacgggggcggcguggccggggcccugaacaaggcgaccaacaacgccaugcaggucgaguccgacgacuacaucgccacgaacggcccccucaagguggggggcagcugcguccuguccggccacaaccuggccaagcacugccuccacgugguggggcccaacgucaacaagggcgaggacauccagcugcugaagagcgccuacgagaacuucaaccagcacgaggugcuccuggcgccgcugcucuccgccgggaucuucggcgccgaccccauccacagccugcgggugugcgucgacaccgugcgcaccaacguguaccuggccgucuucgacaagaaccucuacgacaagcugguguccagcuuccuggagaugaagagcgagaagcagguggagcagaagaucgccgagauccccaaggaggaggucaagcccuucaucaccgaguccaagccgagcguggagcagcggaagcaggacgacaagaagaucaaggcgugcguggaggaggucacgaccacccucgaggagaccaaguuccugacggagaaccugcuccuguacaucgacaucaacgggaaccugcaccccgacuccgccacccucgugagcgacaucgacaucaccuuccugaagaaggacgcccccuacaucgugggcgacgucgugcaggagggcgugcugaccgccgucgugauccccacgaagaaggccgggggcaccaccgagaugcucgcgaaggcccugcgcaaggugccgaccgacaacuacaucacgaccuaccccgggcagggccugaacggguacaccgucgaggaggccaagaccgugcucaagaagugcaaguccgccuucuacauccugcccagcaucaucuccaacgagaagcaggagauccugggcaccgugagcuggaaccuccgggagaugcuggcgcacgccgaggagacgcgcaagcugaugcccgucugcguggagaccaaggccaucguguccaccauccagcggaaguacaagggcaucaagauccaggagggggucguggacuacggcgcccgcuucuacuucuacaccagcaagacgaccguggccucccugaucaacacccucaacgaccugaacgagacccuggucacgaugccgcucggguacgugacccacggccugaaccuggaggaggcggcccgguacaugcgcagccucaaggugcccgccaccgucuccgugagcucccccgacgccgugaccgccuacaacggguaccugacgagcuccagcaagacccccgaggagcacuucaucgagaccaucucccuggcgggcagcuacaaggacuggagcuacuccggccagagcacccagcucgggaucgaguuccugaagcggggcgacaaguccgucuacuacacgagcaacccgaccaccuuccaccuggacggggaggugaucaccuucgacaaccucaagacgcugcugucccuccgcgaggugcggaccaucaaggucuucaccaccguggacaacaucaaccugcacacgcagguggucgacaugagcaugaccuacggccagcaguucggccccaccuaccuggacggggccgacgugaccaagaucaagccccacaacucccacgagggcaagacguucuacgugcucccgaacgacgacacccugcgcgucgaggccuucgaguacuaccacaccaccgaccccagcuuccuggggcgguacauguccgcccucaaccacacgaagaaguggaaguacccccaggugaacggccugaccagcaucaagugggccgacaacaacugcuaccuggcgaccgcccuccugacccugcagcagaucgagcucaaguucaaccccccggcccugcaggacgccuacuaccgcgcgcgggccggggaggccgccaacuucugcgcccugauccucgcguacugcaacaagacggugggcgagcugggcgacguccgcgagaccauguccuaccuguuccagcacgccaaccucgacagcugcaagcgggugcugaacgucgugugcaagaccugcgggcagcagcagaccacccugaagggcguggaggccgucauguacauggggacgcucuccuacgagcaguucaagaagggcgugcagauccccugcaccugcgggaagcaggccaccaaguaccuggugcagcaggagagccccuucgucaugauguccgcccccccggcgcaguacgagcugaagcacggcaccuucacgugcgccagcgaguacaccggcaacuaccagugcgggcacuacaagcacaucaccuccaaggagacccucuacugcaucgacggcgcccugcugacgaagagcagcgaguacaaggggcccaucaccgacguguucuacaaggagaacuccuacaccaccacgaucaagcccgugaccuacaagcucgacggcgucgugugcaccgagaucgaccccaagcuggacaacuacuacaagaaggacaacagcuacuucaccgagcagccgaucgaccuggugcccaaccagcccuaccccaacgccuccuucgacaacuucaaguucgucugcgacaacaucaaguucgccgacgaccucaaccagcugacgggguacaagaagccggcgagccgcgagcugaaggugaccuucuuccccgaccucaacggcgacguggucgccaucgacuacaagcacuacacccccuccuucaagaagggcgccaagcugcugcacaagcccaucguguggcacgugaacaacgccaccaacaaggcgacguacaagccgaacaccuggugcauccggugccucuggagcaccaagcccgucgagaccuccaacagcuucgacgugcugaaguccgaggacgcccaggggauggacaaccuggccugcgaggaccucaagcccgugagcgaggaggucguggagaaccccacgauccagaaggacgugcuggagugcaacgucaagaccaccgagguggugggcgacaucauccugaagccggccaacaacucccucaagaucaccgaggaggucgggcacacggaccugauggccgcguacguggacaacagcucccugaccaucaagaagcccaacgagcucagccgcgugcugggccugaagacccucgccacccacgggcuggccgccgucaacuccgugcccugggacacgaucgccaacuacgcgaagccguuccugaacaagguggucagcaccaccaccaacaucgugacgcgcugccucaaccgggugugcaccaacuacaugcccuacuucuucacccugcugcuccagcugugcaccuucacccgcuccacgaacagccggaucaaggccuccaugcccaccaccaucgccaagaacaccgucaagagcgugggcaaguucugccuggaggccagcuucaacuaccucaagucccccaacuucagcaagcugaucaacaucaucaucugguuccugcuccuguccgugugccugggcagccucaucuacuccacggccgcgcuggggguccugaugagcaaccucggcauguccagcuacugcaccggguaccgcgagggcuaccugaacuccaccaacgugaccaucgccacguacugcaccggcagcaucccgugcuccgugugccugagcgggcucgacucccuggacaccuaccccagccuggagaccauccagaucacgaucuccagcuucaagugggaccucaccgccuucggccuggucgccgagugguuccuggccuacauccucuucacccgguucuucuacgugcuggggcuggcggccaucaugcagcucuucuucuccuacuucgccgugcacuucaucagcaacuccuggcugauguggcugaucaucaaccugguccagauggcccccaucagcgcgauggugcgcauguacaucuucuucgccagcuucuacuacguguggaaguccuacguccacgugguggacggcugcaacagcuccaccugcaugaugugcuacaagcggaaccgcgccacgcgggucgagugcaccaccaucgugaacgggguccgccggagcuucuacguguacgccaacggcggcaagggguucugcaagcuccacaacuggaacugcgugaacugcgacaccuucugcgccggcuccacguucaucagcgacgaggucgcgcgcgaccugucccugcaguucaagcggcccaucaacccgaccgaccagagcuccuacaucguggacagcgugaccgucaagaacggguccauccaccucuacuucgacaaggccggccagaagaccuacgagcgccacagccugucccacuucgugaaccuggacaaccuccgggccaacaacacgaaggggagccugcccaucaacgugaucgucuucgacggcaaguccaagugcgaggagagcuccgccaagagcgccuccguguacuacagccagcugaugugccagcccauccuccugcuggaccaggcgcucgugagcgacgucggcgacuccgccgagguggccgugaagauguucgacgccuacgucaacaccuucagcuccaccuucaacgugcccauggagaagcugaagacccugguggccacggcggaggccgagcucgccaagaacgucagccuggacaacgugcuguccaccuucaucagcgccgcgcgccagggguucguggacuccgacgucgagaccaaggacgugguggagugccucaagcugagccaccaguccgacaucgaggucaccggcgacagcugcaacaacuacaugcugacguacaacaagguggagaacaugaccccgcgggaccucggggccugcaucgacugcuccgcccgccacaucaacgcccagguggccaagagccacaacaucgcgcugaucuggaacgucaaggacuucaugucccugagcgagcagcuccggaagcagauccgcuccgccgccaagaagaacaaccugcccuucaagcugaccugcgccaccacgcgccagguggugaacgucgugaccaccaagaucgcccucaagggcgggugaggacuagucccuguucccagagcccacuuuuuuuucuuuuuuugaaauaaaauagccugucuuucagaucucaaaggcucuuuucagagccaccaaaaaaaaaaaaaaaaaaaaaaaaaaaaaaaaaaaaaaaaaaaaaaaaaaaaaaaaaaaaaaaaaaaaaaaaaaaaaaaaaaaaaaaaaaaaaaaaaaaaa

SEQ ID NO: 19737 - RNA, 6113 nt, Artificial Sequence
  SARS-CoV-2__MT811279.1__non-structural protein 3 (NSP3) mRNA gc
aggagagucccgcagucggcguccagcggcucugcuuguucgugugugugucguugcaggccuuauucaagcuuaccauggcccccaccaaggugaccuucggcgacgacacggucaucgaggugcagggguacaagagcgugaacaucaccuucgagcuggacgagcgcaucgacaagguccucaacgagaagugcuccgccuacaccguggagcugggcaccgaggugaacgaguucgcgugcgucguggccgacgccgugaucaagacgcugcagccggucagcgagcuccugaccccccuggggaucgaccucgacgagugguccauggccaccuacuaccuguucgacgagagcggcgaguucaagcuggccucccacauguacugcagcuucuacccccccgacgaggacgaggaggagggggacugcgaggaggaggaguucgagccguccacccaguacgaguacggcacggaggacgacuaccagggcaagccccucgaguucggggcgaccagcgccgcccugcagcccgaggaggagcaggaggaggacuggcuggacgacgacucccagcagaccgugggccagcaggacgggagcgaggacaaccagaccacgaccauccagaccaucguggagguccagccccagcucgagauggagcugaccccgguggugcagacgaucgaggucaacuccuucagcggcuaccugaagcucaccgacaacguguacaucaagaacgccgacaucguggaggaggcgaagaaggucaagcccaccgugguggucaacgccgccaacguguaccugaagcacgggggcggcguggccggggcccugaacaaggcgaccaacaacgccaugcaggucgaguccgacgacuacaucgccacgaacggcccccucaagguggggggcagcugcguccuguccggccacaaccuggccaagcacugccuccacgugguggggcccaacgucaacaagggcgaggacauccagcugcugaagagcgccuacgagaacuucaaccagcacgaggugcuccuggcgccgcugcucuccgccgggaucuucggcgccgaccccauccacagccugcgggugugcgucgacaccgugcgcaccaacguguaccuggccgucuucgacaagaaccucuacgacaagcugguguccagcuuccuggagaugaagagcgagaagcagguggagcagaagaucgccgagauccccaaggaggaggucaagcccuucaucaccgaguccaagccgagcguggagcagcggaagcaggacgacaagaagaucaaggcgugcguggaggaggucacgaccacccucgaggagaccaaguuccugacggagaaccugcuccuguacaucgacaucaacgggaaccugcaccccgacuccgccacccucgugagcgacaucgacaucaccuuccugaagaaggacgcccccuacaucgugggcgacgucgugcaggagggcgugcugaccgccgucgugauccccacgaagaaggccgggggcaccaccgagaugcucgcgaaggcccugcgcaaggugccgaccgacaacuacaucacgaccuaccccgggcagggccugaacggguacaccgucgaggaggccaagaccgugcucaagaagugcaaguccgccuucuacauccugcccagcaucaucuccaacgagaagcaggagauccugggcaccgugagcuggaaccuccgggagaugcuggcgcacgccgaggagacgcgcaagcugaugcccgucugcguggagaccaaggccaucguguccaccauccagcggaaguacaagggcaucaagauccaggagggggucguggacuacggcgcccgcuucuacuucuacaccagcaagacgaccguggccucccugaucaacacccucaacgaccugaacgagacccuggucacgaugccgcucggguacgugacccacggccugaaccuggaggaggcggcccgguacaugcgcagccucaaggugcccgccaccgucuccgugagcucccccgacgccgugaccgccuacaacggguaccugacgagcuccagcaagacccccgaggagcacuucaucgagaccaucucccuggcgggcagcuacaaggacuggagcuacuccggccagagcacccagcucgggaucgaguuccugaagcggggcgacaaguccgucuacuacacgagcaacccgaccaccuuccaccuggacggggaggugaucaccuucgacaaccucaagacgcugcugucccuccgcgaggugcggaucaucaaggucuucaccaccguggacaacaucaaccugcacacccagguggucgacaugagcaugacguacggccagcaguucggccccaccuaccuggacggggccgacgugaccaagaucaagccccacaacucccacgagggcaagaccuucuacgugcucccgaacgacgacacgcugcgcgucgaggccuucgaguacuaccacaccaccgaccccagcuuccuggggcgguacauguccgcccucaaccacaccaagaaguggaaguacccccaggugaacggccugacgagcaucaagugggccgacaacaacugcuaccuggcgaccgcccuccugacccugcagcagaucgagcucaaguucaaccccccggcccugcaggacgccuacuaccgcgcgcgggccggggaggccgccaacuucugcgcccugauccucgcguacugcaacaagaccgugggcgagcugggcgacguccgcgagacgauguccuaccuguuccagcacgccaaccucgacagcugcaagcgggugcugaacgucgugugcaagaccugcgggcagcagcagaccacccugaagggcguggaggccgucauguacauggggacccucuccuacgagcaguucaagaagggcgugcagauccccugcacgugcgggaagcaggccaccaaguaccuggugcagcaggagagccccuucgucaugauguccgcccccccggcgcaguacgagcugaagcacggcaccuucaccugcgccagcgaguacacgggcaacuaccagugcgggcacuacaagcacaucaccuccaaggagacccucuacugcaucgacggcgcccugcugaccaagagcagcgaguacaaggggcccaucacggacguguucuacaaggagaacuccuacaccaccaccaucaagcccgugacguacaagcucgacggcgucgugugcaccgagaucgaccccaagcuggacaacuacuacaagaaggacaacagcuacuucaccgagcagccgaucgaccuggugcccaaccagcccuaccccaacgccuccuucgacaacuucaaguucgucugcgacaacaucaaguucgccgacgaccucaaccagcugaccggguacaagaagccggcgagccgcgagcugaaggugacguucuuccccgaccucaacggcgacguggucgccaucgacuacaagcacuacacccccuccuucaagaagggcgccaagcugcugcacaagcccaucguguggcacgugaacaacgccaccaacaaggcgaccuacaagccgaacacguggugcauccggugccucuggagcaccaagcccgucgagaccuccaacagcuucgacgugcugaaguccgaggacgcccaggggauggacaaccuggccugcgaggaccucaagcccgugagcgaggaggucguggagaaccccaccauccagaaggacgugcuggagugcaacgucaagacgaccgagguggugggcgacaucauccugaagccggccaacaacucccucaagaucaccgaggaggucgggcacaccgaccugauggccgcguacguggacaacagcucccugacgaucaagaagcccaacgagcucagccgcgugcugggccugaagacccucgccacccacgggcuggccgccgucaacuccgugcccugggacaccaucgccaacuacgcgaagccguuccugaacaagguggucagcacgaccaccaacaucgugacccgcugccucaaccgggugugcacgaacuacaugcccuacuucuucacccugcugcuccagcugugcaccuucacccgcuccaccaacagccggaucaaggccuccaugcccacgaccaucgccaagaacaccgucaagagcgugggcaaguucugccuggaggccagcuucaacuaccucaagucccccaacuucagcaagcugaucaacaucaucaucugguuccugcuccuguccgugugccugggcagccucaucuacuccaccgccgcgcuggggguccugaugagcaaccucggcaugccguccuacugcacgggguaccgcgagggcuaccugaacagcaccaacgugaccaucgccaccuacugcacgggcuccauccccugcagcgugugccuguccgggcucgacagccuggacaccuaccccucccuggagaccauccagaucaccaucagcuccuucaagugggaccucacggccuucggccuggucgccgagugguuccuggccuacauccucuucacccgguucuucuacgugcuggggcuggcggccaucaugcagcucuucuucagcuacuucgccgugcacuucaucuccaacagcuggcugauguggcugaucaucaaccugguccagauggcccccaucuccgcgauggugcgcauguacaucuucuucgccagcuucuacuacguguggaagagcuacguccacgugguggacggcugcaacuccagcaccugcaugaugugcuacaagcggaaccgcgccacccgggucgagugcacgaccaucgugaacgggguccgccgguccuucuacguguacgccaacggcggcaagggguucugcaagcuccacaacuggaacugcgugaacugcgacaccuucugcgccggcagcaccuucaucuccgacgaggucgcgcgcgaccugagccugcaguucaagcggccgaucaaccccacggaccaguccagcuacaucguggacuccgugaccgucaagaacgggagcauccaccucuacuucgacaaggccggccagaagaccuacgagcgccacucccugagccacuucgugaaccuggacaaccuccgggccaacaacaccaaggggucccugcccaucaacgugaucgucuucgacggcaagagcaagugcgaggaguccagcgccaaguccgccagcguguacuacucccagcugaugugccagcccauccuccugcuggaccaggcgcucgugagcgacgucggcgacagcgccgagguggccgugaagauguucgacgccuacgucaacacguucuccagcaccuucaacgugccgauggagaagcugaagacccugguggccaccgcggaggccgagcucgccaagaacgucucccuggacaacgugcugagcacguucaucuccgccgcgcgccagggguucguggacagcgacgucgagaccaaggacgugguggagugccucaagcugucccaccagagcgacaucgaggucaccggcgacuccugcaacaacuacaugcugaccuacaacaagguggagaacaugacgccccgggaccucggggccugcaucgacugcagcgcccgccacaucaacgcccagguggccaagucccacaacaucgcgcugaucuggaacgucaaggacuucaugagccuguccgagcagcuccggaagcagauccgcagcgccgccaagaagaacaaccugcccuucaagcugaccugcgccaccacccgccagguggugaacgucgugacgaccaagaucgcccucaagggcgggugaggacuagucccuguucccagagcccacuuuuuuuucuuuuuuugaaauaaaauagccugucuuucagaucucaaaggcucuuuucagagccaccaaaaaaaaaaaaaaaaaaaaaaaaaaaaaaaaaaaaaaaaaaaaaaaaaaaaaaaaaaaaaaaaaaaaaaaaaaaaaaaaaaaaaaaaaaaaaaaaaaaaa

SEQ ID NO: 19738 - RNA, 6113 nt, Artificial Sequence
  SARS-CoV-2__MT811281.1__non-structural protein 3 (NSP3) mRNA gc
aggagagucccgcagucggcguccagcggcucugcuuguucgugugugugucguugcaggccuuauucaagcuuaccauggcccccaccaaggugaccuucggcgacgacacggucaucgaggugcagggguacaagagcgugaacaucaccuucgagcuggacgagcgcaucgacaagguccucaacgagaagugcuccgccuacaccguggagcugggcaccgaggugaacgaguucgcgugcgucguggccgacgccgugaucaagacgcugcagccggucagcgagcuccugaccccccuggggaucgaccucgacgagugguccauggccaccuacuaccuguucgacgagagcggcgaguucaagcuggccucccacauguacugcagcuucuacccccccgacgaggacgaggaggagggggacugcgaggaggaggaguucgagccguccacccaguacgaguacggcacggaggacgacuaccagggcaagccccucgaguucggggcgaccagcgccgcccugcagcccgaggaggagcaggaggaggacuggcuggacgacgacucccagcagaccgugggccagcaggacagcuccgaggacaaccagaccacgaccauccagaccaucguggagguccagccccagcucgagauggagcugaccccgguggugcagacgaucgaggucaacagcuucuccggguaccugaagcucaccgacaacguguacaucaagaacgccgacaucguggaggaggcgaagaaggucaagcccaccgugguggucaacgccgccaacguguaccugaagcacggcgggggcguggccggcgcccugaacaaggcgaccaacaacgccaugcaggucgagagcgacgacuacaucgccacgaacgggccccucaaggugggcggguccugcguccugagcggccacaaccuggccaagcacugccuccacguggugggccccaacgucaacaagggggaggacauccagcugcugaaguccgccuacgagaacuucaaccagcacgaggugcuccuggcgccgcugcucagcgccggcaucuucggggccgaccccauccacucccugcgggugugcgucgacaccgugcgcaccaacguguaccuggccgucuucgacaagaaccucuacgacaagcuggugagcagcuuccuggagaugaaguccgagaagcagguggagcagaagaucgccgagauccccaaggaggaggucaagcccuucaucaccgagagcaagccguccguggagcagcggaagcaggacgacaagaagaucaaggcgugcguggaggaggucacgaccacccucgaggagaccaaguuccugacggagaaccugcuccuguacaucgacaucaacggcaaccugcaccccgacagcgccacccucguguccgacaucgacaucaccuuccugaagaaggacgcccccuacaucgugggggacgucgugcaggagggcgugcugaccgccgucgugauccccacgaagaaggccggcgggaccaccgagaugcucgcgaaggcccugcgcaaggugccgaccgacaacuacaucacgaccuaccccggccaggggcugaacggcuacaccgucgaggaggccaagaccgugcucaagaagugcaagagcgccuucuacauccugcccuccaucaucagcaacgagaagcaggagauccuggggaccguguccuggaaccuccgggagaugcuggcgcacgccgaggagacgcgcaagcugaugcccgucugcguggagaccaaggccaucgugagcaccauccagcggaaguacaagggcaucaagauccaggagggcgucguggacuacggggcccgcuucuacuucuacaccuccaagacgaccguggccagccugaucaacacccucaacgaccugaacgagacccuggucacgaugccgcucggcuacgugacccacgggcugaaccuggaggaggcggcccgguacaugcgcucccucaaggugcccgccaccgucagcguguccagccccgacgccgugaccgccuacaacggcuaccugacguccagcuccaagacccccgaggagcacuucaucgagaccaucagccuggcggggagcuacaaggacugguccuacagcggccaguccacccagcucggcaucgaguuccugaagcggggggacaagagcgucuacuacacguccaacccgaccaccuuccaccuggacggcgaggugaucaccuucgacaaccucaagacgcugcugagccuccgcgaggugcggaccaucaaggucuucaccaccguggacaacaucaaccugcacacgcagguggucgacauguccaugaccuacgggcagcaguucggccccaccuaccuggacggcgccgacgugaccaagaucaagccccacaacagccacgaggggaagacguucuacgugcucccgaacgacgacacccugcgcgucgaggccuucgaguacuaccacaccaccgaccccuccuuccugggccgguacaugagcgcccucaaccacacgaagaaguggaaguacccccaggugaacgggcugaccuccaucaagugggccgacaacaacugcuaccuggcgaccgcccuccugacccugcagcagaucgagcucaaguucaaccccccggcccugcaggacgccuacuaccgcgcgcgggccggcgaggccgccaacuucugcgcccugauccucgcguacugcaacaagacggugggggagcugggcgacguccgcgagaccaugagcuaccuguuccagcacgccaaccucgacuccugcaagcgggugcugaacgucgugugcaagaccugcggccagcagcagaccacccugaaggggguggaggccgucauguacaugggcacgcucagcuacgagcaguucaagaagggggugcagauccccugcaccugcggcaagcaggccaccaaguaccuggugcagcaggagucccccuucgucaugaugagcgcccccccggcgcaguacgagcugaagcacgggaccuucacgugcgccuccgaguacaccggcaacuaccagugcggccacuacaagcacaucaccagcaaggagacccucuacugcaucgacggggcccugcugacgaagagcuccgaguacaagggccccaucaccgacguguucuacaaggagaacagcuacaccaccacgaucaagcccgugaccuacaagcucgacggggucgugugcaccgagaucgaccccaagcuggacaacuacuacaagaaggacaacuccuacuucaccgagcagccgaucgaccuggugcccaaccagcccuaccccaacgccagcuucgacaacuucaaguucgucugcgacaacaucaaguucgccgacgaccucaaccagcugacgggcuacaagaagccggcgucccgcgagcugaaggugaccuucuuccccgaccucaacggggacguggucgccaucgacuacaagcacuacacccccagcuucaagaagggcgccaagcugcugcacaagcccaucguguggcacgugaacaacgccaccaacaaggcgacguacaagccgaacaccuggugcauccggugccucugguccaccaagcccgucgagaccagcaacuccuucgacgugcugaagagcgaggacgcccagggcauggacaaccuggccugcgaggaccucaagcccguguccgaggaggucguggagaaccccacgauccagaaggacgugcuggagugcaacgucaagaccaccgagguggugggggacaucauccugaagccggccaacaacagccucaagaucaccgaggaggucggccacacggaccugauggccgcguacguggacaacuccagccugaccaucaagaagcccaacgagcucucccgcgugcuggggcugaagacccucgccacccacggccuggccgccgucaacagcgugcccugggacacgaucgccaacuacgcgaagccguuccugaacaagguggucuccaccaccaccaacaucgugacgcgcugccucaaccgggugugcaccaacuacaugcccuacuucuucacccugcugcuccagcugugcaccuucacccgcagcacgaacucccggaucaaggccagcaugcccaccaccaucgccaagaacaccgucaagagcguggggaaguucugccuggaggccuccuucaacuaccucaagagccccaacuucuccaagcugaucaacaucaucaucugguuccugcuccugagcgugugccugggcucccucaucuacagcacggccgcgcugggcguccugauguccaaccucgggaugccgagcuacugcaccggcuaccgcgagggguaccugaacuccaccaacgugaccaucgccacguacugcaccggcagcauccccugcuccgugugccugagcggccucgacucccuggacaccuaccccagccuggagaccauccagaucacgaucuccagcuucaagugggaccucaccgccuucgggcuggucgccgagugguuccuggccuacauccucuucacccgguucuucuacgugcugggccuggcggccaucaugcagcucuucuucuccuacuucgccgugcacuucaucagcaacuccuggcugauguggcugaucaucaaccugguccagauggcccccaucagcgcgauggugcgcauguacaucuucuucgccagcuucuacuacguguggaaguccuacguccacgugguggacgggugcaacagcuccaccugcaugaugugcuacaagcggaaccgcgccacgcgggucgagugcaccaccaucgugaacggcguccgccggagcuucuacguguacgccaacgggggcaagggcuucugcaagcuccacaacuggaacugcgugaacugcgacaccuucugcgccggguccacguucaucagcgacgaggucgcgcgcgaccugucccugcaguucaagcggccgaucaaccccaccgaccagagcuccuacaucguggacagcgugaccgucaagaacggcuccauccaccucuacuucgacaaggccgggcagaagaccuacgagcgccacagccugucccacuucgugaaccuggacaaccuccgggccaacaacacgaagggcagccugcccaucaacgugaucgucuucgacgggaaguccaagugcgaggagagcuccgccaagagcgccuccguguacuacagccagcugaugugccagcccauccuccugcuggaccaggcgcucgugagcgacgucggcgacuccgccgagguggccgugaagauguucgacgccuacgucaacaccuucagcuccaccuucaacgugccgauggagaagcugaagacccugguggccacggcggaggccgagcucgccaagaacgucagccuggacaacgugcuguccaccuucaucagcgccgugcgccagggcuucgucgacuccgacguggagaccaaggacguggucgagugccucaagcugagccaccaguccgacaucgaggugaccggggacagcugcaacaacuacaugcugacguacaacaagguggagaacaugaccccccgggaccucggcgcgugcaucgacugcuccgcccgccacaucaacgcccaggucgccaagagccacaacaucgcccugaucuggaacgugaaggacuucaugucccugagcgagcagcuccggaagcagauccgcuccgcggccaagaagaacaaccugcccuucaagcugaccugcgccaccacgcgccagguggucaacguggugaccaccaagaucgcccucaaggggggcugaggacuagucccuguucccagagcccacuuuuuuuucuuuuuuugaaauaaaauagccugucuuucagaucucaaaggcucuuuucagagccaccaaaaaaaaaaaaaaaaaaaaaaaaaaaaaaaaaaaaaaaaaaaaaaaaaaaaaaaaaaaaaaaaaaaaaaaaaaaaaaaaaaaaaaaaaaaaaaaaaaaaa

SEQ ID NO: 19739 - RNA, 6113 nt, Artificial Sequence
  SARS-CoV-2__MT811297.1__non-structural protein 3 (NSP3) mRNA gc
aggagagucccgcagucggcguccagcggcucugcuuguucgugugugugucguugcaggccuuauucaagcuuaccauggcccccaccaaggugaccuucggcgacgacacggucaucgaggugcagggguacaagagcgugaacaucaccuucgagcuggacgagcgcaucgacaagguccucaacgagaagugcuccgccuacaccguggagcugggcaccgaggugaacgaguucgcgugcgucguggccgacgccgugaucaagacgcugcagccggucagcgagcuccugaccccccuggggaucgaccucgacgagugguccauggccaccuacuaccuguucgacgagagcggcgaguucaagcuggccucccacauguacugcagcuucuacccccccgacgaggacgaggaggagggggacugcgaggaggaggaguucgagccguccacccaguacgaguacggcacggaggacgacuaccagggcaagccccucgaguucggggcgaccagcgccgcccugcagcccgaggaggagcaggaggaggacuggcuggacgacgacucccagcagaccgugggccagcaggacgggagcgaggacaaccagaccacgaccauccagaccaucguggagguccagccccagcucgagauggagcugaccccgguggugcagacgaucgaggucaacuccuucagcggcuaccugaagcucaccgacaacguguacaucaagaacgccgacaucguggaggaggcgaagaaggucaagcccaccgugguggucaacgccgccaacguguaccugaagcacgggggcggcguggcccgggcccugaacaaggcgaccaacaacgccaugcaggucgaguccgacgacuacaucgccacgaacgggccccucaaggugggcgggagcugcguccuguccggccacaaccuggccaagcacugccuccacguggugggccccaacgucaacaagggggaggacauccagcugcugaagagcgccuacgagaacuucaaccagcacgaggugcuccuggcgccgcugcucuccgccggcaucuucggggccgaccccauccacagccugcgcgugugcgucgacaccgugcggaccaacguguaccuggccgucuucgacaagaaccucuacgacaagcugguguccagcuuccuggagaugaagagcgagaagcagguggagcagaagaucgccgagauccccaaggaggaggucaagcccuucaucaccgaguccaagccgagcguggagcagcgcaagcaggacgacaagaagaucaaggcgugcguggaggaggucacgaccacccucgaggagaccaaguuccugacggagaaccugcuccuguacaucgacaucaacggcaaccugcaccccgacuccgccacccucgugagcgacaucgacaucaccuuccugaagaaggacgcccccuacaucgugggggacgucgugcaggagggcgugcugaccgccgucgugauccccacgaagaaggccggcgggaccaccgagaugcucgcgaaggcccugcggaaggugccgaccgacaacuacaucacgaccuaccccggccaggggcugaacggcuacaccgucgaggaggccaagaccgugcucaagaagugcaaguccgccuucuacauccugcccagcaucaucuccaacgagaagcaggagauccuggggaccgugagcuggaaccuccgcgagaugcuggcgcacgccgaggagacgcggaagcugaugcccgucugcguggagaccaaggccaucguguccaccauccagcgcaaguacaagggcaucaagauccaggagggcgucguggacuacggggcccgguucuacuucuacaccagcaagacgaccguggccucccugaucaacacccucaacgaccugaacgagacccuggucacgaugccgcucggcuacgugacccacgggcugaaccuggaggaggcggcccgcuacaugcggagccucaaggugcccgccaccgucuccgugagcucccccgacgccgugaccgccuacaacggcuaccugacgagcuccagcaagacccccgaggagcacuucaucgagaccaucucccuggcggggagcuacaaggacuggagcuacuccggccagagcacccagcucggcaucgaguuccugaagcgcggggacaaguccgucuacuacacgagcaacccgaccaccuuccaccuggacggcgaggugaucaccuucgacaaccucaagacgcugcugucccuccgggaggugcgcaccaucaaggucuucaccaccguggacaacaucaaccugcacacgcagguggucgacaugagcaugaccuacgggcagcaguucggccccaccuaccuggacggcgccgacgugaccaagaucaagccccacaacucccacgaggggaagacguucuacgugcucccgaacgacgacacccugcgggucgaggccuucgaguacuaccacaccaccgaccccagcuuccugggccgcuacauguccgcccucaaccacacgaagaaguggaaguacccccaggugaacgggcugaccagcaucaagugggccgacaacaacugcuaccuggcgaccgcccuccugacccugcagcagaucgagcucaaguucaaccccccggcccugcaggacgccuacuaccgggcgcgcgccggcgaggccgccaacuucugcgcccugauccucgcguacugcaacaagacggugggggagcugggcgacguccgggagaccauguccuaccuguuccagcacgccaaccucgacagcugcaagcgcgugcugaacgucgugugcaagaccugcggccagcagcagaccacccugaaggggguggaggccgucauguacaugggcacgcucuccuacgagcaguucaagaagggggugcagauccccugcaccugcggcaagcaggccaccaaguaccuggugcagcaggagagccccuucgucaugauguccgcccccccggcgcaguacgagcugaagcacgggaccuucacgugcgccagcgaguacaccggcaacuaccagugcggccacuacaagcacaucaccuccaaggagacccucuacugcaucgacggggcccugcugacgaagagcagcgaguacaagggccccaucaccgacguguucuacaaggagaacuccuacaccaccacgaucaagcccgugaccuacaagcucgacggggucgugugcaccgagaucgaccccaagcuggacaacuacuacaagaaggacaacagcuacuucaccgagcagccgaucgaccuggugcccaaccagcccuaccccaacgccuccuucgacaacuucaaguucgucugcgacaacaucaaguucgccgacgaccucaaccagcugacgggcuacaagaagccggcgagccgggagcugaaggugaccuucuuccccgaccucaacggggacguggucgccaucgacuacaagcacuacacccccuccuucaagaagggcgccaagcugcugcacaagcccaucguguggcacgugaacaacgccaccaacaaggcgacguacaagccgaacaccuggugcauccgcugccucuggagcaccaagcccgucgagaccuccaacagcuucgacgugcugaaguccgaggacgcccagggcauggacaaccuggccugcgaggaccucaagcccgugagcgaggaggucguggagaaccccacgauccagaaggacgugcuggagugcaacgucaagaccaccgagguggugggggacaucauccugaagccggccaacaacucccucaagaucaccgaggaggucggccacacggaccugauggccgcguacguggacaacagcucccugaccaucaagaagcccaacgagcucagccgcgugcuggggcugaagacccucgccacccacggccuggccgccgucaacuccgugcccugggacacgaucgccaacuacgcgaagccguuccugaacaagguggucagcaccaccaccaacaucgugacgcggugccucaaccgcgugugcaccaacuacaugcccuacuucuucacccugcugcuccagcugugcaccuucacccgguccacgaacagccgcaucaaggccuccaugcccaccaccaucgccaagaacaccgucaagagcguggggaaguucugccuggaggccagcuucaacuaccucaagucccccaacuucagcaagcugaucaacaucaucaucugguuccugcuccuguccgugugccugggcagccucaucuacuccacggccgcgcugggcguccugaugagcaaccucgggaugccguccuacugcaccggcuaccgggagggguaccugaacagcaccaacgugaccaucgccacguacugcaccggcuccauccccugcagcgugugccuguccggccucgacagccuggacaccuaccccucccuggagaccauccagaucacgaucagcuccuucaagugggaccucaccgccuucgggcuggucgccgagugguuccuggccuacauccucuucacccgcuucuucuacgugcugggccuggcggccaucaugcagcucuucuucagcuacuucgccgugcacuucaucuccaacagcuggcugauguggcugaucaucaaccugguccagauggcccccaucuccgcgauggugcggauguacaucuucuucgccagcuucuacuacguguggaagagcuacguccacgugguggacgggugcaacuccagcaccugcaugaugugcuacaagcgcaaccgggccacgcgcgucgagugcaccaccaucgugaacggcguccggcgcuccuucuacguguacgccaacgggggcaagggcuucugcaagcuccacaacuggaacugcgugaacugcgacaccuucugcgccgggagcacguucaucuccgacgaggucgcgcgggaccugagccugcaguucaagcgcccgaucaaccccaccgaccaguccagcuacaucguggacuccgugaccgucaagaacggcagcauccaccucuacuucgacaaggccgggcagaagaccuacgagcggcacucccugagccacuucgugaaccuggacaaccuccgcgccaacaacacgaagggcucccugcccaucaacgugaucgucuucgacgggaagagcaagugcgaggaguccagcgccaaguccgccagcguguacuacucccagcugaugugccagcccauccuccugcuggaccaggcgcucgugagcgacgucggcgacagcgccgagguggccgugaagauguucgacgccuacgucaacaccuucuccagcaccuucaacgugccgauggagaagcugaagacccugguggccacggcggaggccgagcucgccaagaacgucucccuggacaacgugcugagcaccuucaucuccgccgcgcggcagggcuucguggacagcgacgucgagaccaaggacgugguggagugccucaagcugucccaccagagcgacaucgaggucaccggggacuccugcaacaacuacaugcugacguacaacaagguggagaacaugaccccccgcgaccucggcgccugcaucgacugcagcgcccggcacaucaacgcccagguggccaagucccacaacaucgcgcugaucuggaacgucaaggacuucaugagccuguccgagcagcuccgcaagcagauccgcagcgccgccaagaagaacaaccugcccuucaagcugaccugcgccaccacgcggcagguggugaacgucgugaccaccaagaucgcccucaaggggggcugaggacuagucccuguucccagagcccacuuuuuuuucuuuuuuugaaauaaaauagccugucuuucagaucucaaaggcucuuuucagagccaccaaaaaaaaaaaaaaaaaaaaaaaaaaaaaaaaaaaaaaaaaaaaaaaaaaaaaaaaaaaaaaaaaaaaaaaaaaaaaaaaaaaaaaaaaaaaaaaaaaaaa

SEQ ID NO: 19740 - RNA, 6113 nt, Artificial Sequence
  SARS-CoV-2__MT811322.1__non-structural protein 3 (NSP3) mRNA gc
aggagagucccgcagucggcguccagcggcucugcuuguucgugugugugucguugcaggccuuauucaagcuuaccauggcccccaccaaggugaccuucggcgacgacacggucaucgaggugcagggguacaagagcgugaacaucaccuucgagcuggacgagcgcaucgacaagguccucaacgagaagugcuccgccuacaccguggagcugggcaccgaggugaacgaguucgcgugcgucguggccgacgccgugaucaagacgcugcagccggucagcgagcuccugaccccccuggggaucgaccucgacgagugguccauggccaccuacuaccuguucgacgagagcggcgaguucaagcuggccucccacauguacugcagcuucuacccccccgacgaggacgaggaggagggggacugcgaggaggaggaguucgagccguccacccaguacgaguacggcacggaggacgacuaccagggcaagccccucgaguucggggcgaccagcgccgcccugcagcccgaggaggagcaggaggaggacuggcuggacgacgacucccagcagaccgugggccagcaggacgggagcgaggacaaccagaccacgaccauccagaccaucguggagguccagccccagcucgagauggagcugaccccgguggugcagacgaucgaggucaacuccuucagcggcuaccugaagcucaccgacaacguguacaucaagaacgccgacaucguggaggaggcgaagaaggucaagcccaccgugguggucaacgccgccaacguguaccugaagcacgggggcggcguggccggggcccugaacaaggcgaccaacaacgccaugcaggucgaguccgacgacuacaucgccacgaacggcccccucaagguggggggcagcugcguccuguccggccacaaccuggccaagcacugccuccacgugguggggcccaacgucaacaagggcgaggacauccagcugcugaagagcgccuacgagaacuucaaccagcacgaggugcuccuggcgccgcugcucuccgccgggaucuucggcgccgaccccauccacagccugcgggugugcgucgacaccgugcgcaccaacguguaccuggccgucuucgacaagaaccucuacgacaagcugguguccagcuuccuggagaugaagagcgagaagcagguggagcagaagaucgccgagauccccaaggaggaggucaagcccuucaucaccgaguccaagccgagcguggagcagcggaagcaggacgacaagaagaucaaggcgugcguggaggaggucacgaccacccucgaggagaccaaguuccugacggagaaccugcuccuguacaucgacaucaacgggaaccugcaccccgacuccgccacccucgugagcgacaucgacaucaccuuccugaagaaggacgcccccuacaucgugggcgacgucgugcaggagggcgugcugaccgccgucgugauccccacgaagaaggccgggggcaccaccgagaugcucgcgaaggcccugcgcaaggugccgaccgacaacuacaucacgaccuaccccgggcagggccugaacggguacaccgucgaggaggccaagaccgugcucaagaagugcaaguccgccuucuacauccugcccagcaucaucuccaacgagaagcaggagauccugggcaccgugagcuggaaccuccgggagaugcuggcgcacgccgaggagacgcgcaagcugaugcccgucugcguggagaccaaggccaucguguccaccauccagcggaaguacaagggcaucaagauccaggagggggucguggacuacggcgcccgcuucuacuucuacaccagcaagacgaccguggccucccugaucaacacccucaacgaccugaacgagacccuggucacgaugccgcucggguacgugacccacggccugaaccuggaggaggcggcccgguacaugcgcagccucaaggugcccgccaccgucuccgugagcucccccgacgccgugaccgccuacaacggguaccugacgagcuccagcaagacccccgaggagcacuucaucgagaccaucucccuggcgggcagcuacaaggacuggagcuacuccggccagagcacccagcucgggaucgaguuccugaagcggggcgacaaguccgucuacuacacgagcaacccgaccaccuuccaccuggacggggaggugaucaccuucgacaaccucaagacgcugcugucccuccgcgaggugcggaccaucaaggucuucaccaccguggacaacaucaaccugcacacgcagguggucgacaugagcaugaccuacggccagcaguucggccccaccuaccuggacggggccgacgugaccaagaucaagccccacaacucccacgagggcaagacguucuacgugcucccgaacgacgacacccugcgcgucgaggccuucgaguacuaccacaccaccgaccccagcuuccuggggcgguacauguccgcccucaaccacacgaagaaguggaaguacccccaggugaacggccugaccagcaucaagugggccgacaacaacugcuaccuggcgaccgcccuccugacccugcagcagaucgagcucaaguucaaccccccggcccugcaggacgccuacuaccgcgcgcgggccggggaggccgccaacuucugcgcccugauccucgcguacugcaacaagacggugggcgagcugggcgacguccgcgagaccauguccuaccuguuccagcacgccaaccucgacagcugcaagcgggugcugaacgucgugugcaagaccugcgggcagcagcagaccacccugaagggcguggaggccgucauguacauggggacgcucuccuacgagcaguucaagaagggcgugcagauccccugcaccugcgggaagcaggccaccaaguaccuggugcagcaggagagccccuucgucaugauguccgcccccccggcgcaguacgagcugaagcacggcaccuucacgugcgccagcgaguacaccggcaacuaccagugcgggcacuacaagcacaucaccuccaaggagacccucuacugcaucgacggcgcccugcugacgaagagcagcgaguacaaggggcccaucaccgacguguucuacaaggagaacuccuacaccaccacgaucaagcccgugaccuacaagcucgacggcgucgugugcaccgagaucgaccccaagcuggacaacuacuacaagaaggacaacagcuacuucaccgagcagccgaucgaccuggugcccaaccagcccuaccccaacgccuccuucgggaacuucaaguucgucugcgacaacaucaaguucgccgacgaccucaaccagcugacgggcuacaagaagccggcgagccgcgagcugaaggugaccuucuuccccgaccucaacggcgacguggucgccaucgacuacaagcacuacacccccuccuucaagaagggggccaagcugcugcacaagcccaucguguggcacgugaacaacgccaccaacaaggcgacguacaagccgaacaccuggugcauccggugccucuggagcaccaagcccgucgagaccuccaacagcuucgacgugcugaaguccgaggacgcccagggcauggacaaccuggccugcgaggaccucaagcccgugagcgaggaggucguggagaaccccacgauccagaaggacgugcuggagugcaacgucaagaccaccgagguggugggggacaucauccugaagccggccaacaacucccucaagaucaccgaggaggucggccacacggaccugauggccgcguacguggacaacagcucccugaccaucaagaagcccaacgagcucagccgcgugcuggggcugaagacccucgccacccacggccuggccgccgucaacuccgugcccugggacacgaucgccaacuacgcgaagccguuccugaacaagguggucagcaccaccaccaacaucgugacgcgcugccucaaccgggugugcaccaacuacaugcccuacuucuucacccugcugcuccagcugugcaccuucacccgcuccacgaacagccggaucaaggccuccaugcccaccaccaucgccaagaacaccgucaagagcgugggcaaguucugccuggaggccagcuucaacuaccucaagucccccaacuucagcaagcugaucaacaucaucaucugguuccugcuccuguccgugugccuggggagccucaucuacuccacggccgcgcugggcguccugaugagcaaccucgggaugccguccuacugcaccggcuaccgcgagggcuaccugaacagcaccaacgugaccaucgccacguacugcaccggguccauccccugcagcgugugccuguccggccucgacagccuggacaccuaccccucccuggagaccauccagaucacgaucagcuccuucaagugggaccucaccgccuucgggcuggucgccgagugguuccuggccuacauccucuucacccgguucuucuacgugcugggccuggcggccaucaugcagcucuucuucagcuacuucgccgugcacuucaucuccaacagcuggcugauguggcugaucaucaaccugguccagauggcccccaucuccgcgauggugcgcauguacaucuucuucgccagcuucuacuacguguggaagagcuacguccacgugguggacgggugcaacuccagcaccugcaugaugugcuacaagcggaaccgcgccacgcgggucgagugcaccaccaucgugaacggcguccgccgguccuucuacguguacgccaacggcgggaagggcuucugcaagcuccacaacuggaacugcgugaacugcgacaccuucugcgccgggagcacguucaucuccgacgaggucgcgcgcgaccugagccugcaguucaagcggccgaucaaccccaccgaccaguccagcuacaucguggacuccgugaccgucaagaacggcagcauccaccucuacuucgacaaggccgggcagaagaccuacgagcgccacucccugagccacuucgugaaccuggacaaccuccgggccaacaacacgaagggcucccugcccaucaacgugaucgucuucgacggcaagagcaagugcgaggaguccagcgccaaguccgccagcguguacuacucccagcugaugugccagcccauccuccugcuggaccaggcgcucgugagcgacgucggggacagcgccgagguggccgugaagauguucgacgccuacgucaacaccuucuccagcaccuucaacgugccgauggagaagcugaagacccugguggccacggcggaggccgagcucgccaagaacgucucccuggacaacgugcugagcaccuucaucuccgccgcgcgccagggcuucguggacagcgacgucgagaccaaggacgugguggagugccucaagcugucccaccagagcgacaucgaggucaccggggacuccugcaacaacuacaugcugacguacaacaagguggagaacaugaccccccgggaccucggcgccugcaucgacugcagcgcccgccacaucaacgcccagguggccaagucccacaacaucgcgcugaucuggaacgucaaggacuucaugagccuguccgagcagcuccggaagcagauccgcagcgccgccaagaagaacaaccugcccuucaagcugaccugcgccaccacgcgccagguggugaacgucgugaccaccaagaucgcccucaaggggggcugaggacuagucccuguucccagagcccacuuuuuuuucuuuuuuugaaauaaaauagccugucuuucagaucucaaaggcucuuuucagagccaccaaaaaaaaaaaaaaaaaaaaaaaaaaaaaaaaaaaaaaaaaaaaaaaaaaaaaaaaaaaaaaaaaaaaaaaaaaaaaaaaaaaaaaaaaaaaaaaaaaaaa

SEQ ID NO: 19741 - RNA, 6113 nt, Artificial Sequence
  SARS-CoV-2__MT811341.1__non-structural protein 3 (NSP3) mRNA gc
aggagagucccgcagucggcguccagcggcucugcuuguucgugugugugucguugcaggccuuauucaagcuuaccauggcccccaccaaggugaccuucggcgacgacacggucaucgaggugcagggguacaagagcgugaacaucaccuucgagcuggacgagcgcaucgacaagguccucaacgagaagugcuccgccuacaccguggagcugggcaccgaggugaacgaguucgcgugcgucguggccgacgccgugaucaagacgcugcagccggucagcgagcuccugaccccccuggggaucgaccucgacgagugguccauggccaccuacuaccuguucgacgagagcggcgaguucaagcuggccucccacauguacugcagcuucuacccccccgacgaggacgaggaggagggggacugcgaggaggaggaguucgagccguccacccaguacgaguacggcacggaggacgacuaccagggcaagccccucgaguucggggcgaccagcgccgcccugcagcccgaggaggagcaggaggaggacuggcuggacgacgacucccagcagaccgugggccagcaggacgggagcgaggacaaccagaccacgaccauccagaccaucguggagguccagccccagcucgagauggagcugaccccgguggugcagacgaucgaggucaacuccuucagcggcuaccugaagcucaccgacaacguguacaucaagaacgccgacaucguggaggaggcgaagaaggucaagcccaccgugguggucaacgccgccaacguguaccugaagcacgggggcggcguggccggggcccugaacaaggcgaccaacaacgccaugcaggucgaguccgacgacuacaucgccacgaacggcccccucaaggugagcggguccugcguccugagcggccacaaccuggccaagcacugccuccacguggugggccccaacgucaacaagggggaggacauccagcugcugaaguccgccuacgagaacuucaaccagcacgaggugcuccuggcgccgcugcucagcgccggcaucuucggggccgaccccauccacucccugcgggugugcgucgacaccgugcgcaccaacguguaccuggccgucuucgacaagaaccucuacgacaagcuggugagcagcuuccuggagaugaaguccgagaagcagguggagcagaagaucgccgagauccccaaggaggaggucaagcccuucaucaccgagagcaagccguccguggagcagcggaagcaggacgacaagaagaucaaggcgugcguggaggaggucacgaccacccucgaggagaccaaguuccugacggagaaccugcuccuguacaucgacaucaacggcaaccugcaccccgacagcgccacccucguguccgacaucgacaucaccuuccugaagaaggacgcccccuacaucgugggggacgucgugcaggagggcgugcugaccgccgucgugauccccacgaagaaggccggcgggaccaccgagaugcucgcgaaggcccugcgcaaggugccgaccgacaacuacaucacgaccuaccccggccaggggcugaacggcuacaccgucgaggaggccaagaccgugcucaagaagugcaagagcgccuucuacauccugcccuccaucaucagcaacgagaagcaggagauccuggggaccguguccuggaaccuccgggagaugcuggcgcacgccgaggagacgcgcaagcugaugcccgucugcguggagaccaaggccaucgugagcaccauccagcggaaguacaagggcaucaagauccaggagggcgucguggacuacggggcccgcuucuacuucuacaccuccaagacgaccguggccagccugaucaacauccucaacgaccugaacgagacccuggucaccaugccgcucggcuacgugacgcacgggcugaaccuggaggaggcggcccgguacaugcgcucccucaaggugcccgccaccgucagcguguccagccccgacgccgugaccgccuacaacggcuaccugaccuccagcuccaagacgcccgaggagcacuucaucgagaccaucagccuggcggggagcuacaaggacugguccuacagcggccaguccacccagcucggcaucgaguuccugaagcggggggacaagagcgucuacuacaccuccaacccgacgaccuuccaccuggacggcgaggugaucaccuucgacaaccucaagacccugcugagccuccgcgaggugcggacgaucaaggucuucaccaccguggacaacaucaaccugcacacccagguggucgacauguccaugacguacgggcagcaguucggccccaccuaccuggacggcgccgacgugaccaagaucaagccccacaacagccacgaggggaagaccuucuacgugcucccgaacgacgacacgcugcgcgucgaggccuucgaguacuaccacaccaccgaccccuccuuccugggccgguacaugagcgcccucaaccacaccaagaaguggaaguacccccaggugaacgggcugacguccaucaagugggccgacaacaacugcuaccuggcgaccgcccuccugacccugcagcagaucgagcucaaguucaaccccccggcccugcaggacgccuacuaccgcgcgcgggccggcgaggccgccaacuucugcgcccugauccucgcguacugcaacaagaccgugggggagcugggcgacguccgcgagacgaugagcuaccuguuccagcacgccaaccucgacuccugcaagcgggugcugaacgucgugugcaagaccugcggccagcagcagaccacccugaaggggguggaggccgucauguacaugggcacccucagcuacgagcaguucaagaagggggugcagauccccugcacgugcggcaagcaggccaccaaguaccuggugcagcaggagucccccuucgucaugaugagcgcccccccggcgcaguacgagcugaagcacgggaccuucaccugcgccuccgaguacacgggcaacuaccagugcggccacuacaagcacaucaccagcaaggagacccucuacugcaucgacggggcccugcugaccaagagcuccgaguacaagggccccaucacggacguguucuacaaggagaacagcuacaccaccaccaucaagcccgugacguacaagcucgacggggucgugugcaccgagaucgaccccaagcuggacaacuacuacaagaaggacaacuccuacuucaccgagcagccgaucgaccuggugcccaaccagcccuaccccaacgccagcuucgacaacuucaaguucgucugcgacaacaucaaguucgccgacgaccucaaccagcugaccggcuacaagaagccggcgucccgcgagcugaaggugacguucuuccccgaccucaacggggacguggucgccaucgacuacaagcacuacacccccagcuucaagaagggcgccaagcugcugcacaagcccaucguguggcacgugaacaacgccaccaacaaggcgaccuacaagccgaacacguggugcauccggugccucugguccaccaagcccgucgagaccagcaacuccuucgacgugcugaagagcgaggacgcccagggcauggacaaccuggccugcgaggaccucaagcccguguccgaggaggucguggagaaccccaccauccagaaggacgugcuggagugcaacgucaagacgaccgagguggugggggacaucauccugaagccggccaacaacagccucaagaucaccgaggaggucggccacaccgaccugauggccgcguacguggacaacuccagccugacgaucaagaagcccaacgagcucucccgcgugcuggggcugaagacccucgccacccacggccuggccgccgucaacagcgugcccugggacaccaucgccaacuacgcgaagccguuccugaacaagguggucuccacgaccaccaacaucgugacccgcugccucaaccgggugugcacgaacuacaugcccuacuucuucacccugcugcuccagcugugcaccuucacccgcagcaccaacucccggaucaaggccagcaugcccacgaccaucgccaagaacaccgucaagagcguggggaaguucugccuggaggccuccuucaacuaccucaagagccccaacuucuccaagcugaucaacaucaucaucugguuccugcuccugagcgugugccugggcucccucaucuacagcaccgccgcgcugggcguccugauguccaaccucgggaugccgagcuacugcacgggcuaccgcgagggguaccugaacuccaccaacgugaccaucgccaccuacugcacgggcagcauccccugcuccgugugccugagcggccucgacucccuggacaccuaccccagccuggagaccauccagaucaccaucuccagcuucaagugggaccucacggccuucgggcuggucgccgagugguuccuggccuacauccucuucacccgguucuucuacgugcugggccuggcggccaucaugcagcucuucuucuccuacuucgccgugcacuucaucagcaacuccuggcugauguggcugaucaucaaccugguccagauggcccccaucagcgcgauggugcgcauguacaucuucuucgccagcuucuacuacguguggaaguccuacguccacgugguggacgggugcaacagcuccaccugcaugaugugcuacaagcggaaccgcgccacccgggucgagugcacgaccaucgugaacggcguccgccggagcuucuacguguacgccaacgggggcaagggcuucugcaagcuccacaacuggaacugcgugaacugcgacaccuucugcgccggguccaccuucaucagcgacgaggucgcgcgcgaccugucccugcaguucaagcggccgaucaaccccacggaccagagcuccuacaucguggacagcgugaccgucaagaacggcuccauccaccucuacuucgacaaggccgggcagaagaccuacgagcgccacagccugucccacuucgugaaccuggacaaccuccgggccaacaacaccaagggcagccugcccaucaacgugaucgucuucgacgggaaguccaagugcgaggagagcuccgccaagagcgccuccguguacuacagccagcugaugugccagcccauccuccugcuggaccaggcgcucgugagcgacgucggcgacuccgccgagguggccgugaagauguucgacgccuacgucaacacguucagcuccaccuucaacgugccgauggagaagcugaagacccugguggccaccgcggaggccgagcucgccaagaacgucagccuggacaacgugcuguccacguucaucagcgccgcgcgccagggcuucguggacuccgacgucgagaccaaggacgugguggagugccucaagcugagccaccaguccgacaucgaggucaccggggacagcugcaacaacuacaugcugaccuacaacaagguggagaacaugacgccccgggaccucggcgccugcaucgacugcuccgcccgccacaucaacgcccagguggccaagagccacaacaucgcgcugaucuggaacgucaaggacuucaugucccugagcgagcagcuccggaagcagauccgcuccgccgccaagaagaacaaccugcccuucaagcugaccugcgccaccacccgccagguggugaacgucgugacgaccaagaucgcccucaaggggggcugaggacuagucccuguucccagagcccacuuuuuuuucuuuuuuugaaauaaaauagccugucuuucagaucucaaaggcucuuuucagagccaccaaaaaaaaaaaaaaaaaaaaaaaaaaaaaaaaaaaaaaaaaaaaaaaaaaaaaaaaaaaaaaaaaaaaaaaaaaaaaaaaaaaaaaaaaaaaaaaaaaaaa

SEQ ID NO: 19742 - RNA, 6113 nt, Artificial Sequence
  SARS-CoV-2__MT811344.1__non-structural protein 3 (NSP3) mRNA gc
aggagagucccgcagucggcguccagcggcucugcuuguucgugugugugucguugcaggccuuauucaagcuuaccauggcccccaccaaggugaccuucggcgacgacacggucaucgaggugcagggguacaagagcgugaacaucaccuucgagcuggacgagcgcaucgacaagguccucaacgagaagugcuccgccuacaccguggagcugggcaccgaggugaacgaguucgcgugcgucguggccgacgccgugaucaagacgcugcagccggucagcgagcuccugaccccccuggggaucgaccucgacgagugguccauggccaccuacuaccuguucgacgagagcggcgaguucaagcuggccucccacauguacugcagcuucuacccccccgacgaggacgaggaggagggggacugcgaggaggaggaguucgagccguccacccaguacgaguacggcacggaggacgacuaccagggcaagccccucgaguucggggcgaccagcgccgcccugcagcccgaggaggagcaggaggaggacuggcuggacgacgacucccagcagaccgugggccagcaggacgggagcgaggacaaccagaccacgaccauccagaccaucguggagguccagccccagcucgagauggagcugaccccgguggugcagacgaucgaggucaacuccuucagcggcuaccugaagcucaccgacaacguguacaucaagaacgccgacaucguggaggaggcgaagaaggucaagcccaccgugguggucaacgccgccaacguguaccugaagcacgggggcggcguggccggggcccugaacaaggcgaccaacaacgccaugcaggucgaguccgacgacuacaucgccacgaacggcccccucaagguggggggcagcugcguccuguccggccacaaccuggccaagcacugccuccacgugguggggcccaacgucaacaagggcgaggacauccagcugcugaagagcgccuacgagaacuucaaccagcacgaggugcuccuggcgccgcugcucuccgccgggaucuucggcgccgaccccauccacagccugcgggugugcgucgacaccgugcgcaccaacguguaccuggccgucuucgacaagaaccucuacgacaagcugguguccagcuuccuggagaugaagagcgagaagcagguggagcagaagaucgccgagauccccaaggaggaggucaagcccuucaucaccgaguccaagccgagcguggagcagcggaagcaggacgacaagaagaucaaggcgugcguggaggaggucacgaccacccucgaggagaccaaguuccugacggagaaccugcuccuguacaucgacaucaacgggaaccugcaccccgacuccgccacccucgugagcgacaucgacaucaccuuccugaagaaggacgcccccuacaucgugggcgacgucgugcaggagggcgugcugaccgccgucgugauccccacgaagaaggccgggggcaccaccgagaugcucgcgaaggcccugcgcaaggugccgaccgacaacuacaucacgaccuaccccgggcagggccugaacggguacaccgucgaggaggccaagaccgugcucaagaagugcaaguccaccuucuacauccugcccagcaucaucuccaacgagaagcaggagauccugggcacggugagcuggaaccuccgggagaugcuggcccacgcggaggagacccgcaagcugaugcccgucugcguggagaccaaggccaucguguccaccauccagcggaaguacaagggcaucaagauccaggagggggucguggacuacggcgcccgcuucuacuucuacacgagcaagaccaccguggccucccugaucaacacccucaacgaccugaacgagacgcuggucaccaugccgcucggguacgugacccacggccugaaccuggaggaggccgcgcgguacaugcgcagccucaaggugcccgccaccgucuccgugagcucccccgacgccgugacggccuacaacggguaccugaccagcuccagcaagacccccgaggagcacuucaucgagaccaucucccuggccggcagcuacaaggacuggagcuacuccggccagagcacgcagcucgggaucgaguuccugaagcggggcgacaaguccgucuacuacaccagcaacccgaccaccuuccaccuggacggggaggugaucacguucgacaaccucaagacccugcugucccuccgcgaggugcggaccaucaaggucuucaccacgguggacaacaucaaccugcacacccagguggucgacaugagcaugaccuacggccagcaguucggccccaccuaccuggacggggcggacgugacgaagaucaagccccacaacucccacgagggcaagaccuucuacgugcucccgaacgacgacacccugcgcgucgaggccuucgaguacuaccacaccacggaccccagcuuccuggggcgguacauguccgcccucaaccacaccaagaaguggaaguacccccaggugaacggccugaccagcaucaagugggccgacaacaacugcuaccuggccaccgcgcuccugacgcugcagcagaucgagcucaaguucaaccccccggcccugcaggacgccuacuaccgcgcccgggcgggggaggccgccaacuucugcgcccugauccucgccuacugcaacaagaccgugggcgagcugggcgacguccgcgagaccauguccuaccuguuccagcacgcgaaccucgacagcugcaagcgggugcugaacgucgugugcaagaccugcgggcagcagcagaccacgcugaagggcguggaggccgucauguacauggggacccucuccuacgagcaguucaagaagggcgugcagauccccugcaccugcgggaagcaggccaccaaguaccuggugcagcaggagagccccuucgucaugauguccgcccccccggcccaguacgagcugaagcacggcacguucaccugcgcgagcgaguacaccggcaacuaccagugcgggcacuacaagcacaucaccuccaaggagacgcucuacugcaucgacggcgcccugcugaccaagagcagcgaguacaaggggcccaucaccgacguguucuacaaggagaacuccuacaccacgaccaucaagcccgugaccuacaagcucgacggcgucgugugcaccgagaucgaccccaagcuggacaacuacuacaagaaggacaacagcuacuucacggagcagccgaucgaccuggugcccaaccagcccuaccccaacgccuccuucgacaacuucaaguucgucugcgacaacaucaaguucgccgacgaccucaaccagcugaccggguacaagaagccggccagccgcgagcugaaggugaccuucuuccccgaccucaacggcgacguggucgcgaucgacuacaagcacuacacccccuccuucaagaagggcgccaagcugcugcacaagcccaucguguggcacgugaacaacgccacgaacaaggccaccuacaagccgaacaccuggugcauccggugccucuggagcaccaagcccgucgagacguccaacagcuucgacgugcugaaguccgaggacgcgcaggggauggacaaccuggccugcgaggaccucaagcccgugagcgaggaggucguggagaaccccaccauccagaaggacgugcuggagugcaacgucaagaccaccgagguggugggcgacaucauccugaagccggccaacaacucccucaagaucacggaggaggucgggcacaccgaccugauggccgccuacguggacaacagcucccugaccaucaagaagcccaacgagcucagccgcgugcugggccugaagacccucgcgacgcacgggcuggccgccgucaacuccgugcccugggacaccaucgccaacuacgccaagccguuccugaacaagguggucagcaccaccacgaacaucgugacccgcugccucaaccgggugugcaccaacuacaugcccuacuucuucacccugcugcuccagcugugcaccuucacgcgcuccaccaacagccggaucaaggcguccaugcccaccaccaucgccaagaacacggucaagagcgugggcaaguucugccuggaggccagcuucaacuaccucaagucccccaacuucagcaagcugaucaacaucaucaucugguuccugcuccuguccgugugccugggcagccucaucuacuccaccgccgcccuggggguccugaugagcaaccucggcaugccguccuacugcaccggguaccgcgagggcuaccugaacagcaccaacgugacgaucgcgaccuacugcaccggcuccauccccugcagcgugugccuguccgggcucgacagccuggacaccuaccccucccuggagacgauccagaucaccaucagcuccuucaagugggaccucaccgccuucggccuggucgccgagugguuccuggccuacauccucuucacccgguucuucuacgugcuggggcuggccgcgaucaugcagcucuucuucagcuacuucgccgugcacuucaucuccaacagcuggcugauguggcugaucaucaaccugguccagauggcccccaucuccgccauggugcgcauguacaucuucuucgcgagcuucuacuacguguggaagagcuacguccacgugguggacggcugcaacuccagcacgugcaugaugugcuacaagcggaaccgcgccacccgggucgagugcaccaccaucgugaacgggguccgccgguccuucuacguguacgccaacggcggcaagggguucugcaagcuccacaacuggaacugcgugaacugcgacacguucugcgccggcagcaccuucaucuccgacgaggucgcccgcgaccugagccugcaguucaagcggccgaucaaccccaccgaccaguccagcuacaucguggacuccgugaccgucaagaacgggagcauccaccucuacuucgacaaggcgggccagaagacguacgagcgccacucccugagccacuucgugaaccuggacaaccuccgggccaacaacaccaaggggucccugcccaucaacgugaucgucuucgacggcaagagcaagugcgaggaguccagcgccaaguccgccagcguguacuacucccagcugaugugccagcccauccuccugcuggaccaggcccucgugagcgacgucggcgacagcgcggagguggccgugaagauguucgacgccuacgucaacaccuucuccagcaccuucaacgugccgauggagaagcugaagacgcugguggccaccgccgaggcggagcucgccaagaacgucucccuggacaacgugcugagcaccuucaucuccgccgcccgccagggguucguggacagcgacgucgagaccaaggacgugguggagugccucaagcugucccaccagagcgacaucgaggucacgggcgacuccugcaacaacuacaugcugaccuacaacaagguggagaacaugaccccccgggaccucggggcgugcaucgacugcagcgcccgccacaucaacgcccagguggccaagucccacaacaucgcccugaucuggaacgucaaggacuucaugagccuguccgagcagcuccggaagcagauccgcagcgcggccaagaagaacaaccugcccuucaagcugaccugcgccacgacccgccagguggugaacgucgugaccaccaagaucgcccucaagggcgggugaggacuagucccuguucccagagcccacuuuuuuuucuuuuuuugaaauaaaauagccugucuuucagaucucaaaggcucuuuucagagccaccaaaaaaaaaaaaaaaaaaaaaaaaaaaaaaaaaaaaaaaaaaaaaaaaaaaaaaaaaaaaaaaaaaaaaaaaaaaaaaaaaaaaaaaaaaaaaaaaaaaaa

SEQ ID NO: 19743 - RNA, 6113 nt, Artificial Sequence
  SARS-CoV-2__MT811365.1__non-structural protein 3 (NSP3) mRNA gc
aggagagucccgcagucggcguccagcggcucugcuuguucgugugugugucguugcaggccuuauucaagcuuaccauggcccccaccaaggugaccuucggcgacgacacggucaucgaggugcagggguacaagagcgugaacaucaccuucgagcuggacgagcgcaucgacaagguccucaacgagaagugcuccgccuacaccguggagcugggcaccgaggugaacgaguucgcgugcgucguggccgacgccgugaucaagacgcugcagccggucagcgagcuccugaccccccuggggaucgaccucgacgagugguccauggccaccuacuaccuguucgacgagagcggcgaguucaagcuggccucccacauguacugcagcuucuacccccccgacgaggacgaggaggagggggacugcgaggaggaggaguucgagccguccacccaguacgaguacggcacggaggacgacuaccagggcaagccccucgaguucggggcgaccagcgccgcccugcagcccgaggaggagcaggaggaggacuggcuggacgacgacucccagcagaccgugggccagcaggacgggagcgaggacaaccagaccacgaccauccagaccaucguggagguccagccccagcucgagauggagcugaccccgguggugcagacgaucgaggucaacuccuucagcggcuaccugaagcucaccgacaacguguacaucaagaacgccgacaucguggaggaggcgaagaaggucaagcccaccgugguggucaacgccgccaacguguaccugaagcacgggggcggcguggccggggcccugaacaaggcgaccaacaacgccaugcaggucgaguccgacgacuacaucgccacgaacggcccccucaagguggggggcagcugcguccuguccggccacaaccuggccaagcacugccuccacgugguggggcccaacgucaacaagggcgaggacauccagcugcugaagagcgccuacgagaacuucaaccagcacgaggugcuccuggcgccgcugcucuccgccgggaucuucggcgccgaccccauccacagccugcgggugugcgucgacaccgugcgcaccaacguguaccuggccgucuucgacaagaaccucuacgacaagcugguguccagcuuccuggagaugaagagcgagaagcagguggagcagaagaucgccgagauccccaaggaggaggucaagcccuucaucaccgaguccaagccgagcguggagcagcggaagcaggacgacaagaagaucaaggcgugcguggaggaggucacgaccacccucgaggagaccaaguuccugacggagaaccugcuccuguacaucgacaucaacgggaaccugcaccccgacuccgccacccucgugagcgacaucgacaucaccuuccugaagaaggacgcccccuacaucgugggcgacgucgugcaggagggcgugcugaccgccgucgugauccccacgaagaaggccgggggcaccaccgagaugcucgcgaaggcccugcgcaaggugccgaccgacaacuacaucacgaccuaccccgggcagggccugaacggguacaccgucgaggaggccaagaccgugcucaagaagugcaaguccgccuucuacauccugcccagcaucaucuccaacgagaagcaggagauccugggcaccgugagcuggaaccuccgggagaugcuggcgcacgccgaggagacgcgcaagcugaugcccgucugcguggagaccaaggccaucguguccaccauccagcggaaguacaagggcaucaagauccaggagggggucguggacuacggcgcccgcuucuacuucuacaccagcaagacgaccguggccucccugaucaacacccucaacgaccugaacgagacccuggucacgaugccgcucggguacgugacccacggccugaaccuggaggaggcggcccgguacaugcgcagccucaaggugcccgccaccgucuccgugagcucccccgacgccgugaccgccuacaacggguaccugacgagcuccagcaagacccccgaggagcacuucaucgagaccaucucccuggcgggcagcuacaaggacuggagcuacuccggccagagcacccagcucgggaucgaguuccugaagcggggcgacaaguccgucuacuacacgagcaacccgaccaccuuccaccuggacggggaggugaucaccuucgacaaccucaagacgcugcugucccuccgcgaggugcggaccaucaaggucuucaccaccguggacaacaucaaccugcacacgcagguggucgacaugagcaugaccuacggccagcaguucggccccaccuaccuggacggggccgacgugaccaagaucaagccccacaacucccacgagggcaagacguucuacgugcucccgaacgacgacacccugcgcgucgaggccuucgaguacuaccacaccaccgaccccagcuuccuggggcgguacauguccgcccucaaccacacgaagaaguggaaguacccccaggugaacggccugaccagcaucaagugggccgacaacaacugcuaccuggcgaccgcccuccugacccugcagcagaucgagcucaaguucaaccccccggcccugcaggacgccuacuaccgcgcgcgggccggggaggccgccaacuucugcgcccugauccucgcguacugcaacaagacggugggcgagcugggcgacguccgcgagaccauguccuaccuguuccagcacgccaaccucgacagcugcaagcgggugcugaacgucgugugcaagaccugcgggcagcagcagaccacccugaagggcguggaggccgucauguacauggggacgcucuccuacgagcaguucaagaagggcgugcagauccccugcaccugcgggaagcaggccaccaaguaccuggugcagcaggagagccccuucgucaugauguccgcccccccggcgcaguacgagcugaagcacggcaccuucacgugcgccagcgaguacaccggcaacuaccagugcgggcacuacaagcacaucaccuccaaggagacccucuacugcaucgacggcgcccugcugacgaagagcagcgaguacaaggggcccaucaccgacguguucuacaaggagaacuccuacaccaccacgaucaagcccgugaccuacaagcucgacggcgucgugugcaccgagaucgaccccaagcuggacaacuacuacaagaaggacaacagcuacuucaccgagcagccgaucgaccuggugcccaaccagcccuaccccaacgccuccuucgacaacuucaaguucgucugcgacaacaucaaguucgccgacgaccucaaccagcugacgggguacaagaagccggcgagccgcgagcugaaggugaccuucuuccccgaccucaacggcgacguggucgccaucgacuacaagcacuacacccccuccuucaagaagggcgccaagcugcugcacaagcccaucguguggcacgugaacaacgccaccaacaaggcgacguacaagccgaacaccuggugcauccggugccucuggagcaccaagcccgucgagaccuccaacagcuucgacgugcugaaguccgaggacgcccaggggauggacaaccuggccugcgaggaccucaagcccgugagcgaggaggucguggagaaccccacgauccagaaggacgugcuggagugcaacgucaagaccaccgagguggugggcgacaucauccugaagccggccaacaacucccucaagaucaccgaggaggucgggcacacggaccugauggccgcguacguggacaacagcucccugaccaucaagaagcccaacgagcucagccgcgugcugggccugaagacccucgccacccacgggcuggccgccgucaacuccgugcccugggacacgaucgccaacuacgcgaagccguuccugaacaagguggucagcaccaccaccaacaucgugacgcgcugccucaaccgggugugcaccaacuacaugcccuacuucuucacccugcugcuccagcugugcaccuucauccgcuccaccaacagccggaucaaggccuccaugcccacgaccaucgccaagaacaccgucaagagcgugggcaaguucugccuggaggccagcuucaacuaccucaagucccccaacuucagcaagcugaucaacaucaucaucugguuccugcuccuguccgugugccugggcagccucaucuacuccaccgccgcgcuggggguccugaugagcaaccucggcaugccguccuacugcacgggguaccgcgagggcuaccugaacagcaccaacgugaccaucgccaccuacugcacgggcuccauccccugcagcgugugccuguccgggcucgacagccuggacaccuaccccucccuggagaccauccagaucaccaucagcuccuucaagugggaccucacggccuucggccuggucgccgagugguuccuggccuacauccucuucacccgguucuucuacgugcuggggcuggcggccaucaugcagcucuucuucagcuacuucgccgugcacuucaucuccaacagcuggcugauguggcugaucaucaaccugguccagauggcccccaucuccgcgauggugcgcauguacaucuucuucgccagcuucuacuacguguggaagagcuacguccacgugguggacggcugcaacuccagcaccugcaugaugugcuacaagcggaaccgcgccacccgggucgagugcacgaccaucgugaacgggguccgccgguccuucuacguguacgccaacggcggcaagggguucugcaagcuccacaacuggaacugcgugaacugcgacaccuucugcgccggcagcaccuucaucuccgacgaggucgcgcgcgaccugagccugcaguucaagcggccgaucaaccccacggaccaguccagcuacaucguggacuccgugaccgucaagaacgggagcauccaccucuacuucgacaaggccggccagaagaccuacgagcgccacucccugagccacuucgugaaccuggacaaccuccgggccaacaacaccaaggggucccugcccaucaacgugaucgucuucgacggcaagagcaagugcgaggaguccagcgccaaguccgccagcguguacuacucccagcugaugugccagcccauccuccugcuggaccaggcgcucgugagcgacgucggcgacagcgccgagguggccgugaagauguucgacgccuacgucaacacguucuccagcaccuucaacgugccgauggagaagcugaagacccugguggccaccgcggaggccgagcucgccaagaacgucucccuggacaacgugcugagcacguucaucuccgccgcgcgccagggguucguggacagcgacgucgagaccaaggacgugguggagugccucaagcugucccaccagagcgacaucgaggucaccggcgacuccugcaacaacuacaugcugaccuacaacaagguggagaacaugacgccccgggaccucggggccugcaucgacugcagcgcccgccacaucaacgcccagguggccaagucccacaacaucgcgcugaucuggaacgucaaggacuucaugagccuguccgagcagcuccggaagcagauccgcagcgccgccaagaagaacaaccugcccuucaagcugaccugcgccaccacccgccagguggugaacgucgugacgaccaagaucgcccucaagggcgggugaggacuagucccuguucccagagcccacuuuuuuuucuuuuuuugaaauaaaauagccugucuuucagaucucaaaggcucuuuucagagccaccaaaaaaaaaaaaaaaaaaaaaaaaaaaaaaaaaaaaaaaaaaaaaaaaaaaaaaaaaaaaaaaaaaaaaaaaaaaaaaaaaaaaaaaaaaaaaaaaaaaaa

SEQ ID NO: 19744 - RNA, 6113 nt, Artificial Sequence
  SARS-CoV-2__MT811405.1__non-structural protein 3 (NSP3) mRNA gc
aggagagucccgcagucggcguccagcggcucugcuuguucgugugugugucguugcaggccuuauucaagcuuaccauggcccccaccaaggugaccuucggcgacgacacggucaucgaggugcagggguacaagagcgugaacaucaccuucgagcuggacgagcgcaucgacaagguccucaacgagaagugcuccgccuacaccguggagcugggcaccgaggugaacgaguucgcgugcgucguggccgacgccgugaucaagacgcugcagccggucagcgagcuccugaccccccuggggaucgaccucgacgagugguccauggccaccuacuaccuguucgacgagagcggcgaguucaagcuggccucccacauguacugcagcuucuacccccccgacgaggacgaggaggagggggacugcgaggaggaggaguucgagccguccacccaguacgaguacggcacggaggacgacuaccagggcaagccccucgaguucggggcgaccagcgccgcccugcagcccgaggaggagcaggaggaggacuggcuggacgacgacucccagcagaccgugggccagcaggacgggagcgaggacaaccagaccacgaccauccagaccaucguggagguccagccccagcucgagauggagcugaccccgguggugcagacgaucgaggucaacuccuucagcggcuaccugaagcucaccgacaacguguacaucaagaacgccgacaucguggaggaggcgaagaaggucaagcccaccgugguggucaacgccgccaacguguaccugaagcacgggggcggcguggccggggcccugaacaaggcgaccaacaacgccaugcaggucgaguccgacgacuacaucgccacgaacggcccccucaagguggggggcagcugcguccuguccggccacaaccuggccaagcacugccuccacgugguggggcccaacgucaacaagggcgaggacauccagcugcugaagagcgccuacgagaacuucaaccagcacgaggugcuccuggcgccgcugcucuccgccgggaucuucggcgccgaccccauccacagccugcgggugugcgucgacaccgugcgcaccaacguguaccuggccgucuucgacaagaaccucuacgacaagcugguguccagcuuccuggagaugaagagcgagaagcagguggagcagaagaucgccgagauccccaaggaggaggucaagcccuucaucaccgaguccaagccgagcguggagcagcggaagcaggacgacaagaagaucaaggcgugcguggaggaggucacgaccacccucgaggagaccaaguuccugacggagaaccugcuccuguacaucgacaucaacgggaaccugcaccccgacuccgccacccucgugagcgacaucgacaucaccuuccugaagaaggacgcccccuacaucgugggcgacgucgugcaggagggcgugcugaccgccgucgugauccccacgaagaaggccgggggcaccaccgagaugcucgcgaaggcccugcgcaaggugccgaccgacaacuacaucacgaccuaccccgggcagggccugaacggguacaccgucgaggaggccaagaccgugcucaagaagugcaaguccgccuucuacauccugcccagcaucaucuccaacgagaagcaggagauccugggcaccgugagcuggaaccuccgggagaugcuggcgcacgccgaggagacgcgcaagcugaugcccgucugcguggagaccaaggccaucguguccaccauccagcggaaguacaagggcaucaagauccaggagggggucguggacuacggcgcccgcuucuacuucuacaccagcaagacgaccguggccucccugaucaacacccucaacgaccugaacgagacccuggucacgaugccgcucggguacgugacccacggccugaaccuggaggaggcggcccgguacaugcgcagccucaaggugcccgccaccgucuccgugagcucccccgacgccgugaccgccuacaacggguaccugacgagcuccagcaagacccccgaggagcacuucaucgagaccaucucccuggcgggcagcuacaaggacuggagcuacuccggccagagcacccagcucgggaucgaguuccugaagcggggcgacaaguccgucuacuacacgagcaacccgaccaccuuccaccuggacggggaggugaucaccuucgacaaccucaagacgcugcugucccuccgcgaggugcggaccaucaaggucuucaccaccguggacaacaucaaccugcacacgcagguggucgacaugagcaugaccuacggccagcaguucggccccaccuaccuggacggggccgacgugaccaagaucaagccccacaacucccacgagggcaagacguucuacgugcucccgaacgacgacacccugcgcgucgaggccuucgaguacuaccacaccaccgaccccagcuuccuggggcgguacauguccgcccucaaccacacgaagaaguggaaguacccccaggugaacggccugaccagcaucaagugggccgacaacaacugcuaccuggcgaccgcccuccugacccugcagcagaucgagcucaaguucaaccccccggcccugcaggacgccuacuaccgcgcgcgggccggggaggccgccaacuucugcgcccugauccucgcguacugcaacaagacggugggcgagcugggcgacguccgcgagaccauguccuaccuguuccagcacgccaaccucgacagcugcaagcgggugcugaacgucgugugcaagaccugcgggcagcagcagaccacccgcaagggcguggaggccgucauguacauggggacgcuguccuacgagcaguucaagaagggcgugcagauccccugcaccugcgggaagcaggccaccaaguaccucgugcagcaggagagccccuucgucaugauguccgcccccccggcgcaguacgagcugaagcacggcaccuucacgugcgccagcgaguacaccggcaacuaccagugcgggcacuacaagcacaucaccuccaaggagacccuguacugcaucgacggcgcccuccugacgaagagcagcgaguacaaggggcccaucaccgacguguucuacaaggagaacuccuacaccaccacgaucaagcccgugaccuacaagcuggacggcgucgugugcaccgagaucgaccccaagcucgacaacuacuacaagaaggacaacagcuacuucaccgagcagccgaucgaccuggugcccaaccagcccuaccccaacgccuccuucgacaacuucaaguucgucugcgacaacaucaaguucgccgacgaccugaaccagcucacgggguacaagaagccggcgagccgggagcugaaggugaccuucuuccccgaccugaacggcgacguggucgccaucgacuacaagcacuacacccccuccuucaagaagggcgccaagcuccugcacaagcccaucguguggcacgugaacaacgccaccaacaaggcgacguacaagccgaacaccuggugcauccgcugccuguggagcaccaagcccgucgagaccuccaacagcuucgacgugcucaaguccgaggacgcccaggggauggacaaccuggccugcgaggaccugaagcccgugagcgaggaggucguggagaaccccacgauccagaaggacgugcucgagugcaacgucaagaccaccgagguggugggcgacaucauccugaagccggccaacaacucccugaagaucaccgaggaggucgggcacacggaccucauggccgcguacguggacaacagcucccugaccaucaagaagcccaacgagcugagccgcgugcucggccugaagacccuggccacccacgggcucgccgccgucaacuccgugcccugggacacgaucgccaacuacgcgaagccguuccugaacaagguggucagcaccaccaccaacaucgugacgcggugccugaaccgcgugugcaccaacuacaugcccuacuucuucacccuccugcugcagcucugcaccuucacccgguccacgaacagccgcaucaaggccuccaugcccaccaccaucgccaagaacaccgucaagagcgugggcaaguucugccuggaggccagcuucaacuaccugaagucccccaacuucagcaagcucaucaacaucaucaucugguuccugcugcucuccgugugccugggcagccugaucuacuccacggccgcgcucgggguccugaugagcaaccugggcaugccguccuacugcaccggguaccgggagggcuaccucaacagcaccaacgugaccaucgccacguacugcaccggcuccauccccugcagcgugugccuguccgggcuggacagccucgacaccuaccccucccuggagaccauccagaucacgaucagcuccuucaagugggaccugaccgccuucggccucgucgccgagugguuccuggccuacauccuguucacccgcuucuucuacgugcucgggcuggcggccaucaugcagcuguucuucagcuacuucgccgugcacuucaucuccaacagcuggcucauguggcugaucaucaaccugguccagauggcccccaucuccgcgauggugcggauguacaucuucuucgccagcuucuacuacguguggaagagcuacguccacgugguggacggcugcaacuccagcaccugcaugaugugcuacaagcgcaaccgggccacgcgcgucgagugcaccaccaucgugaacgggguccggcgcuccuucuacguguacgccaacggcggcaagggguucugcaagcugcacaacuggaacugcgugaacugcgacaccuucugcgccggcagcacguucaucuccgacgaggucgcgcgggaccucagccugcaguucaagcgcccgaucaaccccaccgaccaguccagcuacaucguggacuccgugaccgucaagaacgggagcauccaccuguacuucgacaaggccggccagaagaccuacgagcggcacucccucagccacuucgugaaccuggacaaccugcgcgccaacaacacgaaggggucccuccccaucaacgugaucgucuucgacggcaagagcaagugcgaggaguccagcgccaaguccgccagcguguacuacucccagcugaugugccagcccauccugcuccuggaccaggcgcuggugagcgacgucggcgacagcgccgagguggccgugaagauguucgacgccuacgucaacaccuucuccagcaccuucaacgugccgauggagaagcucaagacccugguggccacggcggaggccgagcuggccaagaacgucucccucgacaacgugcugagcaccuucaucuccgccgcgcggcagggguucguggacagcgacgucgagaccaaggacgugguggagugccugaagcucucccaccagagcgacaucgaggucaccggcgacuccugcaacaacuacaugcugacguacaacaagguggagaacaugaccccccgcgaccugggggccugcaucgacugcagcgcccggcacaucaacgcccagguggccaagucccacaacaucgcgcucaucuggaacgucaaggacuucaugagccuguccgagcagcugcgcaagcagauccgcagcgccgccaagaagaacaaccuccccuucaagcugaccugcgccaccacgcggcagguggugaacgucgugaccaccaagaucgcccugaagggcgggugaggacuagucccuguucccagagcccacuuuuuuuucuuuuuuugaaauaaaauagccugucuuucagaucucaaaggcucuuuucagagccaccaaaaaaaaaaaaaaaaaaaaaaaaaaaaaaaaaaaaaaaaaaaaaaaaaaaaaaaaaaaaaaaaaaaaaaaaaaaaaaaaaaaaaaaaaaaaaaaaaaaaa

SEQ ID NO: 19745 - RNA, 6113 nt, Artificial Sequence
  SARS-CoV-2__MT811407.1__non-structural protein 3 (NSP3) mRNA gc
aggagagucccgcagucggcguccagcggcucugcuuguucgugugugugucguugcaggccuuauucaagcuuaccauggcccccaccaaggugaccuucggcgacgacacggucaucgaggugcagggguacaagagcgugaacaucaccuucgagcuggacgagcgcaucgacaagguccucaacgagaagugcuccgccuacaccguggagcugggcaccgaggugaacgaguucgcgugcgucguggccgacgccgugaucaagacgcugcagccggucagcgagcuccugaccccccuggggaucgaccucgacgagugguccauggccaccuacuaccuguucgacgagagcggcgaguucaagcuggccucccacauguacugcagcuucuacccccccgacgaggacgaggaggagggggacugcgaggaggaggaguucgagccguccacccaguacgaguacggcacggaggacgacuaccagggcaagccccucgaguucggggcgaccagcgccgcccugcagcccgaggaggagcaggaggaggacuggcuggacgacgacucccagcagaccgugggccagcaggacgggagcgaggacaaccagaccacgaccauccagaccaucguggagguccagccccagcucgagauggagcugaccccgguggugcagacgaucgaggucaacuccuucagcggcuaccugaagcucaccgacaacguguacaucaagaacgccgacaucguggaggaggcgaagaaggucaagcccaccgugguggucaacgccgccaacguguaccugaagcacgggggcggcguggccggggcccugaacaaggcgaccaacaacgccaugcaggucgaguccgacgacuacaucgccacgaacggcccccucaagguggggggcagcugcguccuguccggccacaaccuggccaagcacugccuccacgugguggggcccaacgucaacaagggcgaggacauccagcugcugaagagcgccuacgagaacuucaaccagcacgaggugcuccuggcgccgcugcucuccgccgggaucuucggcgccgaccccauccacagccugcgggugugcgucgacaccgugcgcaccaacguguaccuggccgucuucgacaagaaccucuacgacaagcugguguccagcuuccuggagaugaagagcgagaagcagguggagcagaagaucgccgagauccccaaggaggaggucaagcccuucaucaccgaguccaagccgagcguggagcagcggaagcaggacgacaagaagaucaaggcgugcguggaggaggucacgaccacccucgaggagaccaaguuccugacggagaaccugcuccuguacaucgacaucaacgggaaccugcaccccgacuccgccacccucgugagcgacaucgacaucaccuuccugaagaaggacgcccccuacaucgugggcgacgucgugcaggagggcgugcugaccgccgucgugauccccacgaagaaggccgggggcaccaccgagaugcucgcgaaggcccugcgcaaggugccgaccgacaacuacaucacgaccuaccccgggcagggccugaacggguacaccgucgaggaggccaagaccgugcucaagaagugcaaguccgccuucuacauccugcccagcaucaucuccaacgagaagcaggagauccugggcaccgugagcuggaaccuccgggagaugcuggcgcacgccgaggagacgcgcaagcugaugcccgucugcguggagaccaaggccaucguguccaccauccagcggaaguacaagggcaucaagauccaggagggggucguggacuacggcgcccgcuucuacuucuacaccagcaagacgaccguggccucccugaucaacacccucaacgaccugaacgagacccuggucacgaugccgcucggguacgugacccacggccugaaccuggaggaggcggcccgguacaugcgcagccucaaggugcccgccaccgucuccgugagcucccccgacgccgugaccgccuacaacggguaccugacgagcuccagcaagacccccgaggagcacuucaucgagaccaucucccuggcgggcagcuacaaggacuggagcuacuccggccagagcacccagcucgggaucgaguuccugaagcggggcgacaaguccgucuacuacacgagcaacccgaccaccuuccaccuggacggggaggugaucaccuucgacaaccucaagacgcugcugucccuccgcgaggugcggaccaucaaggucuucaccaccguggacaacaucaaccugcacacgcagguggucgacaugagcaugaccuacggccagcaguucggccccaccuaccuggacggggccgacgugaccaagaucaagccccacaacucccacgagggcaagacguucuacgugcucccgaacgacgacacccugcgcgucgaggccuucgaguacuaccacaccaccgaccccagcuuccuggggcgguacauguccgcccucaaccacacgaagaaguggaaguacccccaggugaacggccugaccagcaucaagugggccgacaacaacugcuaccuggcgaccgcccuccugacccugcagcagaucgagcucaaguucaaccccccggcccugcaggacgccuacuaccgcgcgcgggccggggaggccgccaacuucugcgcccugauccucgcguacugcaacaagacggugggcgagcugggcgacguccgcgagaccauguccuaccuguuccagcacgccaaccucgacagcugcaagcgggugcugaacgucgugugcaagaccugcgggcagcagcagaccacccugaagggcguggaggccgucauguacauggggacgcucuccuacgagcaguucaagaagggcgugcagauccccugcaccugcgggaagcaggccaccaaguaccuggugcagcaggagagccccuucgucaugauguccgcccccccggcgcaguacgagcugaagcacggcaccuucacgugcgccagcgaguacaccggcaacuaccagugcgggcacuacaagcacaucaccuccaaggagacccucuacugcaucgacggcgcccugcugacgaagagcagcgaguacaaggggcccaucaccgacguguucuacaaggagaacuccuacaccaccacgaucaagcccgugaccuacaagcucgacggcgucgugugcaccgagaucgaccccaagcuggacaacuacuacaagaaggacaacagcuacuucaccgagcagccgaucgaccuggugcccaaccagcccuaccccaacgccuccagcgacaacuucaaguucgucugcgacaacaucaaguucgccgacgaccucaaccagcugacgggguacaagaagccggcgucccgcgagcugaaggugaccuucuuccccgaccucaacggcgacguggucgccaucgacuacaagcacuacacccccagcuucaagaagggcgccaagcugcugcacaagcccaucguguggcacgugaacaacgccaccaacaaggcgacguacaagccgaacaccuggugcauccggugccucugguccaccaagcccgucgagaccagcaacuccuucgacgugcugaagagcgaggacgcccaggggauggacaaccuggccugcgaggaccucaagcccguguccgaggaggucguggagaaccccacgauccagaaggacgugcuggagugcaacgucaagaccaccgagguggugggcgacaucauccugaagccggccaacaacagccucaagaucaccgaggaggucgggcacacggaccugauggccgcguacguggacaacuccagccugaccaucaagaagcccaacgagcucucccgcgugcugggccugaagacccucgccacccacgggcuggccgccgucaacagcgugcccugggacacgaucgccaacuacgcgaagccguuccugaacaagguggucuccaccaccaccaacaucgugacgcgcugccucaaccgggugugcaccaacuacaugcccuacuucuucacccugcugcuccagcugugcaccuucacccgcagcacgaacucccggaucaaggccagcaugcccaccaccaucgccaagaacaccgucaagagcgugggcaaguucugccuggaggccuccuucaacuaccucaagagccccaacuucuccaagcugaucaacaucaucaucugguuccugcuccugagcgugugccugggcucccucaucuacagcacggccgcgcuggggguccugauguccaaccucggcaugccgagcuacugcaccggguaccgcgagggcuaccugaacuccaccaacgugaccaucgccacguacugcaccggcagcauccccugcuccgugugccugagcgggcucgacucccuggacaccuaccccagccuggagaccauccagaucacgaucuccagcuucaagugggaccucaccgccuucggccuggucgccgagugguuccuggccuacauccucuucacccgguucuucuacgugcuggggcuggcggccaucaugcagcucuucuucuccuacuucgccgugcacuucaucagcaacuccuggcugauguggcugaucaucaaccugguccagauggcccccaucagcgcgauggugcgcauguacaucuucuucgccagcuucuacuacguguggaaguccuacguccacgugguggacggcugcaacagcuccaccugcaugaugugcuacaagcggaaccgcgccacgcgggucgagugcaccaccaucgugaacgggguccgccggagcuucuacguguacgccaacggcggcaagggguucugcaagcuccacaacuggaacugcgugaacugcgacaccuucugcgccggcuccacguucaucagcgacgaggucgcgcgcgaccugucccugcaguucaagcggccgaucaaccccaccgaccagagcuccuacaucguggacagcgugaccgucaagaacggguccauccaccucuacuucgacaaggccggccagaagaccuacgagcgccacagccugucccacuucgugaaccuggacaaccuccgggccaacaacacgaaggggagccugcccaucaacgugaucgucuucgacggcaaguccaagugcgaggagagcuccgccaagagcgccuccguguacuacagccagcugaugugccagcccauccuccugcuggaccaggcgcucgugagcgacgucggcgacuccgccgagguggccgugaagauguucgacgccuacgucaacaccuucagcuccaccuucaacgugccgauggagaagcugaagacccugguggccacggcggaggccgagcucgccaagaacgucagccuggacaacgugcuguccaccuucaucagcgccgcgcgccagggguucguggacuccgacgucgagaccaaggacgugguggagugccucaagcugagccaccaguccgacaucgaggucaccggcgacagcugcaacaacuacaugcugacguacaacaagguggagaacaugaccccccgggaccucggggccugcaucgacugcuccgcccgccacaucaacgcccagguggccaagagccacaacaucgcgcugaucuggaacgucaaggacuucaugucccugagcgagcagcuccggaagcagauccgcuccgccgccaagaagaacaaccugcccuucaagcugaccugcgccaccacgcgccagguggugaacgucgugaccaccaagaucgcccucaagggcgggugaggacuagucccuguucccagagcccacuuuuuuuucuuuuuuugaaauaaaauagccugucuuucagaucucaaaggcucuuuucagagccaccaaaaaaaaaaaaaaaaaaaaaaaaaaaaaaaaaaaaaaaaaaaaaaaaaaaaaaaaaaaaaaaaaaaaaaaaaaaaaaaaaaaaaaaaaaaaaaaaaaaaa

SEQ ID NO: 19746 - RNA, 6113 nt, Artificial Sequence
  SARS-CoV-2__MT811483.1__non-structural protein 3 (NSP3) mRNA gc
aggagagucccgcagucggcguccagcggcucugcuuguucgugugugugucguugcaggccuuauucaagcuuaccauggcccccaccaaggugaccuucggcgacgacacggucaucgaggugcagggguacaagagcgugaacaucaccuucgagcuggacgagcgcaucgacaagguccucaacgagaagugcuccgccuacaccguggagcugggcaccgaggugaacgaguucgcgugcgucguggccgacgccgugaucaagacgcugcagccggucagcgagcuccugaccccccuggggaucgaccucgacgagugguccauggccaccuacuaccuguucgacgagagcggcgaguucaagcuggccucccacauguacugcagcuucuacccccccgacgaggacgaggaggagggggacugcgaggaggaggaguucgagccguccacccaguacgaguacggcacggaggacgacuaccagggcaagccccucgaguucggggcgaccagcgccgcccugcagcccgaggaggagcaggaggaggacuggcuggacgacgacucccagcagaccgugggccagcaggacgggagcgaggacaaccagaccacgaccauccagaccaucguggagguccagccccagcucgagauggagcugaccccgguggugcagacgaucgaggucaacuccuucagcggcuaccugaagcucaccgacaacguguacaucaagaacgccgacaucguggaggaggcgaagaaggucaagcccaccgugguggucaacgccgccaacguguaccugaagcacgggggcggcguggccggggcccugaacaaggcgaccaacaacgccaugcaggucgaguccgacgacuacaucgccacgaacggcccccucaagguggggggcagcugcguccuguccggccacaaccuggccaagcacugccuccacgugguggggcccaacgucaacaagggcgaggacauccagcugcugaagagcgccuacgagaacuucaaccagcacgaggugcuccuggcgccgcugcucuccgccgggaucuucggcgccgaccccauccacagccugcgggugugcgucgacaccgugcgcaccaacguguaccuggccgucuucgacaagaaccucuacgacaagcugguguccagcuuccuggagaugaagagcgagaagcagguggagcagaagaucgccgagauccccaaggaggaggucaagcccuucaucaccgaguccaagccgagcguggagcagcggaagcaggacgacaagaagaucaaggcgugcguggaggaggucacgaccacccucgaggagaccaaguuccugacggagaaccugcuccuguacaucgacaucaacgggaaccugcaccccgacuccgccacccucgugagcgacaucgacaucaccuuccugaagaaggacgcccccuacaucgugggcgacgucgugcaggagggcgugcugaccgccgucgugauccccacgaagaaggccgggggcaccaccgagaugcucgcgaaggcccugcgcaaggugccgaccgacaacuacaucacgaccuaccccgggcagggccugaacggguacaccgucgaggaggccaagaccgugcucaagaagugcaaguccgccuucuacauccugcccagcaucaucuccaacgagaagcaggagauccugggcaccgugagcuggaaccuccgggagaugcuggcgcacgccgaggagacgcgcaagcugaugcccgucugcguggagaccaaggccaucguguccaccauccagcggaaguacaagggcaucaagauccaggagggggucguggacuacggcgcccgcuucuacuucuacaccagcaagacgaccguggccucccugaucaacacccucaacgaccugaacgagacccuggucacgaugccgcucggguacgugacccacggccugaaccuggaggaggcggcccgguacaugcgcagccucaaggugcccgccaccgucuccgugagcucccccgacgccgugaccgccuacaacggguaccugacgagcuccagcaagacccccgaggagcacuucaucgagaccaucucccuggcgggcagcuacaaggacuggagcuacuccggccagagcacccagcucgggaucgaguuccugaagcggggcgacaaguccgucuacuacacgagcaacccgaccaccuuccaccuggacggggaggugaucaccuucuacaaccucaagacgcugcugucccuccgcgaggugcggaccaucaaggucuucaccaccguggacaacaucaaccugcacacgcagguggucgacaugagcaugaccuacggccagcaguucggccccaccuaccuggacggggccgacgugaccaagaucaagccccacaacucccacgagggcaagacguucuacgugcucccgaacgacgacacccugcgcgucgaggccuucgaguacuaccacaccaccgaccccagcuuccuggggcgguacauguccgcccucaaccacacgaagaaguggaaguacccccaggugaacggccugaccagcaucaagugggccgacaacaacugcuaccuggcgaccgcccuccugacccugcagcagaucgagcucaaguucaaccccccggcccugcaggacgccuacuaccgcgcgcgggccggggaggccgccaacuucugcgcccugauccucgcguacugcaacaagacggugggcgagcugggcgacguccgcgagaccauguccuaccuguuccagcacgccaaccucgacagcugcaagcgggugcugaacgucgugugcaagaccugcgggcagcagcagaccacccugaagggcguggaggccgucauguacauggggacgcucuccuacgagcaguucaagaagggcgugcagauccccugcaccugcgggaagcaggccaccaaguaccuggugcagcaggagagccccuucgucaugauguccgcccccccggcgcaguacgagcugaagcacggcaccuucacgugcgccagcgaguacaccggcaacuaccagugcgggcacuacaagcacaucaccuccaaggagacccucuacugcaucgacggcgcccugcugacgaagagcagcgaguacaaggggcccaucaccgacguguucuacaaggagaacuccuacaccaccacgaucaagcccgugaccuacaagcucgacggcgucgugugcaccgagaucgaccccaagcuggacaacuacuacaagaaggacaacagcuacuucaccgagcagccgaucgaccuggugcccaaccagcccuaccccaacgccuccuucgacaacuucaaguucgucugcgacaacaucaaguucgccgacgaccucaaccagcugacgggguacaagaagccggcgagccgcgagcugaaggugaccuucuuccccgaccucaacggcgacguggucgccaucgacuacaagcacuacacccccuccuucaagaagggcgccaagcugcugcacaagcccaucguguggcacgugaacaacgccaccaacaaggcgacguacaagccgaacaccuggugcauccggugccucuggagcaccaagcccgucgagaccuccaacagcuucgacgugcugaaguccgaggacgcccaggggauggacaaccuggccugcgaggaccucaagcccgugagcgaggaggucguggagaaccccacgauccagaaggacgugcuggagugcaacgucaagaccaccgagguggugggcgacaucauccugaagccggccaacaacucccucaagaucaccgaggaggucgggcacacggaccugauggccgcguacguggacaacagcucccugaccaucaagaagcccaacgagcucagccgcgugcugggccugaagacccucgccacccacgggcuggccgccgucaacuccgugcccugggacacgaucgccaacuacgcgaagccguuccugaacaagguggucagcaccaccaccaacaucgugacgcgcugccucaaccgggugugcaccaacuacaugcccuacuucuucacccugcugcuccagcugugcaccuucacccgcuccacgaacagccggaucaaggccuccaugcccaccaccaucgccaagaacaccgucaagagcgugggcaaguucugccuggaggccagcuucaacuaccucaagucccccaacuucagcaagcugaucaacaucaucaucugguuccugcuccuguccgugugccugggcagccucaucuacuccacggccgcgcuggggguccugaugagcaaccucggcaugccguccuacugcaccggguaccgcgagggcuaccugaacagcaccaacgugaccaucgccacguacugcaccggcuccauccccugcagcgugugccuguccgggcucgacagccuggacaccuaccccucccuggagaccauccagaucacgaucagcuccuucaagugggaccucaccgccuucggccuggucgccgagugguuccuggccuacauccucuucacccgguucuucuacgugcuggggcuggcggccaucaugcagcucuucuucagcuacuucgccgugcacuucaucuccaacagcuggcugauguggcugaucaucaaccugguccagauggcccccaucuccgcgauggugcgcauguacaucuucuucgccagcuucuacuacguguggaagagcuacguccacgugguggacggcugcaacuccagcaccugcaugaugugcuacaagcggaaccgcgccacgcgggucgagugcaccaccaucgugaacgggguccgccgguccuucuacguguacgccaacggcggcaagggguucugcaagcuccacaacuggaacugcgugaacugcgacaccuucugcgccggcagcacguucaucuccgacgaggucgcgcgcgaccugagccugcaguucaagcggccgaucaaccccaccgaccaguccagcuacaucguggacuccgugaccgucaagaacgggagcauccaccucuacuucgacaaggccggccagaagaccuacgagcgccacucccugagccacuucgugaaccuggacaaccuccgggccaacaacacgaaggggucccugcccaucaacgugaucgucuucgacggcaagagcaagugcgaggaguccagcgccaaguccgccagcguguacuacucccagcugaugugccagcccauccuccugcuggaccaggcgcucgugagcgacgucggcgacagcgccgagguggccgugaagauguucgacgccuacgucaacaccuucuccagcaccuucaacgugccgauggagaagcugaagacccugguggccacggcggaggccgagcucgccaagaacgucucccuggacaacgugcugagcaccuucaucuccgccgcgcgccagggguucguggacagcgacgucgagaccaaggacgugguggagugccucaagcugucccaccagagcgacaucgaggucaccggcgacuccugcaacaacuacaugcugacguacaacaagguggagaacaugaccccccgggaccucggggccugcaucgacugcagcgcccgccacaucaacgcccagguggccaagucccacaacaucgcgcugaucuggaacgucaaggacuucaugagccuguccgagcagcuccggaagcagauccgcagcgccgccaagaagaacaaccugcccuucaagcugaccugcgccaccacgcgccagguggugaacgucgugaccaccaagaucgcccucaagggcgggugaggacuagucccuguucccagagcccacuuuuuuuucuuuuuuugaaauaaaauagccugucuuucagaucucaaaggcucuuuucagagccaccaaaaaaaaaaaaaaaaaaaaaaaaaaaaaaaaaaaaaaaaaaaaaaaaaaaaaaaaaaaaaaaaaaaaaaaaaaaaaaaaaaaaaaaaaaaaaaaaaaaaa

SEQ ID NO: 19747 - RNA, 6113 nt, Artificial Sequence
  SARS-CoV-2__MT811485.1__non-structural protein 3 (NSP3) mRNA gc
aggagagucccgcagucggcguccagcggcucugcuuguucgugugugugucguugcaggccuuauucaagcuuaccauggcccccaccaaggugaccuucggcgacgacacggucaucgaggugcagggguacaagagcgugaacaucaccuucgagcuggacgagcgcaucgacaagguccucaacgagaagugcuccgccuacaccguggagcugggcaccgaggugaacgaguucgcgugcgucguggccgacgccgugaucaagacgcugcagccggucagcgagcuccugaccccccuggggaucgaccucgacgagugguccauggccaccuacuaccuguucgacgagagcggcgaguucaagcuggccucccacauguacugcagcuucuacccccccgacgaggacgaggaggagggggacugcgaggaggaggaguucgagccguccacccaguacgaguacggcacggaggacgacuaccagggcaagccccucgaguucggggcgaccagcgccgcccugcagcccgaggaggagcaggaggaggacuggcuggacgacgacucccagcagaccgugggccagcaggacgggagcgaggacaaccagaccacgaccauccagaccaucguggagguccagccccagcucgagauggagcugaccccgguggugcagacgaucgaggucaacuccuucagcggcuaccugaagcucaccgacaacguguacaucaagaacgccgacaucguggaggaggcgaagaaggucaagcccaccgugguggucaacgccgccaacguguaccugaagcacgggggcggcguggccggggcccugaacaaggcgaccaacaacgccaugcaggucgaguccgacgacuacaucgccacgaacggcccccucaagguggggggcagcugcguccuguccggccacaaccuggccaagcacugccuccacgugguggggcccaacgucaacaagggcgaggacauccagcugcugaagagcgccuacgagaacuucaaccagcacgaggugcuccuggcgccgcugcucuccgccgggaucuucggcgccgaccccauccacagccugcgggugugcgucgacaccgugcgcaccaacguguaccuggccgucuucgacaagaaccucuacgacaagcugguguccagcuuccuggagaugaagagcgagaagcagguggagcagaagaucgccgagauccccaaggaggaggucaagcccuucaucaccgaguccaagccgagcguggagcagcggaagcaggacgacaagaagaucaaggcgugcguggaggaggucacgaccacccucgaggagaccaaguuccugacggagaaccugcuccuguacaucgacaucaacgggaaccugcaccccgacuccgccacccucgugagcgacaucgacaucaccuuccugaagaaggacgcccccuacaucgugggcgacgucgugcaggagggcgugcugaccgccgucgugauccccacgaagaaggccgggggcaccaccgagaugcucgcgaaggcccugcgcaaggugccgaccgacaacuacaucacgaccuaccccgggcagggccugaacggguacaccgucgaggaggccaagaccgugcucaagaagugcaaguccgccuucuacauccugcccagcaucaucuccaacgagaagcaggagauccugggcaccgugagcuggaaccuccgggagaugcuggcgcacgccgaggagacgcgcaagcugaugcccgucugcguggagaccaaggccaucguguccaccauccagcggaaguacaagggcaucaagauccaggagggggucguggacuacggcgcccgcuucuacuucuacaccagcaagacgaccguggccucccugaucaacacccucaacgaccugaacgagacccuggucacgaugccgcucggguacgugacccacggccugaaccuggaggaggcggcccgguacaugcgcagccucaaggugcccgccaccgucuccgugagcucccccgacgccgugaccgccuacaacggguaccugacgagcuccagcaagacccccgaggagcacuucaucgagaccaucucccuggcgggcagcuacaaggacuggagcuacuccggccagagcacccagcucgggaucgaguuccugaagcggggcgacaaguccgucuacuacacgagcaacccgaccaccuuccaccuggacggggaggugaucaccuucgacaaccucaagacgcugcugucccuccgcgaggugcggaccaucaaggucuucaccaccguggacaacaucaaccugcacacgcagguggucgacaugagcaugaccuacggccagcaguucggccccaccuaccuggacggggccgacgugaccaagaucaagccccacaacucccacgagggcaagacguucuacgugcucccgaacgacgacacccugcgcgucgaggccuucgaguacuaccacaccaccgaccccagcuuccuggggcgguacauguccgcccucaaccacacgaagaaguggaaguacccccaggugaacggccugaccagcaucaagugggccgacaacaacugcuaccuggcgaccgcccuccugacccugcagcagaucgagcucaaguucaaccccccggcccugcaggacgccuacuaccgcgcgcgggccggggaggccgccaacuucugcgcccugauccucgcguacugcaacaagacggugggcgagcugggcgacguccgcgagaccauguccuaccuguuccagcacgccaaccucgacagcugcaagcgggugcugaacgucgugugcaagaccugcgggcagcagcagaccacccugaagggcguggaggccgucauguacauggggacgcucuccuacgagcaguucaagaagggcgugcagauccccugcaccugcgggaagcaggccaccaaguaccuggugcagcaggagagccccuucgucaugauguccgcccccccggcgcaguacgagcugaagcacggcaccuucacgugcgccagcgaguacaccggcaacuaccagugcgggcacuacaagcacaucaccuccaaggagacccucuacugcaucgacggcgcccugcugacgaagagcagcgaguacaaggggcccaucaccgacguguucuacaaggagaacuccuacaccaccacgaucaagcccgugaccuacaagcucgacggcgucgugugcaccgagaucgaccccaagcuggacaacuacuacaagaaggacaacagcuacuucaccgagcagccgaucgaccuggugcccaaccagcccuaccccaacgccuccuucgacaacuucaaguucgucugcgacaacaucaaguucgccgacgaccucaaccagcugacgggguacaagaagccggcgagccgcgagcugaaggugaccuucuuccccgaccucaacggcgacguggucgccaucgacuacaagcacuacacccccuccuucaagaagggcgccaagcugcugcacaagcccaucguguggcacgugaacaacgccaccaacaaggcgacguacaagccgaacaccuggugcauccggugccucuggagcaccaagcccgucgagaccuccaacagcuucgacgugcugaaguccgaggacgcccaggggauggacaaccuggccugcgaggaccucaagcccgugagcgaggaggucgugaagaaccccacgauccagaaggacgugcuggagugcaacgucaagaccaccgagguggugggcgacaucauccugaagccggccaacaacucccucaagaucaccgaggaggucgggcacacggaccugauggccgcguacguggacaacagcucccugaccaucaagaagcccaacgagcucagccgcgugcugggccugaagacccucgccacccacgggcuggccgccgucaacuccgugcccugggacacgaucgccaacuacgcgaagccguuccugaacaagguggucagcaccaccaccaacaucgugacgcgcugccucaaccgggugugcaccaacuacaugcccuacuucuucacccugcugcuccagcugugcaccuucacccgcuccacgaacagccggaucaaggccuccaugcccaccaccaucgccaagaacaccgucaagagcgugggcaaguucugccuggaggccagcuucaacuaccucaagucccccaacuucagcaagcugaucaacaucaucaucugguuccugcuccuguccgugugccugggcagccucaucuacuccacggccgcgcuggggguccugaugagcaaccucggcaugccguccuacugcaccggguaccgcgagggcuaccugaacagcaccaacgugaccaucgccacguacugcaccggcuccauccccugcagcgugugccuguccgggcucgacagccuggacaccuaccccucccuggagaccauccagaucacgaucagcuccuucaagugggaccucaccgccuucggccuggucgccgagugguuccuggccuacauccucuucacccgguucuucuacgugcuggggcuggcggccaucaugcagcucuucuucagcuacuucgccgugcacuucaucuccaacagcuggcugauguggcugaucaucaaccugguccagauggcccccaucuccgcgauggugcgcauguacaucuucuucgccagcuucuacuacguguggaagagcuacguccacgugguggacggcugcaacuccagcaccugcaugaugugcuacaagcggaaccgcgccacgcgggucgagugcaccaccaucgugaacgggguccgccgguccuucuacguguacgccaacggcggcaagggguucugcaagcuccacaacuggaacugcgugaacugcgacaccuucugcgccggcagcacguucaucuccgacgaggucgcgcgcgaccugagccugcaguucaagcggccgaucaaccccaccgaccaguccagcuacaucguggacuccgugaccgucaagaacgggagcauccaccucuacuucgacaaggccggccagaagaccuacgagcgccacucccugagccacuucgugaaccuggacaaccuccgggccaacaacacgaaggggucccugcccaucaacgugaucgucuucgacggcaagagcaagugcgaggaguccagcgccaaguccgccagcguguacuacucccagcugaugugccagcccauccuccugcuggaccaggcgcucgugagcgacgucggcgacagcgccgagguggccgugaagauguucgacgccuacgucaacaccuucuccagcaccuucaacgugccgauggagaagcugaagacccugguggccacggcggaggccgagcucgccaagaacgucucccuggacaacgugcugagcaccuucaucuccgccgcgcgccagggguucguggacagcgacgucgagaccaaggacgugguggagugccucaagcugucccaccagagcgacaucgaggucaccggcgacuccugcaacaacuacaugcugacguacaacaagguggagaacaugaccccccgggaccucggggccugcaucgacugcagcgcccgccacaucaacgcccagguggccaagucccacaacaucgcgcugaucuggaacgucaaggacuucaugagccuguccgagcagcuccggaagcagauccgcagcgccgccaagaagaacaaccugcccuucaagcugaccugcgccaccacgcgccagguggugaacgucgugaccaccaagaucgcccucaagggcgggugaggacuagucccuguucccagagcccacuuuuuuuucuuuuuuugaaauaaaauagccugucuuucagaucucaaaggcucuuuucagagccaccaaaaaaaaaaaaaaaaaaaaaaaaaaaaaaaaaaaaaaaaaaaaaaaaaaaaaaaaaaaaaaaaaaaaaaaaaaaaaaaaaaaaaaaaaaaaaaaaaaaaa

SEQ ID NO: 19748 - RNA, 6113 nt, Artificial Sequence
  SARS-CoV-2__MT811487.1__non-structural protein 3 (NSP3) mRNA gc
aggagagucccgcagucggcguccagcggcucugcuuguucgugugugugucguugcaggccuuauucaagcuuaccauggcccccaccaaggugaccuucggcgacgacacggucaucgaggugcagggguacaagagcgugaacaucaccuucgagcuggacgagcgcaucgacaagguccucaacgagaagugcuccgccuacaccguggagcugggcaccgaggugaacgaguucgcgugcgucguggccgacgccgugaucaagacgcugcagccggucagcgagcuccugaccccccuggggaucgaccucgacgagugguccauggccaccuacuaccuguucgacgagagcggcgaguucaagcuggccucccacauguacugcagcuucuacccccccgacgaggacgaggaggagggggacugcgaggaggaggaguucgagccguccacccaguacgaguacggcacggaggacgacuaccagggcaagcccagcgaguucggggcgaccuccgccgcccuccagcccgaggaggagcaggaggaggacuggcuggacgacgacagccagcagaccgugggccagcaggacggguccgaggacaaccagaccacgaccauccagaccaucguggagguccagccccagcuggagauggagcucaccccgguggugcagacgaucgaggucaacagcuucuccggcuaccugaagcugaccgacaacguguacaucaagaacgccgacaucguggaggaggcgaagaaggucaagcccaccgugguggucaacgccgccaacguguaccucaagcacgggggcggcguggccggggcccugaacaaggcgaccaacaacgccaugcaggucgagagcgacgacuacaucgccacgaacggcccccugaagguggggggcuccugcguccucagcggccacaaccuggccaagcacugccugcacgugguggggcccaacgucaacaagggcgaggacauccagcuccugaaguccgccuacgagaacuucaaccagcacgaggugcugcucgcgccgcugcugagcgccgggaucuucggcgccgaccccauccacucccuccgggugugcgucgacaccgugcgcaccaacguguaccuggccgucuucgacaagaaccuguacgacaagcucgugagcagcuuccuggagaugaaguccgagaagcagguggagcagaagaucgccgagauccccaaggaggaggucaagcccuucaucaccgagagcaagccguccguggagcagcggaagcaggacgacaagaagaucaaggcgugcguggaggaggucacgaccacccuggaggagaccaaguuccucacggagaaccugcugcucuacaucgacaucaacgggaaccugcaccccgacagcgccacccugguguccgacaucgacaucaccuuccucaagaaggacgcccccuacaucgugggcgacgucgugcaggagggcgugcugaccgccgucgugauccccacgaagaaggccgggggcaccaccgagaugcuggcgaaggcccuccgcaaggugccgaccgacaacuacaucacgaccuaccccgggcagggccugaacggguacaccgucgaggaggccaagaccgugcugaagaagugcaagagcgccuucuacauccuccccuccaucaucagcaacgagaagcaggagauccugggcaccguguccuggaaccugcgggagaugcucgcgcacgccgaggagacgcgcaagcugaugcccgucugcguggagaccaaggccaucgugagcaccauccagcggaaguacaagggcaucaagauccaggagggggucguggacuacggcgcccgcuucuacuucuacaccuccaagacgaccguggccagccugaucaacacccugaacgaccucaacgagacccuggucacgaugccgcugggguacgugacccacggccucaaccuggaggaggcggcccgguacaugcgcucccugaaggugcccgccaccgucagcguguccagccccgacgccgugaccgccuacaacggguaccucacguccagcuccaagacccccgaggagcacuucaucgagaccaucagccuggcgggcagcuacaaggacugguccuacagcggccaguccacccagcuggggaucgaguuccucaagcggggcgacaagagcgucuacuacacguccaacccgaccaccuuccaccuggacggggaggugaucaccuucgacaaccugaagacgcuccugagccugcgcgaggugcggaccaucaaggucuucaccaccguggacaacaucaaccuccacacgcagguggucgacauguccaugaccuacggccagcaguucggccccaccuaccuggacggggccgacgugaccaagaucaagccccacaacagccacgagggcaagacguucuacgugcugccgaacgacgacacccuccgcgucgaggccuucgaguacuaccacaccaccgaccccuccuuccuggggcgguacaugagcgcccugaaccacacgaagaaguggaaguacccccaggugaacggccucaccuccaucaagugggccgacaacaacugcuaccuggcgaccgcccugcucacccugcagcagaucgagcugaaguucaaccccccggcccuccaggacgccuacuaccgcgcgcgggccggggaggccgccaacuucugcgcccugauccuggcguacugcaacaagacggugggcgagcucggcgacguccgcgagaccaugagcuaccuguuccagcacgccaaccuggacuccugcaagcgggugcucaacgucgugugcaagaccugcgggcagcagcagaccacccugaagggcguggaggccgucauguacauggggacgcugagcuacgagcaguucaagaagggcgugcagauccccugcaccugcgggaagcaggccaccaaguaccucgugcagcaggagucccccuucgucaugaugagcgcccccccggcgcaguacgagcugaagcacggcaccuucacgugcgccuccgaguacaccggcaacuaccagugcgggcacuacaagcacaucaccagcaaggagacccuguacugcaucgacggcgcccuccugacgaagagcuccgaguacaaggggcccaucaccgacguguucuacaaggagaacagcuacaccaccacgaucaagcccgugaccuacaagcuggacggcgucgugugcaccgagaucgaccccaagcucgacaacuacuacaagaaggacaacuccuacuucaccgagcagccgaucgaccuggugcccaaccagcccuaccccaacgccagcuucgacaacuucaaguucgucugcgacaacaucaaguucgccgacgaccugaaccagcucacgggguacaagaagccggcgucccgcgagcugaaggugaccuucuuccccgaccugaacggcgacguggucgccaucgacuacaagcacuacacccccagcuucaagaagggcgccaagcuccugcacaagcccaucguguggcacgugaacaacgccaccaacaaggcgacguacaagccgaacaccuggugcauccggugccugugguccaccaagcccgucgagaccagcaacuccuucgacgugcucaagagcgaggacgcccaggggauggacaaccuggccugcgaggaccugaagcccguguccgaggaggucguggagaaccccacgauccagaaggacgugcucgagugcaacgucaagaccaccgagguggugggcgacaucauccugaagccggccaacaacagccugaagaucaccgaggaggucgggcacacggaccucauggccgcguacguggacaacuccagccugaccaucaagaagcccaacgagcugucccgcgugcucggccugaagacccuggccacccacgggcucgccgccgucaacagcgugcccugggacacgaucgccaacuacgcgaagccguuccugaacaagguggucuccaccaccaccaacaucgugacgcgcugccugaaccgggugugcaccaacuacaugcccuacuucuucacccuccugcugcagcucugcaccuucacccgcagcacgaacucccggaucaaggccagcaugcccaccaccaucgccaagaacaccgucaagagcgugggcaaguucugccuggaggccuccuucaacuaccugaagagccccaacuucuccaagcucaucaacaucaucaucugguuccugcugcucagcgugugccugggcucccugaucuacagcacggccgcgcucgggguccugauguccaaccugggcaugccgagcuacugcaccggguaccgcgagggcuaccucaacuccaccaacgugaccaucgccacguacugcaccggcagcauccccugcuccgugugccugagcgggcuggacucccucgacaccuaccccagccuggagaccauccagaucacgaucuccagcuucaagugggaccugaccgccuucggccucgucgccgagugguuccuggccuacauccuguucacccgguucuucuacgugcucgggcuggcggccaucaugcagcuguucuucuccuacuucgccgugcacuucaucagcaacuccuggcucauguggcugaucaucaaccugguccagauggcccccaucagcgcgauggugcgcauguacaucuucuucgccagcuucuacuacguguggaaguccuacguccacgugguggacggcugcaacagcuccaccugcaugaugugcuacaagcggaaccgcgccacgcgggucgagugcaccaccaucgugaacgggguccgccggagcuucuacguguacgccaacggcggcaagggguucugcaagcugcacaacuggaacugcgugaacugcgacaccuucugcgccggcuccacguucaucagcgacgaggucgcgcgcgaccucucccugcaguucaagcggccgaucaaccccaccgaccagagcuccuacaucguggacagcgugaccgucaagaacggguccauccaccuguacuucgacaaggccggccagaagaccuacgagcgccacagccucucccacuucgugaaccuggacaaccugcgggccaacaacacgaaggggagccuccccaucaacgugaucgucuucgacggcaaguccaagugcgaggagagcuccgccaagagcgccuccguguacuacagccagcugaugugccagcccauccugcuccuggaccaggcgcuggugagcgacgucggcgacuccgccgagguggccgugaagauguucgacgccuacgucaacaccuucagcuccaccuucaacgugccgauggagaagcucaagacccugguggccacggcggaggccgagcuggccaagaacgucagccucgacaacgugcuguccaccuucaucagcgccgcgcgccagggguucguggacuccgacgucgagaccaaggacgugguggagugccugaagcucagccaccaguccgacaucgaggucaccggcgacagcugcaacaacuacaugcugacguacaacaagguggagaacaugaccccccgggaccugggggccugcaucgacugcuccgcccgccacaucaacgcccagguggccaagagccacaacaucgcgcucaucuggaacgucaaggacuucaugucccugagcgagcagcugcggaagcagauccgcuccgccgccaagaagaacaaccuccccuucaagcugaccugcgccaccacgcgccagguggugaacgucgugaccaccaagaucgcccugaagggcgggugaggacuagucccuguucccagagcccacuuuuuuuucuuuuuuugaaauaaaauagccugucuuucagaucucaaaggcucuuuucagagccaccaaaaaaaaaaaaaaaaaaaaaaaaaaaaaaaaaaaaaaaaaaaaaaaaaaaaaaaaaaaaaaaaaaaaaaaaaaaaaaaaaaaaaaaaaaaaaaaaaaaaa

SEQ ID NO: 19749 - RNA, 6113 nt, Artificial Sequence
  SARS-CoV-2__MT811489.1__non-structural protein 3 (NSP3) mRNA gc
aggagagucccgcagucggcguccagcggcucugcuuguucgugugugugucguugcaggccuuauucaagcuuaccauggcccccaccaaggugaccuucggcgacgacacggucaucgaggugcagggguacaagagcgugaacaucaccuucgagcuggacgagcgcaucgacaagguccucaacgagaagugcuccgccuacaccguggagcugggcaccgaggugaacgaguucgcgugcgucguggccgacgccgugaucaagacgcugcagccggucagcgagcuccugaccccccuggggaucgaccucgacgagugguccauggccaccuacuaccuguucgacgagagcggcgaguucaagcuggccucccacauguacugcagcuucuacccccccgacgaggacgaggaggagggggacugcgaggaggaggaguucgagccguccacccaguacgaguacggcacggaggacgacuaccagggcaagccccucgaguucggggcgaccagcgccgcccugcagcccgaggaggagcaggaggaggacuggcuggacgacgacucccagcagaccgugggccagcaggacgggagcgaggacaaccagaccacgaccauccagaccaucguggagguccagccccagcucgagauggagcugaccccgguggugcagacgaucgaggucaacuccuucagcggcuaccugaagcucaccgacaacguguacaucaagaacgccgacaucguggaggaggcgaagaaggucaagcccaccgugguggucaacgccgccaacguguaccugaagcacgggggcggcguggccggggcccugaacaaggcgaccaacaacgccaugcaggucgaguccgacgacuacaucgccacgaacggcccccucaagguggggggcagcugcguccuguccggccacaaccuggccaagcacugccuccacgugguggggcccaacgucaacaagggcgaggacauccagcugcugaagagcgccuacgagaacuucaaccagcacgaggugcuccuggcgccgcugcucuccgccgggaucuucggcgccgaccccauccacagccugcgggugugcgucgacaccgugcgcaccaacguguaccuggccgucuucgacaagaaccucuacgacaagcugguguccagcuuccuggagaugaagagcgagaagcagguggagcagaagaucgccgagauccccaaggaggaggucaagcccuucaucaccgaguccaagccgagcguggagcagcggaagcaggacgacaagaagaucaaggcgugcguggaggaggucacgaccacccucgaggagaccaaguuccugacggagaaccugcuccuguacaucgacaucaacgggaaccugcaccccgacuccgccacccucgugagcgacaucgacaucaccuuccugaagaaggacgcccccuacaucgugggcgacgucgugcaggagggcgugcugaccgccgucgugauccccacgaagaaggccgggggcaccaccgagaugcucgcgaaggcccugcgcaaggugccgaccgacaacuacaucacgaccuaccccgggcagggccugaacggguacaccgucgaggaggccaagaccgugcucaagaagugcaaguccgccuucuacauccugcccagcaucaucuccaacgagaagcaggagauccugggcaccgugagcuggaaccuccgggagaugcuggcgcacgccgaggagacgcgcaagcugaugcccgucugcguggagaccaaggccaucguguccaccauccagcggaaguacaagggcaucaagauccaggagggggucguggacuacggcgcccgcuucuacuucuacaccagcaagacgaccguggccucccugaucaacacccucaacgaccugaacgagacccuggucacgaugccgcucggguacgugacccacggccugaaccuggaggaggcggcccgguacaugcgcagccucaaggugcccgccaccgucuccgugagcucccccgacgccgugaccgccuacaacggguaccugacgagcuccagcaagacccccgaggagcacuucaucgagaccaucucccuggcgggcagcuacaaggacuggagcuacuccggccagagcacccagcucgggaucgaguuccugaagcggggcgacaaguccgucuacuacacgagcaacccgaccaccuuccaccuggacggggaggugaucaccuucgacaaccucaagacgcugcugucccuccgcgaggugcggaccaucaaggucuucaccaccguggacaacaucaaccugcacacgcagguggucgacaugagcaugaccuacggccagcaguucggccccaccuaccuggacggggccgacgugaccaagaucaagccccacaacucccacgagggcaagacguucuacgugcucccgaacgacgacacccugcgcgucgaggccuucgaguacuaccacaccaccgaccccagcuuccuggggcgguacauguccgcccucaaccacacgaagaaguggaaguacccccaggugaacggccugaccagcaucaagugggccgacaacaacugcuaccuggcgaccgcccuccugacccugcagcagaucgagcucaaguucaaccccccggcccugcaggacgccuacuaccgcgcgcgggccggggaggccgccaacuucugcgcccugauccucgcguacugcaacaagacggugggcgagcugggcgacguccgcgagaccauguccuaccuguuccagcacgccaaccucgacagcugcaagcgggugcugaacgucgugugcaagaccugcgggcagcagcagaccacccugaagggcguggaggccgucauguacauggggacgcucuccuacgagcaguucaagaagggcgugcagauccccugcaccugcgggaagcaggccaccaaguaccuggugcagcaggagagccccuucgucaugauguccgcccccccggcgcaguacgagcugaagcacggcaccuucacgugcgccagcgaguacaccggcaacuaccagugcgggcacuacaagcacaucaccuccaaggagacccucuacugcaucgacggcgcccugcugacgaagagcagcgaguacaaggggcccaucaccgacguguucuacaaggagaacuccuacaccaccacgaucaagcccgugaccuacaagcucgacggcgucgugugcaccgagaucgaccccaagcuggacaacuacuacaagaaggacaacagcuacuucaccgagcagccgaucgaccuggugcccaaccagcccuaccccaacgccuccuucgacaacuucaaguucgucugcgacaacaucaaguucgccgacgaccucaaccagcugacgggguacaagaagccggcgagccgcgagcugaaggugaccuucuuccccgaccucaacggcgacguggucgccaucgacuacaagcacuacacccccuccuucaagaagggcgccaagcugcugcacaagcccaucguguggcacgugaacaacgccaccaacaaggcgacguacaagccgaacaccuggugcauccggugccucuggagcaccaagcccgucgagaccuccaacagcuucgacgugcugaaguccgagggggcccagggcauggacaaccuggccugcgaggaccucaagcccgugagcgaggaggucguggagaaccccacgauccagaaggacgugcuggagugcaacgucaagaccaccgagguggugggggacaucauccugaagccggccaacaacucccucaagaucaccgaggaggucggccacacggaccugauggccgcguacguggacaacagcucccugaccaucaagaagcccaacgagcucagccgcgugcuggggcugaagacccucgccacccacggccuggccgccgucaacuccgugcccugggacacgaucgccaacuacgcgaagccguuccugaacaagguggucagcaccaccaccaacaucgugacgcgcugccucaaccgggugugcaccaacuacaugcccuacuucuucacccugcugcuccagcugugcaccuucacccgcuccacgaacagccggaucaaggccuccaugcccaccaccaucgccaagaacaccgucaagagcgugggcaaguucugccuggaggccagcuucaacuaccucaagucccccaacuucagcaagcugaucaacaucaucaucugguuccugcuccuguccgugugccuggggagccucaucuacuccacggccgcgcugggcguccugaugagcaaccucgggaugccguccuacugcaccggcuaccgcgagggcuaccugaacagcaccaacgugaccaucgccacguacugcaccggguccauccccugcagcgugugccuguccggccucgacagccuggacaccuaccccucccuggagaccauccagaucacgaucagcuccuucaagugggaccucaccgccuucgggcuggucgccgagugguuccuggccuacauccucuucacccgguucuucuacgugcugggccuggcggccaucaugcagcucuucuucagcuacuucgccgugcacuucaucuccaacagcuggcugauguggcugaucaucaaccugguccagauggcccccaucuccgcgauggugcgcauguacaucuucuucgccagcuucuacuacguguggaagagcuacguccacgugguggacgggugcaacuccagcaccugcaugaugugcuacaagcggaaccgcgccacgcgggucgagugcaccaccaucgugaacggcguccgccgguccuucuacguguacgccaacggcgggaagggcuucugcaagcuccacaacuggaacugcgugaacugcgacaccuucugcgccgggagcacguucaucuccgacgaggucgcgcgcgaccugagccugcaguucaagcggccgaucaaccccaccgaccaguccagcuacaucguggacuccgugaccgucaagaacggcagcauccaccucuacuucgacaaggccgggcagaagaccuacgagcgccacucccugagccacuucgugaaccuggacaaccuccgggccaacaacacgaagggcucccugcccaucaacgugaucgucuucgacggcaagagcaagugcgaggaguccagcgccaaguccgccagcguguacuacucccagcugaugugccagcccauccuccugcuggaccaggcgcucgugagcgacgucggggacagcgccgagguggccgugaagauguucgacgccuacgucaacaccuucuccagcaccuucaacgugccgauggagaagcugaagacccugguggccacggcggaggccgagcucgccaagaacgucucccuggacaacgugcugagcaccuucaucuccgccgcgcgccagggcuucguggacagcgacgucgagaccaaggacgugguggagugccucaagcugucccaccagagcgacaucgaggucaccggggacuccugcaacaacuacaugcugacguacaacaagguggagaacaugaccccccgggaccucggcgccugcaucgacugcagcgcccgccacaucaacgcccagguggccaagucccacaacaucgcgcugaucuggaacgucaaggacuucaugagccuguccgagcagcuccggaagcagauccgcagcgccgccaagaagaacaaccugcccuucaagcugaccugcgccaccacgcgccagguggugaacgucgugaccaccaagaucgcccucaaggggggcugaggacuagucccuguucccagagcccacuuuuuuuucuuuuuuugaaauaaaauagccugucuuucagaucucaaaggcucuuuucagagccaccaaaaaaaaaaaaaaaaaaaaaaaaaaaaaaaaaaaaaaaaaaaaaaaaaaaaaaaaaaaaaaaaaaaaaaaaaaaaaaaaaaaaaaaaaaaaaaaaaaaaa

SEQ ID NO: 19750 - RNA, 6113 nt, Artificial Sequence
  SARS-CoV-2__MT811494.1__non-structural protein 3 (NSP3) mRNA gc
aggagagucccgcagucggcguccagcggcucugcuuguucgugugugugucguugcaggccuuauucaagcuuaccauggcccccaccaaggugaccuucggcgacgacacggucaucgaggugcagggguacaagagcgugaacaucaccuucgagcuggacgagcgcaucgacaagguccucaacgagaagugcuccgccuacaccguggagcugggcaccgaggugaacgaguucgcgugcgucguggccgacgccgugaucaagacgcugcagccggucagcgagcuccugaccccccuggggaucgaccucgacgagugguccauggccaccuacuaccuguucgacgagagcggcgaguucaagcuggccucccacauguacugcagcuucuacccccccgacgaggacgaggaggagggggacugcgaggaggaggaguucgagccguccacccaguacgaguacggcacggaggacgacuaccagggcaagccccucgaguucggggcgaccagcgccgcccugcagcccgaggaggagcaggaggaggacuggcuggacgacgacucccagcagaccgugggccagcaggacgggagcgaggacaaccagaccacgaccauccagaccaucguggagguccagccccagcucgagauggagcugaccccgguggugcagacgaucgaggucaacuccuucagcggcuaccugaagcucaccgacaacguguacaucaagaacgccgacaucguggaggaggcgaagaaggucaagcccaccgugguggucaacgccgccaacguguaccugaagcacgggggcggcguggccggggcccugaacaaggcgaccaacaacgccaugcaggucgaguccgacgacuacaucgccacgaacggcccccucaagguggggggcagcugcguccuguccggccacaaccuggccaagcacugccuccacgugguggggcccaacgucaacaagggcgaggacauccagcugcugaagagcgccuacgagaacuucaaccagcacgaggugcuccuggcgccgcugcucuccgccgggaucuucggcgccgaccccauccacagccugcgggugugcgucgacaccgugcgcaccaacguguaccuggccgucuucgacaagaaccucuacgacaagcugguguccagcuuccuggagaugaagagcgagaagcagguggagcagaagaucgccgagauccccaaggaggaggucaagcccuucaucaccgaguccaagccgagcguggagcagcggaagcaggacgacaagaagaucaaggcgugcuucgaggaggugacgaccacccucgaggagaccaaguuccugacggagaaccugcuccuguacaucgacaucaacgggaaccugcaccccgacuccgccacccucgucagcgacaucgacaucaccuuccugaagaaggacgcccccuacaucgugggcgacgugguccaggagggcgugcugaccgccguggucauccccacgaagaaggccgggggcaccaccgagaugcucgcgaaggcccugcgcaaggugccgaccgacaacuacaucacgaccuaccccgggcagggccugaacggguacaccguggaggaggccaagaccguccucaagaagugcaaguccgccuucuacauccugcccagcaucaucuccaacgagaagcaggagauccugggcaccgugagcuggaaccuccgggagaugcuggcgcacgccgaggagacgcgcaagcugaugcccgugugcgucgagaccaaggccaucguguccaccauccagcggaaguacaagggcaucaagauccaggaggggguggucgacuacggcgcccgcuucuacuucuacaccagcaagacgaccguggccucccugaucaacacccucaacgaccugaacgagacccuggugacgaugccgcucggguacgucacccacggccugaaccuggaggaggcggcccgguacaugcgcagccucaaggugcccgccaccguguccgucagcucccccgacgccgugaccgccuacaacggguaccugacgagcuccagcaagacccccgaggagcacuucaucgagaccaucucccuggcgggcagcuacaaggacuggagcuacuccggccagagcacccagcucgggaucgaguuccugaagcggggcgacaaguccguguacuacacgagcaacccgaccaccuuccaccuggacggggaggucaucaccuucgacaaccucaagacgcugcugucccuccgcgaggugcggaccaucaagguguucaccaccgucgacaacaucaaccugcacacgcaggugguggacaugagcaugaccuacggccagcaguucggccccaccuaccuggacggggccgacgucaccaagaucaagccccacaacucccacgagggcaagacguucuacgugcucccgaacgacgacacccugcgcguggaggccuucgaguacuaccacaccaccgaccccagcuuccuggggcgguacauguccgcccucaaccacacgaagaaguggaaguacccccaggucaacggccugaccagcaucaagugggccgacaacaacugcuaccuggcgaccgcccuccugacccugcagcagaucgagcucaaguucaaccccccggcccugcaggacgccuacuaccgcgcgcgggccggggaggccgccaacuucugcgcccugauccucgcguacugcaacaagacggugggcgagcugggcgacgugcgcgagaccauguccuaccuguuccagcacgccaaccucgacagcugcaagcggguccugaacguggucugcaagaccugcgggcagcagcagaccacccugaagggcguggaggccgugauguacauggggacgcucuccuacgagcaguucaagaagggcguccagauccccugcaccugcgggaagcaggccaccaaguaccuggugcagcaggagagccccuucgugaugauguccgcccccccggcgcaguacgagcugaagcacggcaccuucacgugcgccagcgaguacaccggcaacuaccagugcgggcacuacaagcacaucaccuccaaggagacccucuacugcaucgacggcgcccugcugacgaagagcagcgaguacaaggggcccaucaccgacgucuucuacaaggagaacuccuacaccaccacgaucaagcccgugaccuacaagcucgacggcguggucugcaccgagaucgaccccaagcuggacaacuacuacaagaaggacaacagcuacuucaccgagcagccgaucgaccuggugcccaaccagcccuaccccaacgccuccuucgacaacuucaaguucgugugcgacaacaucaaguucgccgacgaccucaaccagcugacgggguacaagaagccggcgagccgcgagcugaaggucaccuucuuccccgaccucaacggcgacgugguggccaucgacuacaagcacuacacccccuccuucaagaagggcgccaagcugcugcacaagcccaucgucuggcacgugaacaacgccaccaacaaggcgacguacaagccgaacaccuggugcauccggugccucuggagcaccaagcccguggagaccuccaacagcuucgacguccugaaguccgaggacgcccaggggauggacaaccuggccugcgaggaccucaagcccgugagcgaggagguggucgagaaccccacgauccagaaggacgugcuggagugcaacgugaagaccaccgaggucgugggcgacaucauccugaagccggccaacaacucccucaagaucaccgaggagguggggcacacggaccugauggccgcguacgucgacaacagcucccugaccaucaagaagcccaacgagcucagccgcgugcugggccugaagacccucgccacccacgggcuggccgccgugaacuccguccccugggacacgaucgccaacuacgcgaagccguuccugaacaagguggugagcaccaccaccaacaucgucacgcgcugccucaaccgggugugcaccaacuacaugcccuacuucuucacccugcugcuccagcugugcaccuucacccgcuccacgaacagccggaucaaggccuccaugcccaccaccaucgccaagaacaccgugaagagcgucggcaaguucugccuggaggccagcuucaacuaccucaagucccccaacuucagcaagcugaucaacaucaucaucugguuccugcuccuguccgugugccugggcagccucaucuacuccacggccgcgcugggggugcugaugagcaaccucggcaugccguccuacugcaccggguaccgcgagggcuaccugaacagcaccaacgucaccaucgccacguacugcaccggcuccauccccugcagcgugugccuguccgggcucgacagccuggacaccuaccccucccuggagaccauccagaucacgaucagcuccuucaagugggaccucaccgccuucggccugguggccgagugguuccuggccuacauccucuucacccgguucuucuacguccuggggcuggcggccaucaugcagcucuucuucagcuacuucgccgugcacuucaucuccaacagcuggcugauguggcugaucaucaaccuggugcagauggcccccaucuccgcgaugguccgcauguacaucuucuucgccagcuucuacuacguguggaagagcuacgugcacgucguggacggcugcaacuccagcaccugcaugaugugcuacaagcggaaccgcgccacgcggguggagugcaccaccaucgucaacggggugcgccgguccuucuacgucuacgccaacggcggcaagggguucugcaagcuccacaacuggaacugcgugaacugcgacaccuucugcgccggcagcacguucaucuccgacgagguggcgcgcgaccugagccugcaguucaagcggccgaucaaccccaccgaccaguccagcuacaucgucgacuccgugaccgugaagaacgggagcauccaccucuacuucgacaaggccggccagaagaccuacgagcgccacucccugagccacuucgucaaccuggacaaccuccgggccaacaacacgaaggggucccugcccaucaacgugaucguguucgacggcaagagcaagugcgaggaguccagcgccaaguccgccagcgucuacuacucccagcugaugugccagcccauccuccugcuggaccaggcgcucgugagcgacgugggcgacagcgccgaggucgccgugaagauguucgacgccuacgugaacaccuucuccagcaccuucaacgucccgauggagaagcugaagacccugguggccacggcggaggccgagcucgccaagaacgugucccuggacaacguccugagcaccuucaucuccgccgcgcgccagggguucguggacagcgacguggagaccaaggacgucguggagugccucaagcugucccaccagagcgacaucgaggugaccggcgacuccugcaacaacuacaugcugacguacaacaaggucgagaacaugaccccccgggaccucggggccugcaucgacugcagcgcccgccacaucaacgcccagguggccaagucccacaacaucgcgcugaucuggaacgugaaggacuucaugagccuguccgagcagcuccggaagcagauccgcagcgccgccaagaagaacaaccugcccuucaagcugaccugcgccaccacgcgccaggucgugaacguggucaccaccaagaucgcccucaagggcgggugaggacuagucccuguucccagagcccacuuuuuuuucuuuuuuugaaauaaaauagccugucuuucagaucucaaaggcucuuuucagagccaccaaaaaaaaaaaaaaaaaaaaaaaaaaaaaaaaaaaaaaaaaaaaaaaaaaaaaaaaaaaaaaaaaaaaaaaaaaaaaaaaaaaaaaaaaaaaaaaaaaaaa

SEQ ID NO: 19751 - RNA, 6113 nt, Artificial Sequence
  SARS-CoV-2__MT811496.1__non-structural protein 3 (NSP3) mRNA gc
aggagagucccgcagucggcguccagcggcucugcuuguucgugugugugucguugcaggccuuauucaagcuuaccauggcccccaccaaggugaccuucggcgacgacacggucaucgaggugcagggguacaagagcgugaacaucaccuucgagcuggacgagcgcaucgacaagguccucaacgagaagugcuccgccuacaccguggagcugggcaccgaggugaacgaguucgcgugcgucguggccgacgccgugaucaagacguuccagccggucagcgagcugcucaccccccuggggaucgaccuggacgagugguccauggccaccuacuaccucuucgacgagagcggcgaguucaagcuggccucccacauguacugcagcuucuacccccccgacgaggacgaggaggagggggacugcgaggaggaggaguucgagccguccacccaguacgaguacggcacggaggacgacuaccagggcaagccccuggaguucggggcgaccagcgccgcccuccagcccgaggaggagcaggaggaggacuggcuggacgacgacucccagcagaccgugggccagcaggacgggagcgaggacaaccagaccacgaccauccagaccaucguggagguccagccccagcuggagauggagcucaccccgguggugcagacgaucgaggucaacuccuucagcggcuaccugaagcugaccgacaacguguacaucaagaacgccgacaucguggaggaggcgaagaaggucaagcccaccgugguggucaacgccgccaacguguaccucaagcacgggggcggcguggccggggcccugaacaaggcgaccaacaacgccaugcaggucgaguccgacgacuacaucgccacgaacggcccccugaagguggggggcagcugcguccucuccggccacaaccuggccaagcacugccugcacgugguggggcccaacgucaacaagggcgaggacauccagcuccugaagagcgccuacgagaacuucaaccagcacgaggugcugcucgcgccgcugcuguccgccgggaucuucggcgccgaccccauccacagccuccgggugugcgucgacaccgugcgcaccaacguguaccuggccgucuucgacaagaaccuguacgacaagcucguguccagcuuccuggagaugaagagcgagaagcagguggagcagaagaucgccgagauccccaaggaggaggucaagcccuucaucaccgaguccaagccgagcguggagcagcggaagcaggacgacaagaagaucaaggcgugcguggaggaggucacgaccacccuggaggagaccaaguuccucacggagaaccugcugcucuacaucgacaucaacgggaaccugcaccccgacuccgccacccuggugagcgacaucgacaucaccuuccucaagaaggacgcccccuacaucgugggcgacgucgugcaggagggcgugcugaccgccgucgugauccccacgaagaaggccgggggcaccaccgagaugcuggcgaaggcccuccgcaaggugccgaccgacaacuacaucacgaccuaccccgggcagggccugaacggguacaccgucgaggaggccaagaccgugcugaagaagugcaaguccgccuucuacauccuccccagcaucaucuccaacgagaagcaggagauccugggcaccgugagcuggaaccugcgggagaugcucgcgcacgccgaggagacgcgcaagcugaugcccgucugcguggagaccaaggccaucguguccaccauccagcggaaguacaagggcaucaagauccaggagggggucguggacuacggcgcccgcuucuacuucuacaccagcaagacgaccguggccucccugaucaacacccugaacgaccucaacgagacccuggucacgaugccgcugggguacgugacccacggccucaaccuggaggaggcggcccgguacaugcgcagccugaaggugcccgccaccgucuccgugagcucccccgacgccgugaccgccuacaacggguaccucacgagcuccagcaagacccccgaggagcacuucaucgagaccaucucccuggcgggcagcuacaaggacuggagcuacuccggccagagcacccagcuggggaucgaguuccucaagcggggcgacaaguccgucuacuacacgagcaacccgaccaccuuccaccuggacggggaggugaucaccuucgacaaccugaagacgcuccugucccugcgcgaggugcggaccaucaaggucuucaccaccguggacaacaucaaccuccacacgcagguggucgacaugagcaugaccuacggccagcaguucggccccaccuaccuggacggggccgacgugaccaagaucaagccccacaacucccacgagggcaagacguucuacgugcugccgaacgacgacacccuccgcgucgaggccuucgaguacuaccacaccaccgaccccagcuuccuggggcgguacauguccgcccugaaccacacgaagaaguggaaguacccccaggugaacggccucaccagcaucaagugggccgacaacaacugcuaccuggcgaccgcccugcucacccugcagcagaucgagcugaaguucaaccccccggcccuccaggacgccuacuaccgcgcgcgggccggggaggccgccaacuucugcgcccugauccuggcguacugcaacaagacggugggcgagcucggcgacguccgcgagaccauguccuaccuguuccagcacgccaaccuggacagcugcaagcgggugcucaacgucgugugcaagaccugcgggcagcagcagaccacccugaagggcguggaggccgucauguacauggggacgcuguccuacgagcaguucaagaagggcgugcagauccccugcaccugcgggaagcaggccaccaaguaccucgugcagcaggagagccccuucgucaugauguccgcccccccggcgcaguacgagcugaagcacggcaccuucacgugcgccagcgaguacaccggcaacuaccagugcgggcacuacaagcacaucaccuccaaggagacccuguacugcaucgacggcgcccuccugacgaagagcagcgaguacaaggggcccaucaccgacguguucuacaaggagaacuccuacaccaccacgaucaagcccgugaccuacaagcuggacggcgucgugugcaccgagaucgaccccaagcucgacaacuacuacaagaaggacaacagcuacuucaccgagcagccgaucgaccuggugcccaaccagcccuaccccaacgccuccuucgacaacuucaaguucgucugcgacaacaucaaguucgccgacgaccugaaccagcucacgggguacaagaagccggcgagccgcgagcugaaggugaccuucuuccccgaccugaacggcgacguggucgccaucgacuacaagcacuacacccccuccuucaagaagggcgccaagcuccugcacaagcccaucguguggcacgugaacaacgccaccaacaaggcgacguacaagccgaacaccuggugcauccggugccuguggagcaccaagcccgucgagaccuccaacagcuucgacgugcucaaguccgaggacgcccaggggauggacaaccuggccugcgaggaccugaagcccgugagcgaggaggucguggagaaccccacgauccagaaggacgugcucgagugcaacgucaagaccaccgagguggugggcgacaucauccugaagccggccaacaacucccugaagaucaccgaggaggucgggcacacggaccucauggccgcguacguggacaacagcucccugaccaucaagaagcccaacgagcugagccgcgugcucggccugaagacccuggccacccacgggcucgccgccgucaacuccgugcccugggacacgaucgccaacuacgcgaagccguuccugaacaagguggucagcaccaccaccaacaucgugacgcgcugccugaaccgggugugcaccaacuacaugcccuacuucuucacccuccugcugcagcucugcaccuucacccgcuccacgaacagccggaucaaggccuccaugcccaccaccaucgccaagaacaccgucaagagcgugggcaaguucugccuggaggccagcuucaacuaccugaagucccccaacuucagcaagcucaucaacaucaucaucugguuccugcugcucuccgugugccugggcagccugaucuacuccacggccgcgcucgggguccugaugagcaaccugggcaugccguccuacugcaccggguaccgcgagggcuaccucaacagcaccaacgugaccaucgccacguacugcaccggcuccauccccugcagcgugugccuguccgggcuggacagccucgacaccuaccccucccuggagaccauccagaucacgaucagcuccuucaagugggaccugaccgccuucggccucgucgccgagugguuccuggccuacauccuguucacccgguucuucuacgugcucgggcuggcggccaucaugcagcuguucuucagcuacuucgccgugcacuucaucuccaacagcuggcucauguggcugaucaucaaccugguccagauggcccccaucuccgcgauggugcgcauguacaucuucuucgccagcuucuacuacguguggaagagcuacguccacgugguggacggcugcaacuccagcaccugcaugaugugcuacaagcggaaccgcgccacgcgggucgagugcaccaccaucgugaacgggguccgccgguccuucuacguguacgccaacggcggcaagggguucugcaagcugcacaacuggaacugcgugaacugcgacaccuucugcgccggcagcacguucaucuccgacgaggucgcgcgcgaccucagccugcaguucaagcggccgaucaaccccaccgaccaguccagcuacaucguggacuccgugaccgucaagaacgggagcauccaccuguacuucgacaaggccggccagaagaccuacgagcgccacucccucagccacuucgugaaccuggacaaccugcgggccaacaacacgaaggggucccuccccaucaacgugaucgucuucgacggcaagagcaagugcgaggaguccagcgccaaguccgccagcguguacuacucccagcugaugugccagcccauccugcuccuggaccaggcgcuggugagcgacgucggcgacagcgccgagguggccgugaagauguucgacgccuacgucaacaccuucuccagcaccuucaacgugccgauggagaagcucaagacccugguggccacggcggaggccgagcuggccaagaacgucucccucgacaacgugcugagcaccuucaucuccgccgcgcgccagggguucguggacagcgacgucgagaccaaggacgugguggagugccugaagcucucccaccagagcgacaucgaggucaccggcgacuccugcaacaacuacaugcugacguacaacaagguggagaacaugaccccccgggaccugggggccugcaucgacugcagcgcccgccacaucaacgcccagguggccaagucccacaacaucgcgcucaucuggaacgucaaggacuucaugagccuguccgagcagcugcggaagcagauccgcagcgccgccaagaagaacaaccuccccuucaagcugaccugcgccaccacgcgccagguggugaacgucgugaccaccaagaucgcccugaagggcgggugaggacuagucccuguucccagagcccacuuuuuuuucuuuuuuugaaauaaaauagccugucuuucagaucucaaaggcucuuuucagagccaccaaaaaaaaaaaaaaaaaaaaaaaaaaaaaaaaaaaaaaaaaaaaaaaaaaaaaaaaaaaaaaaaaaaaaaaaaaaaaaaaaaaaaaaaaaaaaaaaaaaaa

SEQ ID NO: 19752 - RNA, 6113 nt, Artificial Sequence
  SARS-CoV-2__MT811506.1__non-structural protein 3 (NSP3) mRNA gc
aggagagucccgcagucggcguccagcggcucugcuuguucgugugugugucguugcaggccuuauucaagcuuaccauggcccccaccaaggugaccuucggcgacgacacggucaucgaggugcagggguacaagagcgugaacaucaccuucgagcuggacgagcgcaucgacaagguccucaacgagaagugcuccgccuacaccguggagcugggcaccgaggugaacgaguucgcgugcgucguggccgacgccgugaucaagacgcugcagccggucagcgagcuccugaccccccuggggaucgaccucgacgagugguccauggccaccuacuaccuguucgacgagagcggcgaguucaagcuggccucccacauguacugcagcuucuacccccccgacgaggacgaggaggagggggacugcgaggaggaggaguucgagccguccacccaguacgaguacggcacggaggacgacuaccagggcaagccccucgaguucggggcgaccagcgccgcccugcagcccgaggaggagcaggaggaggacuggcuggacgacgacucccagcagaccgugggccagcaggacgggagcgaggacaaccagaccacgaccauccagaccaucguggagguccagccccagcucgagauggagcugaccccgguggugcagacgaucgaggucaacuccuucagcggcuaccugaagcucaccgacaacguguacaucaagaacgccgacaucguggaggaggcgaagaaggucaagcccaccgugguggucaacgccgccaacguguaccugaagcacgggggcggcguggccggggcccugaacaaggcgaccaacaacgccaugcaggucgaguccgacgacuacaucgccacgaacggcccccucaagguggggggcagcugcguccuguccggccacaaccuggccaagcacugccuccacgugguggggcccaacgucaacaagggcgaggacauccagcugcugaagagcgccuacgagaacuucaaccagcacgaggugcuccuggcgccgcugcucuccgccgggaucuucggcgccgaccccauccacagccugcgggugugcgucgacaccgugcgcaccaacguguaccuggccgucuucgacaagaaccucuacgacaagcugguguccagcuuccuggagaugaagagcgagaagcagguggagcagaagaucgccgagauccccaaggaggaggucaagcccuucaucaccgaguccaagccgagcguggagcagcggaagcaggacgacaagaagaucaaggcgugcguggaggaggucacgaccacccucgaggagaccaaguuccugacggagaaccugcuccuguacaucgacaucaacgggaaccugcaccccgacuccgccacccucgugagcgacaucgacaucaccuuccugaagaaggacgcccccuacaucgugggcgacgucgugcaggagggcgugcugaccgccgucgugauccccacgaagaaggccgggggcaccaccgagaugcucgcgaaggcccugcgcaaggugccgaccgacaacuacaucacgaccuaccccgggcagggccugaacggguacaccgucgaggaggccaagaccgugcucaagaagugcaaguccgccuucuacauccugcccagcaucaucuccaacgagaagcaggagauccugggcaccgugagcuggaaccuccgggagaugcuggcgcacgccgaggagacgcgcaagcugaugcccgucugcguggagaccaaggccaucguguccaccauccagcggaaguacaagggcaucaagauccaggagggggucguggacuacggcgcccgcuucuacuucuacaccagcaagacgaccguggccucccugaucaacacccucaacgaccugaacgagacccuggucacgaugccgcucggguacgugacccacggccugaaccuggaggaggcggcccgguacaugcgcagccucaaggugcccgccaccgucuccgugagcucccccgacgccgugaccgccuacaacggguaccugacgagcuccagcaagacccccgaggagcacuucaucgagaccaucucccuggcgggcagcuacaaggacuggagcuacuccggccagagcacccagcucgggaucgaguuccugaagcggggcgacaaguccgucuacuacacgagcaacccgaccaccuuccaccuggacggggaggugaucaccuucgacaaccucaagacgcugcugucccuccgcgaggugcggaccaucaaggucuucaccaccguggacaacaucaaccugcacacgcagguggucgacaugagcaugaccuacggccagcaguucggccccaccuaccuggacggggccgacgugaccaagaucaagccccacaacucccacgagggcaagacguucuacgugcucccgaacgacgacacccugcgcgucgaggccuucgaguacuaccacaccaccgaccccagcuuccuggggcgguacauguccgcccucaaccacacgaagaaguggaaguacccccaggugaacggccugaccagcaucaagugggccgacaacaacugcuaccuggcgaccgcccuccugacccugcagcagaucgagcucaaguucaaccccccggcccugcaggacgccuacuaccgcgcgcgggccggggaggccgccaacuucugcgcccugauccucgcguacugcaacaagacggugggcgagcugggcgacguccgcgagaccauguccuaccuguuccagcacgccaaccucgacagcugcaagcgggugcugaacgucgugugcaagaccugcgggcagcagcagaccacccugaagggcguggaggccgucauguacauggggacgcucuccuacgagcaguucaagaagggcgugcagauccccugcaccugcgggaagcaggccaccaaguaccuggugcagcaggagagccccuucgucaugauguccgcccccccggcgcaguacgagcugaagcacggcaccuucacgugcgccagcgaguacaccggcaacuaccagugcgggcacuacaagcacaucaccuccaaggagacccucuacugcaucgacggcgcccugcugacgaagagcagcgaguacaaggggcccaucaccgacguguucuacaaggagaacuccuacaccaccacgaucaagcccgugaccuacaagcucgacggcgucgugugcaccgagaucgaccccaagcuggacaacuacuacaagaaggacaacagcuacuucaccgagcagccgaucgaccuggugcccaaccagcccuaccccaacgccuccuucgacaacuucaaguucgucugcgacaacaucaaguucgccgacgaccucaaccagcugacgggguacaagaagccggcgagccgcgagcugaaggugaccuucuuccccgaccucaacggcgacguggucgccaucgacuacaagcacuacacccccuccuucaagaagggcgccaagcugcugcacaagcccaucguguggcacgugaacaacgccaccaacaaggcgacguacaagccgaacaccuggugcauccggugccucuggagcaccaagcccgucgagaccuccaacagcuucgacgugcugaaguccgaggacgcccaggggauggacaaccuggccugcgaggaccucaagcccgugagcgaggaggucguggagaaccccacgauccagaaggacgugcuggagugcaacgucaagaccaccgagguggugggcgacaucauccugaagccggccaacaacucccucaagaucaccgaggaggucgggcacacggaccugauggccgcguacguggacaacagcucccugaccaucaagaagcccaacgagcucagccgcgugcugggccugaagacccucgucacccacgggcuggccgccgugaacuccgugcccugggacacgaucgccaacuacgccaagccguuccugaacaaggucgugagcaccaccaccaacaucgugacgcgcugccucaaccgggucugcaccaacuacaugcccuacuucuucacccugcugcuccagcugugcaccuucacccgcuccacgaacagccggaucaaggcguccaugcccaccaccaucgccaagaacaccgugaagagcgugggcaaguucugccuggaggccagcuucaacuaccucaagucccccaacuucagcaagcugaucaacaucaucaucugguuccugcuccuguccgucugccugggcagccucaucuacuccacggccgcccugggggugcugaugagcaaccucggcaugccguccuacugcaccggguaccgcgagggcuaccugaacagcaccaacgugaccaucgcgacguacugcaccggcuccauccccugcagcgucugccuguccgggcucgacagccuggacaccuaccccucccuggagaccauccagaucacgaucagcuccuucaagugggaccucaccgccuucggccugguggccgagugguuccuggccuacauccucuucacccgguucuucuacgugcuggggcuggccgcgaucaugcagcucuucuucagcuacuucgccguccacuucaucuccaacagcuggcugauguggcugaucaucaaccuggugcagauggcccccaucuccgccauggugcgcauguacaucuucuucgcgagcuucuacuacgucuggaagagcuacgugcacguggucgacggcugcaacuccagcaccugcaugaugugcuacaagcggaaccgcgccacgcggguggagugcaccaccaucgucaacggggugcgccgguccuucuacguguacgccaacggcggcaagggguucugcaagcuccacaacuggaacugcgucaacugcgacaccuucugcgccggcagcacguucaucuccgacgagguggcccgcgaccugagccugcaguucaagcggccgaucaaccccaccgaccaguccagcuacaucguggacuccgucaccgugaagaacgggagcauccaccucuacuucgacaaggcgggccagaagaccuacgagcgccacucccugagccacuucgugaaccuggacaaccuccgggccaacaacacgaaggggucccugcccaucaacgucaucguguucgacggcaagagcaagugcgaggaguccagcgccaaguccgccagcguguacuacucccagcugaugugccagcccauccuccugcuggaccaggcccucgucagcgacgugggcgacagcgcggagguggccgucaagauguucgacgccuacgugaacaccuucuccagcaccuucaacgugccgauggagaagcugaagacccuggucgccacggccgaggcggagcucgccaagaacgugucccuggacaacgugcugagcaccuucaucuccgccgcccgccagggguucgucgacagcgacguggagaccaaggacguggucgagugccucaagcugucccaccagagcgacaucgaggugaccggcgacuccugcaacaacuacaugcugacguacaacaagguggagaacaugaccccccgggaccucggggcgugcaucgacugcagcgcccgccacaucaacgcccaggucgccaagucccacaacaucgcccugaucuggaacgugaaggacuucaugagccuguccgagcagcuccggaagcagauccgcagcgcggccaagaagaacaaccugcccuucaagcugaccugcgccaccacgcgccagguggucaacguggugaccaccaagaucgcccucaagggcgggugaggacuagucccuguucccagagcccacuuuuuuuucuuuuuuugaaauaaaauagccugucuuucagaucucaaaggcucuuuucagagccaccaaaaaaaaaaaaaaaaaaaaaaaaaaaaaaaaaaaaaaaaaaaaaaaaaaaaaaaaaaaaaaaaaaaaaaaaaaaaaaaaaaaaaaaaaaaaaaaaaaaaa

SEQ ID NO: 19753 - RNA, 6113 nt, Artificial Sequence
  SARS-CoV-2__MT811507.1__non-structural protein 3 (NSP3) mRNA gc
aggagagucccgcagucggcguccagcggcucugcuuguucgugugugugucguugcaggccuuauucaagcuuaccauggcccccaccaaggugaccuucggcgacgacacggucaucgaggugcagggguacaagagcgugaacaucaccuucgagcuggacgagcgcaucgacaagguccucaacgagaagugcuccgccuacaccguggagcugggcaccgaggugaacgaguucgcgugcgucguggccgacgccgugaucaagacgcugcagccggucagcgagcuccugaccccccuggggaucgaccucgacgagugguccauggccaccuacuaccuguucgacgagagcggcgaguucaagcuggccucccacauguacugcagcuucuacccccccgacgaggacgaggaggagggggacugcgaggaggaggaguucgagccguccacccaguacgaguacggcacggaggacgacuaccagggcaagccccucgaguucggggcgaccagcgccgcccugcagcccgaggaggagcaggaggaggacuggcuggacgacgacucccagcagaccgugggccagcaggacgggagcgaggacaaccagaccacgaccauccagaccaucguggagguccagccccagcucgagauggagcugaccccgguggugcagacgaucgaggucaacuccuucagcggcuaccugaagcucaccgacaacguguacaucaagaacgccgacaucguggaggaggcgaagaaggucaagcccaccgugguggucaacgccgccaacguguaccugaagcacgggggcggcguggccggggcccugaacaaggcgaccaacaacgccaugcaggucgaguccgacgacuacaucgccacgaacggcccccucaagguggggggcagcugcguccuguccggccacaaccuggccaagcacugccuccacgugguggggcccaacgucaacaagggcgaggacauccagcugcugaagagcgccuacgagaacuucaaccagcacgaggugcuccuggcgccgcugcucuccgccgggaucuucggcgccgaccccauccacagccugcgggugugcgucgacaccgugcgcaccaacguguaccuggccgucuucgacaagaaccucuacgacaagcugguguccagcuuccuggagaugaagagcgagaagcagguggagcagaagaucgccgagauccccaaggaggaggucaagcccuucaucaccgaguccaagccgagcguggagcagcggaagcaggacgacaagaagaucaaggcgugcguggaggaggucacgaucacccucgaggagaccaaguuccugaccgagaaccugcuccuguacaucgacaucaacgggaaccugcaccccgacuccgccacgcucgugagcgacaucgacaucaccuuccugaagaaggacgcccccuacaucgugggcgacgucgugcaggagggcgugcugaccgccgucgugauccccaccaagaaggccgggggcacgaccgagaugcucgcgaaggcccugcgcaaggugccgaccgacaacuacaucaccacguaccccgggcagggccugaacggguacaccgucgaggaggccaagaccgugcucaagaagugcaaguccgccuucuacauccugcccagcaucaucuccaacgagaagcaggagauccugggcaccgugagcuggaaccuccgggagaugcuggcgcacgccgaggagacccgcaagcugaugcccgucugcguggagacgaaggccaucguguccaccauccagcggaaguacaagggcaucaagauccaggagggggucguggacuacggcgcccgcuucuacuucuacaccagcaagaccacgguggccucccugaucaacacccucaacgaccugaacgagacccuggucaccaugccgcucggguacgugacgcacggccugaaccuggaggaggcggcccgguacaugcgcagccucaaggugcccgccaccgucuccgugagcucccccgacgccgugaccgccuacaacggguaccugaccagcuccagcaagacgcccgaggagcacuucaucgagaccaucucccuggcgggcagcuacaaggacuggagcuacuccggccagagcacccagcucgggaucgaguuccugaagcggggcgacaaguccgucuacuacaccagcaacccgacgaccuuccaccuggacggggaggugaucaccuucgacaaccucaagacccugcugucccuccgcgaggugcggacgaucaaggucuucaccaccguggacaacaucaaccugcacacccagguggucgacaugagcaugacguacggccagcaguucggccccaccuaccuggacggggccgacgugaccaagaucaagccccacaacucccacgagggcaagaccuucuacgugcucccgaacgacgacacgcugcgcgucgaggccuucgaguacuaccacaccaccgaccccagcuuccuggggcgguacauguccgcccucaaccacaccaagaaguggaaguacccccaggugaacggccugacgagcaucaagugggccgacaacaacugcuaccuggcgaccgcccuccugacccugcagcagaucgagcucaaguucaaccccccggcccugcaggacgccuacuaccgcgcgcgggccggggaggccgccaacuucugcgcccugauccucgcguacugcaacaagaccgugggcgagcugggcgacguccgcgagacgauguccuaccuguuccagcacgccaaccucgacagcugcaagcgggugcugaacgucgugugcaagaccugcgggcagcagcagaccacccugaagggcguggaggccgucauguacauggggacccucuccuacgagcaguucaagaagggcgugcagauccccugcacgugcgggaagcaggccaccaaguaccuggugcagcaggagagccccuucgucaugauguccgcccccccggcgcaguacgagcugaagcacggcaccuucaccugcgccagcgaguacacgggcaacuaccagugcgggcacuacaagcacaucaccuccaaggagacccucuacugcaucgacggcgcccugcugaccaagagcagcgaguacaaggggcccaucacggacguguucuacaaggagaacuccuacaccaccaccaucaagcccgugacguacaagcucgacggcgucgugugcaccgagaucgaccccaagcuggacaacuacuacaagaaggacaacagcuacuucaccgagcagccgaucgaccuggugcccaaccagcccuaccccaacgccuccuucgacaacuucaaguucgucugcgacaacaucaaguucgccgacgaccucaaccagcugaccggguacaagaagccggcgagccgcgagcugaaggugacguucuuccccgaccucaacggcgacguggucgccaucgacuacaagcacuacacccccuccuucaagaagggcgccaagcugcugcacaagcccaucguguggcacgugaacaacgccaccaacaaggcgaccuacaagccgaacacguggugcauccggugccucuggagcaccaagcccgucgagaccuccaacagcuucgacgugcugaaguccgaggacgcccaggggauggacaaccuggccugcgaggaccucaagcccgugagcgaggaggucguggagaaccccaccauccagaaggacgugcuggagugcaacgucaagacgaccgagguggugggcgacaucauccugaagccggccaacaacucccucaagaucaccgaggaggucgggcacaccgaccugauggccgcguacguggacaacagcucccugacgaucaagaagcccaacgagcucagccgcgugcugggccugaagacccucgccacccacgggcuggccgccgucaacuccgugcccugggacaccaucgccaacuacgcgaagccguuccugaacaagguggucagcacgaccaccaacaucgugacccgcugccucaaccgggugugcacgaacuacaugcccuacuucuucacccugcugcuccagcugugcaccuucacccgcuccaccaacagccggaucaaggccuccaugcccacgaccaucgccaagaacaccgucaagagcgugggcaaguucugccuggaggccagcuucaacuaccucaagucccccaacuucagcaagcugaucaacaucaucaucugguuccugcuccuguccgugugccugggcagccucaucuacuccaccgccgcgcuggggguccugaugagcaaccucggcaugccguccuacugcacgggguaccgcgagggcuaccugaacagcaccaacgugaccaucgccaccuacugcacgggcuccauccccugcagcgugugccuguccgggcucgacagccuggacaccuaccccucccuggagaccauccagaucaccaucagcuccuucaagugggaccucacggccuucggccuggucgccgagugguuccuggccuacauccucuucacccgguucuucuacgugcuggggcuggcggccaucaugcagcucuucuucagcuacuucgccgugcacuucaucuccaacagcuggcugauguggcugaucaucaaccugguccagauggcccccaucuccgcgauggugcgcauguacaucuucuucgccagcuucuacuacguguggaagagcuacguccacgugguggacggcugcaacuccagcaccugcaugaugugcuacaagcggaaccgcgccacccgggucgagugcacgaccaucgugaacgggguccgccgguccuucuacguguacgccaacggcggcaagggguucugcaagcuccacaacuggaacugcgugaacugcgacaccuucugcgccggcagcaccuucaucuccgacgaggucgcgcgcgaccugagccugcaguucaagcggccgaucaaccccacggaccaguccagcuacaucguggacuccgugaccgucaagaacgggagcauccaccucuacuucgacaaggccggccagaagaccuacgagcgccacucccugagccacuucgugaaccuggacaaccuccgggccaacaacaccaaggggucccugcccaucaacgugaucgucuucgacggcaagagcaagugcgaggaguccagcgccaaguccgccagcguguacuacucccagcugaugugccagcccauccuccugcuggaccaggcgcucgugagcgacgucggcgacagcgccgagguggccgugaagauguucgacgccuacgucaacacguucuccagcaccuucaacgugccgauggagaagcugaagacccugguggccaccgcggaggccgagcucgccaagaacgucucccuggacaacgugcugagcacguucaucuccgccgcgcgccagggguucguggacagcgacgucgagaccaaggacgugguggagugccucaagcugucccaccagagcgacaucgaggucaccggcgacuccugcaacaacuacaugcugaccuacaacaagguggagaacaugacgccccgggaccucggggccugcaucgacugcagcgcccgccacaucaacgcccagguggccaagucccacaacaucgcgcugaucuggaacgucaaggacuucaugagccuguccgagcagcuccggaagcagauccgcagcgccgccaagaagaacaaccugcccuucaagcugaccugcgccaccacccgccagguggugaacgucgugacgaccaagaucgcccucaagggcgggugaggacuagucccuguucccagagcccacuuuuuuuucuuuuuuugaaauaaaauagccugucuuucagaucucaaaggcucuuuucagagccaccaaaaaaaaaaaaaaaaaaaaaaaaaaaaaaaaaaaaaaaaaaaaaaaaaaaaaaaaaaaaaaaaaaaaaaaaaaaaaaaaaaaaaaaaaaaaaaaaaaaaa

SEQ ID NO: 19754 - RNA, 6113 nt, Artificial Sequence
  SARS-CoV-2__MT811514.1__non-structural protein 3 (NSP3) mRNA gc
aggagagucccgcagucggcguccagcggcucugcuuguucgugugugugucguugcaggccuuauucaagcuuaccauggcccccaccaaggugaccuucggcgacgacacggucaucgaggugcagggguacaagagcgugaacaucaccuucgagcuggacgagcgcaucgacaagguccucaacgagaagugcuccgccuacaccguggagcugggcaccgaggugaacgaguucgcgugcgucguggccgacgccgugaucaagacgcugcagccggucagcgagcuccugaccccccuggggaucgaccucgacgagugguccauggccaccuacuaccuguucgacgagagcggcgaguucaagcuggccucccacauguacugcagcuucuacccccccgacgaggacgaggaggagggggacugcgaggaggaggaguucgagccguccacccaguacgaguacggcacggaggacgacuaccagggcaagccccucgaguucggggcgaccagcgccgcccugcagcccgaggaggagcaggaggaggacuggcuggacgacgacucccagcagaccgugggccagcaggacgggagcgaggacaaccagaccacgaccauccagaccaucguggagguccagccccagcucgagauggagcugaccccgguggugcagacgaucgaggucaacuccuucagcggcuaccugaagcucaccgacaacguguacaucaagaacgccgacaucguggaggaggcgaagaaggucaagcccaccgugguggucaacgccgccaacguguaccugaagcacgggggcggcguggccggggcccugaacaaggcgaccaacaacgccaugcaggucgaguccgacgacuacaucgccacgaacggcccccucaagguggggggcagcugcguccuguccggccacaaccuggccaagcacugccuccacgugguggggcccaacgucaacaagggcgaggacauccagcugcugaagagcgccuacgagaacuucaaccagcacgaggugcuccuggcgccgcugcucuccgccgggaucuucggcgccgaccccauccacagccugcgggugugcgucgacaccgugcgcaccaacguguaccuggccgucuucgacaagaaccucuacgacaagcugguguccagcuuccuggagaugaagagcgagaagcagguggagcagaagaucgccgagauccccaaggaggaggucaagcccuucaucaccgaguccaagccgagcguggagcagcggaagcaggacgacaagaagaucaaggcgugcguggaggaggucacgaccacccucgaggagaccaaguuccugacggagaaccugcuccuguacaucgacaucaacgggaaccugcaccccgacuccgccacccucgugagcgacaucgacaucaccuuccugaagaaggacgcccccuacaucgugggcgacgucgugcaggagggcgugcugaccgccgucgugauccccacgaagaaggccgggggcaccaccgagaugcucgcgaaggcccugcgcaaggugccgaccgacaacuacaucacgaccuaccccgggcagggccugaacggguacaccgucgaggaggccaagaccgugcucaagaagugcaaguccgccuucuacauccugcccagcaucaucuccaacgagaagcaggagauccugggcaccgugagcuggaaccuccgggagaugcuggcgcacgccgaggagacgcgcaagcugaugcccgucugcguggagaccaaggccaucguguccaccauccagcggaaguacaagggcaucaagauccaggagggggucguggacuacggcgcccgcuucuacuucuacaccagcaagacgaccguggccucccugaucaacacccucaacgaccugaacgagacccuggucacgaugccgcucggguacgugacccacggccugaaccuggaggaggcggcccgguacaugcgcagccucaaggugcccgccaccgucuccgugagcucccccgacgccgugaccgccuacaacggguaccugacgagcuccagcaagacccccgaggagcacuucaucgagaccaucucccuggcgggcagcuacaaggacuggagcuacuccggccagagcacccagcucgggaucgaguuccugaagcggggcgacaaguccgucuacuacacgagcaacccgaccaccuuccaccuggacggggaggugaucaccuucgacaaccucaagacgcugcugucccuccgcgaggugcggaccaucaaggucuucaccaccguggacaacaucaaccugcacacgcagguggucgacaugagcaugaccuacggccagcaguucggccccaccuaccuggacggggccgacgugaccaagaucaagccccacaacucccacgagggcaagacguucuacgugcucccgaacgacgacacccugcgcgucgaggccuucgaguacuaccacaccaccgaccccagcuuccuggggcgguacauguccgcccucaaccacacgaagaaguggaaguacccccaggugaacggccugaccagcaucaagugggccgacaacaacugcuaccuggcgaccgcccuccugacccugcagcagaucgagcucaaguucaaccccccggcccugcaggacgccuacuaccgcgcgcgggccggggaggccgccaacuucugcgcccugauccucgcguacugcaacaagacggugggcgagcugggcgacguccgcgagaccauguccuaccuguuccagcacgccaaccucgacagcugcaagcgggugcugaacgucgugugcaagaccugcgggcagcagcagaccacccugaagggcguggaggccgucauguacauggggacgcucuccuacgagcaguucaagaagggcgugcagauccccugcaccugcgggaagcaggccaccaaguaccuggugcagcaggagagccccuucgucaugauguccgcccccccggcgcacuacgagcugaagcacggcaccuucacgugcgccagcgaguacaccggcaacuaccagugcgggcacuacaagcacaucaccuccaaggagacccucuacugcaucgacggcgcccugcugacgaagagcagcgaguacaaggggcccaucaccgacguguucuacaaggagaacuccuacaccaccacgaucaagcccgugaccuacaagcucgacggcgucgugugcaccgagaucgaccccaagcuggacaacuacuacaagaaggacaacagcuacuucaccgagcagccgaucgaccuggugcccaaccagcccuaccccaacgccuccuucgacaacuucaaguucgucugcgacaacaucaaguucgccgacgaccucaaccagcugacgggguacaagaagccggcgagccgcgagcugaaggugaccuucuuccccgaccucaacggcgacguggucgccaucgacuacaagcacuacacccccuccuucaagaagggcgccaagcugcugcacaagcccaucguguggcacgugaacaacgccaccaacaaggcgacguacaagccgaacaccuggugcauccggugccucuggagcaccaagcccgucgagaccuccaacagcuucgacgugcugaaguccgaggacgcccaggggauggacaaccuggccugcgaggaccucaagcccgugagcgaggaggucguggagaaccccacgauccagaaggacgugcuggagugcaacgucaagaccaccgagguggugggcgacaucauccugaagccggccaacaacucccucaagaucaccgaggaggucgggcacacggaccugauggccgcguacguggacaacagcucccugaccaucaagaagcccaacgagcucagccgcgugcugggccugaagacccucgccacccacgggcuggccgccgucaacuccgugcccugggacacgaucgccaacuacgcgaagccguuccugaacaagguggucagcaccaccaccaacaucgugacgcgcugccucaaccgggugugcaccaacuacaugcccuacuucuucacccugcugcuccagcugugcaccuucacccgcuccacgaacagccggaucaaggccuccaugcccaccaccaucgccaagaacaccgucaagagcgugggcaaguucugccuggaggccagcuucaacuaccucaagucccccaacuucagcaagcugaucaacaucaucaucugguuccugcuccuguccgugugccugggcagccucaucuacuccacggccgcgcuggggguccugaugagcaaccucggcaugccguccuacugcaccggguaccgcgagggcuaccugaacagcaccaacgugaccaucgccacguacugcaccggcuccauccccugcagcgugugccuguccgggcucgacagccuggacaccuaccccucccuggagaccauccagaucacgaucagcuccuucaagugggaccucaccgccuucggccuggucgccgagugguuccuggccuacauccucuucacccgguucuucuacgugcuggggcuggcggccaucaugcagcucuucuucagcuacuucgccgugcacuucaucuccaacagcuggcugauguggcugaucaucaaccugguccagauggcccccaucuccgcgauggugcgcauguacaucuucuucgccagcuucuacuacguguggaagagcuacguccacgugguggacggcugcaacuccagcaccugcaugaugugcuacaagcggaaccgcgccacgcgggucgagugcaccaccaucgugaacgggguccgccgguccuucuacguguacgccaacggcggcaagggguucugcaagcuccacaacuggaacugcgugaacugcgacaccuucugcgccggcagcacguucaucuccgacgaggucgcgcgcgaccugagccugcaguucaagcggccgaucaaccccaccgaccaguccagcuacaucguggacuccgugaccgucaagaacgggagcauccaccucuacuucgacaaggccggccagaagaccuacgagcgccacucccugagccacuucgugaaccuggacaaccuccgggccaacaacacgaaggggucccugcccaucaacgugaucgucuucgacggcaagagcaagugcgaggaguccagcgccaaguccgccagcguguacuacucccagcugaugugccagcccauccuccugcuggaccaggcgcucgugagcgacgucggcgacagcgccgagguggccgugaagauguucgacgccuacgucaacaccuucuccagcaccuucaacgugccgauggagaagcugaagacccugguggccacggcggaggccgagcucgccaagaacgucucccuggacaacgugcugagcaccuucaucuccgccgcgcgccagggguucguggacagcgacgucgagaccaaggacgugguggagugccucaagcugucccaccagagcgacaucgaggucaccggcgacuccugcaacaacuacaugcugacguacaacaagguggagaacaugaccccccgggaccucggggccugcaucgacugcagcgcccgccacaucaacgcccagguggccaagucccacaacaucgcgcugaucuggaacgucaaggacuucaugagccuguccgagcagcuccggaagcagauccgcagcgccgccaagaagaacaaccugcccuucaagcugaccugcgccaccacgcgccagguggugaacgucgugaccaccaagaucgcccucaagggcgggugaggacuagucccuguucccagagcccacuuuuuuuucuuuuuuugaaauaaaauagccugucuuucagaucucaaaggcucuuuucagagccaccaaaaaaaaaaaaaaaaaaaaaaaaaaaaaaaaaaaaaaaaaaaaaaaaaaaaaaaaaaaaaaaaaaaaaaaaaaaaaaaaaaaaaaaaaaaaaaaaaaaaa

SEQ ID NO: 19755 - RNA, 6113 nt, Artificial Sequence
  SARS-CoV-2__MT811515.1__non-structural protein 3 (NSP3) mRNA gc
aggagagucccgcagucggcguccagcggcucugcuuguucgugugugugucguugcaggccuuauucaagcuuaccauggcccccaccaaggugaccuucggcgacgacacggucaucgaggugcagggguacaagagcgugaacaucaccuucgagcuggacgagcgcaucgacaagguccucaacgagaagugcuccgccuacaccguggagcugggcaccgaggugaacgaguucgcgugcgucguggccgacgccgugaucaagacgcugcagccggucagcgagcuccugaccccccuggacaucgaccucgacgagugguccauggccaccuacuaccuguucgacgagagcggggaguucaagcuggccucccacauguacugcagcuucuacccccccgacgaggacgaggaggagggcgacugcgaggaggaggaguucgagccguccacccaguacgaguacgggacggaggacgacuaccagggcaagccccucgaguucggcgcgaccagcgccgcccugcagcccgaggaggagcaggaggaggacuggcuggacgacgacucccagcagaccguggggcagcaggacggcagcgaggacaaccagaccacgaccauccagaccaucguggagguccagccccagcucgagauggagcugaccccgguggugcagacgaucgaggucaacuccuucagcggguaccugaagcucaccgacaacguguacaucaagaacgccgacaucguggaggaggcgaagaaggucaagcccaccgugguggucaacgccgccaacguguaccugaagcacggcgggggcguggccggcgcccugaacaaggcgaccaacaacgccaugcaggucgaguccgacgacuacaucgccacgaacgggccccucaaggugggcgggagcugcguccuguccggccacaaccuggccaagcacugccuccacguggugggccccaacgucaacaagggggaggacauccagcugcugaagagcgccuacgagaacuucaaccagcacgaggugcuccuggcgccgcugcucuccgccggcaucuucggggccgaccccauccacagccugcgggugugcgucgacaccgugcgcaccaacguguaccuggccgucuucgacaagaaccucuacgacaagcugguguccagcuuccuggagaugaagagcgagaagcagguggagcagaagaucgccgagauccccaaggaggaggucaagcccuucaucaccgaguccaagccgagcguggagcagcggaagcaggacgacaagaagaucaaggcgugcguggaggaggucacgaccacccucgaggagaccaaguuccugacggagaaccugcuccuguacaucgacaucaacggcaaccugcaccccgacuccgccacccucgugagcgacaucgacaucaccuuccugaagaaggacgcccccuacaucgugggggacgucgugcaggagggcgugcugaccgccgucgugauccccacgaagaaggccggcgggaccaccgagaugcucgcgaaggcccugcgcaaggugccgaccgacaacuacaucacgaccuaccccggccaggggcugaacggcuacaccgucgaggaggccaagaccgugcucaagaagugcaaguccgccuucuacauccugcccagcaucaucuccaacgagaagcaggagauccuggggaccgugagcuggaaccuccgggagaugcuggcgcacgccgaggagacgcgcaagcugaugcccgucugcguggagaccaaggccaucguguccaccauccagcggaaguacaagggcaucaagauccaggagggcgucguggacuacggggcccgcuucuacuucuacaccagcaagacgaccguggccucccugaucaacacccucaacgaccugaacgagacccuggucacgaugccgcucggcuacgugacccacgggcugaaccuggaggaggcggcccgguacaugcgcagccucaaggugcccgccaccgucuccgugagcucccccgacgccgugaccgccuacaacggcuaccugacgagcuccagcaagacccccgaggagcacuucaucgagaccaucucccuggcggggagcuacaaggacuggagcuacuccggccagagcacccagcucggcaucgaguuccugaagcggggggacaaguccgucuacuacacgagcaacccgaccaccuuccaccuggacggcgaggugaucaccuucgacaaccucaagacgcugcugucccuccgcgaggugcggaccaucaaggucuucaccaccguggacaacaucaaccugcacacgcagguggucgacaugagcaugaccuacgggcagcaguucggccccaccuaccuggacggcgccgacgugaccaagaucaagccccacaacucccacgaggggaagacguucuacgugcucccgaacgacgacacccugcgcgucgaggccuucgaguacuaccacaccaccgaccccagcuuccugggccgguacauguccgcccucaaccacacgaagaaguggaaguacccccaggugaacgggcugaccagcaucaagugggccgacaacaacugcuaccuggcgaccgcccuccugacccugcagcagaucgagcucaaguucaaccccccggcccugcaggacgccuacuaccgcgcgcgggccggcgaggccgccaacuucugcgcccugauccucgcguacugcaacaagacggugggggagcugggcgacguccgcgagaccauguccuaccuguuccagcacgccaaccucgacagcugcaagcgggugcugaacgucgugugcaagaccugcggccagcagcagaccacccugaaggggguggaggccgucauguacaugggcacgcucuccuacgagcaguucaagaagggggugcagauccccugcaccugcggcaagcaggccaccaaguaccuggugcagcaggagagccccuucgucaugauguccgcccccccggcgcaguacgagcugaagcacgggaccuucacgugcgccagcgaguacaccggcaacuaccagugcggccacuacaagcacaucaccuccaaggagacccucuacugcaucgacggggcccugcugacgaagagcagcgaguacaagggccccaucaccgacguguucuacaaggagaacuccuacaccaccacgaucaagcccgugaccuacaagcucgacggggucgugugcaccgagaucgaccccaagcuggacaacuacuacaagaaggacaacagcuacuucaccgagcagccgaucgaccuggugcccaaccagcccuaccccaacgccuccuucgacaacuucaaguucgucugcgacaacaucaaguucgccgacgaccucaaccagcugacgggcuacaagaagccggcgagccgcgagcugaaggugaccuucuuccccgaccucaacggggacguggucgccaucgacuacaagcacuacacccccuccuucaagaagggcgccaagcugcugcacaagcccaucguguggcacgugaacaacgccaccaacaaggcgacguacaagccgaacaccuggugcauccggugccucuggagcaccaagcccgucgagaccuccaacagcuucgacgugcugaaguccgaggacgcccagggcauggacaaccuggccugcgaggaccucaagcccgugagcgaggaggucguggagaaccccacgauccagaaggacgugcuggagugcaacgucaagaccaccgagguggugggggacaucauccugaagccggccaacaacucccucaagaucaccgaggaggucggccacacggaccugauggccgcguacguggacaacagcucccugaccaucaagaagcccaacgagcucagccgcgugcuggggcugaagacccucgccacccacggccuggccgccgucaacuccgugcccugggacacgaucgccaacuacgcgaagccguuccugaacaagguggucagcaccaccaccaacaucgugacgcgcugccucaaccgggugugcaccaacuacaugcccuacuucuucacccugcugcuccagcugugcaccuucacccgcuccacgaacagccggaucaaggccuccaugcccaccaccaucgccaagaacaccgucaagagcguggggaaguucugccuggaggccagcuucaacuaccucaagucccccaacuucagcaagcugaucaacaucaucaucugguuccugcuccuguccgugugccugggcagccucaucuacuccacggccgcgcugggcguccugaugagcaaccucgggaugccguccuacugcaccggcuaccgcgagggguaccugaacagcaccaacgugaccaucgccacguacugcaccggcuccauccccugcagcgugugccuguccggccucgacagccuggacaccuaccccucccuggagaccauccagaucacgaucagcuccuucaagugggaccucaccgccuucgggcuggucgccgagugguuccuggccuacauccucuucacccgguucuucuacgugcugggccuggcggccaucaugcagcucuucuucagcuacuucgccgugcacuucaucuccaacagcuggcugauguggcugaucaucaaccugguccagauggcccccaucuccgcgauggugcgcauguacaucuucuucgccagcuucuacuacguguggaagagcuacguccacgugguggacgggugcaacuccagcaccugcaugaugugcuacaagcggaaccgcgccacgcgggucgagugcaccaccaucgugaacggcguccgccgguccuucuacguguacgccaacgggggcaagggcuucugcaagcuccacaacuggaacugcgugaacugcgacaccuucugcgccgggagcacguucaucuccgacgaggucgcgcgcgaccugagccugcaguucaagcggccgaucaaccccaccgaccaguccagcuacaucguggacuccgugaccgucaagaacggcagcauccaccucuacuucgacaaggccgggcagaagaccuacgagcgccacucccugagccacuucgugaaccuggacaaccuccgggccaacaacacgaagggcucccugcccaucaacgugaucgucuucgacgggaagagcaagugcgaggaguccagcgccaaguccgccagcguguacuacucccagcugaugugccagcccauccuccugcuggaccaggcgcucgugagcgacgucggcgacagcgccgagguggccgugaagauguucgacgccuacgucaacaccuucuccagcaccuucaacgugccgauggagaagcugaagacccugguggccacggcggaggccgagcucgccaagaacgucucccuggacaacgugcugagcaccuucaucuccgccgcgcgccagggcuucguggacagcgacgucgagaccaaggacgugguggagugccucaagcugucccaccagagcgacaucgaggucaccggggacuccugcaacaacuacaugcugacguacaacaagguggagaacaugaccccccgggaccucggcgccugcaucgacugcagcgcccgccacaucaacgcccagguggccaagucccacaacaucgcgcugaucuggaacgucaaggacuucaugagccuguccgagcagcuccggaagcagauccgcagcgccgccaagaagaacaaccugcccuucaagcugaccugcgccaccacgcgccagguggugaacgucgugaccaccaagaucgcccucaaggggggcugaggacuagucccuguucccagagcccacuuuuuuuucuuuuuuugaaauaaaauagccugucuuucagaucucaaaggcucuuuucagagccaccaaaaaaaaaaaaaaaaaaaaaaaaaaaaaaaaaaaaaaaaaaaaaaaaaaaaaaaaaaaaaaaaaaaaaaaaaaaaaaaaaaaaaaaaaaaaaaaaaaaaa

SEQ ID NO: 19756 - RNA, 6113 nt, Artificial Sequence
  SARS-CoV-2__MT811519.1__non-structural protein 3 (NSP3) mRNA gc
aggagagucccgcagucggcguccagcggcucugcuuguucgugugugugucguugcaggccuuauucaagcuuaccauggcccccaccaaggugaccuucggcgacgacacggucaucgaggugcagggguacaagagcgugaacaucaccuucgagcuggacgagcgcaucgacaagguccucaacgagaagugcuccgccuacaccguggagcugggcaccgaggugaacgaguucgcgugcgucguggccgacgccgugaucaagacgcugcagccggucagcgagcuccugaccccccuggggaucgaccucgacgagugguccauggccaccuacuaccuguucgacgagagcggcgaguucaagcuggccucccacauguacugcuucuucuacccccccgacgaggacgaggaggagggggacugcgaggaggaggaguucgagccgagcacccaguacgaguacggcacggaggacgacuaccagggcaagccccucgaguucggggcgaccuccgccgcccugcagcccgaggaggagcaggaggaggacuggcuggacgacgacagccagcagaccgugggccagcaggacggguccgaggacaaccagaccacgaccauccagaccaucguggagguccagccccagcucgagauggagcugaccccgguggugcagacgaucgaggucaacagcuucuccggcuaccugaagcucaccgacaacguguacaucaagaacgccgacaucguggaggaggcgaagaaggucaagcccaccgugguggucaacgccgccaacguguaccugaagcacgggggcggcguggccggggcccugaacaaggcgaccaacaacgccaugcaggucgagagcgacgacuacaucgccacgaacggcccccucaagguggggggcuccugcguccugagcggccacaaccuggccaagcacugccuccacgugguggggcccaacgucaacaagggcgaggacauccagcugcugaaguccgccuacgagaacuucaaccagcacgaggugcuccuggcgccgcugcucagcgccgggaucuucggcgccgaccccauccacucccugcgggugugcgucgacaccgugcgcaccaacguguaccuggccgucuucgacaagaaccucuacgacaagcuggugagcuccuuccuggagaugaagagcgagaagcagguggagcagaagaucgccgagauccccaaggaggaggucaagcccuucaucaccgagagcaagccguccguggagcagcggaagcaggacgacaagaagaucaaggcgugcguggaggaggucacgaccacccucgaggagaccaaguuccugacggagaaccugcuccuguacaucgacaucaacgggaaccugcaccccgacagcgccacccucguguccgacaucgacaucaccuuccugaagaaggacgcccccuacaucgugggcgacgucgugcaggagggcgugcugaccgccgucgugauccccacgaagaaggccgggggcaccaccgagaugcucgcgaaggcccugcgcaaggugccgaccgacaacuacaucacgaccuaccccgggcagggccugaacggguacaccgucgaggaggccaagaccgugcucaagaagugcaagagcgccuucuacauccugcccuccaucaucagcaacgagaagcaggagauccugggcaccguguccuggaaccuccgggagaugcuggcgcacgccgaggagacgcgcaagcugaugcccgucugcguggagaccaaggccaucgugagcaccauccagcggaaguacaagggcaucaagauccaggagggggucguggacuacggcgcccgcuucuacuucuacaccuccaagacgaccguggccagccugaucaacacccucaacgaccugaacgagacccuggucacgaugccgcucggguacgugacccacggccugaaccuggaggaggcggcccgguacaugcgcucccucaaggugcccgccaccgucagcguguccagccccgacgccgugaccgccuacaacggguaccugacguccagcuccaagacccccgaggagcacuucaucgagaccaucagccuggcgggcuccuacaaggacuggagcuacagcggccaguccacccagcucgggaucgaguuccugaagcggggcgacaagagcgucuacuacacguccaacccgaccaccuuccaccuggacggggaggugaucaccuucgacaaccucaagacgcugcugagccuccgcgaggugcggaccaucaaggucuucaccaccguggacaacaucaaccugcacacgcagguggucgacauguccaugaccuacggccagcaguucggccccaccuaccuggacggggccgacgugaccaagaucaagccccacaacagccacgagggcaagacguucuacgugcucccgaacgacgacacccugcgcgucgaggccuucgaguacuaccacaccaccgaccccuccuuccuggggcgguacaugagcgcccucaaccacacgaagaaguggaaguacccccaggugaacggccugaccuccaucaagugggccgacaacaacugcuaccuggcgaccgcccuccugacccugcagcagaucgagcucaaguucaaccccccggcccugcaggacgccuacuaccgcgcgcgggccggggaggccgccaacuucugcgcccugauccucgcguacugcaacaagacggugggcgagcugggcgacguccgcgagaccaugagcuaccuguuccagcacgccaaccucgacuccugcaagcgggugcugaacgucgugugcaagaccugcgggcagcagcagaccacccugaagggcguggaggccgucauguacauggggacgcucagcuacgagcaguucaagaagggcgugcagauccccugcaccugcgggaagcaggccaccaaguaccuggugcagcaggagucccccuucgucaugaugagcgcccccccggcgcaguacgagcugaagcacggcaccuucacgugcgccuccgaguacaccggcaacuaccagugcgggcacuacaagcacaucaccagcaaggagacccucuacugcaucgacggcgcccugcugacgaaguccagcgaguacaaggggcccaucaccgacguguucuacaaggagaacagcuacaccaccacgaucaagcccgugaccuacaagcucgacggcgucgugugcaccgagaucgaccccaagcuggacaacuacuacaagaaggacaacuccuacuucaccgagcagccgaucgaccuggugcccaaccagcccuaccccaacgccagcuucgacaacuucaaguucgucugcgacaacaucaaguucgccgacgaccucaaccagcugacgggguacaagaagccggcgucccgcgagcugaaggugaccuucuuccccgaccucaacggcgacguggucgccaucgacuacaagcacuacacccccagcuucaagaagggcgccaagcugcugcacaagcccaucguguggcacgugaacaacgccaccaacaaggcgacguacaagccgaacaccuggugcauccggugccucugguccaccaagcccgucgagaccagcaacuccuucgacgugcugaagagcgaggacgcccaggggauggacaaccuggccugcgaggaccucaagcccguguccgaggaggucguggagaaccccacgauccagaaggacgugcuggagugcaacgucaagaccaccgagguggugggcgacaucauccugaagccggccaacaacagccucaagaucaccgaggaggucgggcacacggaccugauggccgcguacguggacaacuccagccugaccaucaagaagcccaacgagcucucccgcgugcugggccugaagacccucgccacccacgggcuggccgccgucaacagcgugcccugggacacgaucgccaacuacgcgaagccguuccugaacaagguggucuccaccaccaccaacaucgugacgcgcugccucaaccgggugugcaccaacuacaugcccuacuucuucacccugcugcuccagcugugcaccuucacccgcagcacgaacucccggaucaaggccagcaugcccaccaccaucgccaagaacaccgucaaguccgugggcaaguucugccuggaggccagcuucaacuaccucaagagccccaacuucuccaagcugaucaacaucaucaucugguuccugcuccugagcgugugccugggcucccucaucuacagcacggccgcgcuggggguccugauguccaaccucggcaugccgagcuacugcaccggguaccgcgagggcuaccugaacuccaccaacgugaccaucgccacguacugcaccggcagcauccccugcuccgugugccugagcgggcucgacucccuggacaccuaccccagccuggagaccauccagaucacgaucuccagcuucaagugggaccucaccgccuucggccuggucgccgagugguuccuggccuacauccucuucacccgguucuucuacgugcuggggcuggcggccaucaugcagcucuucuucuccuacuucgccgugcacuucaucagcaacuccuggcugauguggcugaucaucaaccugguccagauggcccccaucagcgcgauggugcgcauguacaucuucuucgccuccuucuacuacguguggaagagcuacguccacgugguggacggcugcaacagcuccaccugcaugaugugcuacaagcggaaccgcgccacgcgggucgagugcaccaccaucgugaacgggguccgccggagcuucuacguguacgccaacggcggcaagggguucugcaagcuccacaacuggaacugcgugaacugcgacaccuucugcgccggcuccacguucaucagcgacgaggucgcgcgcgaccugucccugcaguucaagcggccgaucaaccccaccgaccagagcuccuacaucguggacagcgugaccgucaagaacggguccauccaccucuacuucgacaaggccggccagaagaccuacgagcgccacagccugucccacuucgugaaccuggacaaccuccgggccaacaacacgaaggggagccugcccaucaacgugaucgucuucgacggcaaguccaagugcgaggagagcuccgccaagagcgccuccguguacuacagccagcugaugugccagcccauccuccugcuggaccaggcgcucguguccgacgucggcgacagcgccgagguggccgugaagauguucgacgccuacgucaacaccuucagcuccaccuucaacgugccgauggagaagcugaagacccugguggccacggcggaggccgagcucgccaagaacgucagccuggacaacgugcuguccaccuucaucagcgccgugcgccagggguucgucgacuccgacguggagaccaaggacguggucgagugccucaagcugagccaccaguccgacaucgaggugaccggcgacagcugcaacaacuacaugcugacguacaacaagguggagaacaugaccccccgggaccucggggcgugcaucgacugcuccgcccgccacaucaacgcccaggucgccaagagccacaacaucgcccugaucuggaacgugaaggacuucaugucccugagcgagcagcuccggaagcagauccgcuccgcggccaagaagaacaaccugcccuucaagcugaccugcgccaccacgcgccagguggucaacguggugaccaccaagaucgcccucaagggcgggugaggacuagucccuguucccagagcccacuuuuuuuucuuuuuuugaaauaaaauagccugucuuucagaucucaaaggcucuuuucagagccaccaaaaaaaaaaaaaaaaaaaaaaaaaaaaaaaaaaaaaaaaaaaaaaaaaaaaaaaaaaaaaaaaaaaaaaaaaaaaaaaaaaaaaaaaaaaaaaaaaaaaa

SEQ ID NO: 19757 - RNA, 6113 nt, Artificial Sequence
  SARS-CoV-2__MT811521.1__non-structural protein 3 (NSP3) mRNA gc
aggagagucccgcagucggcguccagcggcucugcuuguucgugugugugucguugcaggccuuauucaagcuuaccauggcccccaccaaggugaccuucggcgacgacacggucaucgaggugcagggguacaagagcgugaacaucaccuucgagcuggacgagcgcaucgacaagguccucaacgagaagugcuccgccuacaccguggagcugggcaccgaggugaacgaguucgcgugcgucguggccgacgccgugaucaagacgcugcagccggucagcgagcuccugaccccccuggggaucgaccucgacgagugguccauggccaccuacuaccuguucgacgagagcggcgaguucaagcuggccucccacauguacugcagcuucuacccccccgacgaggacgaggaggagggggacugcgaggaggaggaguucgagccguccacccaguacgaguacggcacggaggacgacuaccagggcaagccccucgaguucggggcgaccagcgccgcccugcagcccgaggaggagcaggaggaggacuggcuggacgacgacucccagcagaccgugggccagcaggacgggagcgaggacaaccagaccacgaccauccagaccaucguggagguccagccccagcucgagauggagcugaccccgguggugcagacgaucgaggucaacuccuucagcggcuaccugaagcucaccgacaacguguacaucaagaacgccgacaucguggaggaggcgaagaaggucaagcccaccgugguggucaacgccgccaacguguaccugaagcacgggggcggcguggccggggcccugaacaaggcgaccaacaacgccaugcaggucgaguccgacgacuacaucgccacgaacggcccccucaagguggggggcagcugcguccuguccggccacaaccuggccaagcacugccuccacgugguggggcccaacgucaacaagggcgaggacauccagcugcugaagagcgccuacgagaacuucaaccagcacgaggugcuccuggcgccgcugcucuccgccgggaucuucggcgccgaccccauccacagccugcgggugugcgucgacaccgugcgcaccaacguguaccuggccgucuucgacaagaaccucuacgacaagcugguguccagcuuccuggagaugaagagcgagaagcagguggagcagaagaucgccgagauccccaaggaggaggucaagcccuucaucaccgaguccaagccgagcguggagcagcggaagcaggacgacaagaagaucaaggcgugcguggaggaggucacgaccacccucgaggagaccaaguuccugacggagaaccugcuccuguacaucgacaucaacgggaaccugcaccccgacuccgccacccucgugagcgacaucgacaucaccuuccugaagaaggacgcccccuacaucgugggcgacgucgugcaggagggcgugcugaccgccgucgugauccccacgaagaaggccgggggcaccaccgagaugcucgcgaaggcccugcgcaaggugccgaccgacaacuacaucacgaccuaccccgggcagggccugaacggguacaccgucgaggaggccaagaccgugcucaagaagugcaaguccgccuucuacauccugcccagcaucaucuccaacgagaagcaggagauccugggcaccgugagcuggaaccuccgggagaugcuggcgcacgccgaggagacgcgcaagcugaugcccgucugcguggagaccaaggccaucguguccaccauccagcggaaguacaagggcaucaagauccaggagggggucguggacuacggcgcccgcuucuacuucuacaccagcaagacgaccguggccucccugaucaacacccucaacgaccugaacgagacccuggucacgaugccgcucggguacgugacccacggccugaaccuggaggaggcggcccgguacaugcgcagccucaaggugcccgccaccgucuccgugagcucccccgacgccgugaccgccuacaacggguaccugacgagcuccagcaagacccccgaggagcacuucaucgagaccaucucccuggcgggcagcuacaaggacuggagcuacuccggccagagcacccagcucgggaucgaguuccugaagcggggcgacaaguccgucuacuacacgagcaacccgaccaccuuccaccuggacggggaggugaucaccuucgacaaccucaagacgcugcugucccuccgcgaggugcggaccaucaaggucuucaccaccguggacaacaucaaccugcacacgcagguggucgacaugagcaugaccuacggccagcaguucggccccaccuaccuggacggggccgacgugaccaagaucaagccccacaacucccacgagggcaagacguucuacgugcucccgaacgacgacacccugcgcgucgaggccuucgaguacuaccacaccaccgaccccagcuuccuggggcgguacauguccgcccucaaccacacgaagaaguggaaguacccccaggugaacggccugaccagcaucaagugggccgacaacaacugcuaccuggcgaccgcccuccugacccugcagcagaucgagcucaaguucaaccccccggcccugcaggacgccuacuaccgcgcgcgggccggggaggccgccaacuucugcgcccugauccucgcguacugcaacaagacggugggcgagcugggcgacguccgcgagaccauguccuaccuguuccagcacgccaaccucgacagcugcaagcgggugcugaacgucgugugcaagaccugcgggcagcagcagaccacccugaagggcguggaggccgucauguacauggggacgcucuccuacgagcaguucaagaagggcgugcagauccccugcaccugcgggaagcaggccaccaaguaccuggugcagcaggagagccccuucgucaugauguccgcccccccggcgcaguacgagcugaagcacggcaccuucacgugcgccagcgaguacaccggcaacuaccagugcgggcacuacaagcacaucaccuccaaggagacccucuacugcaucgacggcgcccugcugacgaagagcagcgaguacaaggggcccaucaccgacguguucuacaaggagaacuccuacaccaccacgaucaagcccgugaccuacaagcucgacggcgucgugugcaccgagaucgaccccaagcuggacaacuacuacaagaaggacaacagcuacuucaccgagcagccgaucgaccugauccccaaccagcccuaccccaacgccuccuucgacaacuucaaguucgugugcgacaacaucaaguucgccgacgaccucaaccagcugacgggguacaagaagccggcgagccgcgagcugaaggucaccuucuuccccgaccucaacggcgacgugguggccaucgacuacaagcacuacacccccuccuucaagaagggcgccaagcugcugcacaagcccaucgucuggcacgugaacaacgccaccaacaaggcgacguacaagccgaacaccuggugcauccggugccucuggagcaccaagcccguggagaccuccaacagcuucgacguccugaaguccgaggacgcccaggggauggacaaccuggccugcgaggaccucaagcccgugagcgaggagguggucgagaaccccacgauccagaaggacgugcuggagugcaacgugaagaccaccgaggucgugggcgacaucauccugaagccggccaacaacucccucaagaucaccgaggagguggggcacacggaccugauggccgcguacgucgacaacagcucccugaccaucaagaagcccaacgagcucagccgcgugcugggccugaagacccucgccacccacgggcuggccgccgccaacuccgugcccugggacacgaucgcgaacuacgccaagccguuccugaacaaggucgugagcaccaccaccaacaucgugacgcgcugccucaaccgggucugcaccaacuacaugcccuacuucuucacccugcugcuccagcugugcaccuucacccgcuccacgaacagccggaucaaggccuccaugcccaccaccaucgccaagaacaccgugaagagcgugggcaaguucugccuggaggccagcuucaacuaccucaagucccccaacuucagcaagcugaucaacaucaucaucugguuccugcuccuguccgucugccugggcagccucaucuacuccacggcggcccugggggugcugaugagcaaccucggcaugccguccuacugcaccggguaccgcgagggcuaccugaacagcaccaacgugaccaucgccacguacugcaccggcuccauccccugcagcgucugccuguccgggcucgacagccuggacaccuaccccucccuggagaccauccagaucacgaucagcuccuucaagugggaccucaccgccuucggccugguggccgagugguuccuggcguacauccucuucacccgguucuucuacgugcuggggcuggccgccaucaugcagcucuucuucagcuacuucgccguccacuucaucuccaacagcuggcugauguggcugaucaucaaccuggugcagauggcgcccaucuccgccauggugcgcauguacaucuucuucgccagcuucuacuacgucuggaagagcuacgugcacguggucgacggcugcaacuccagcaccugcaugaugugcuacaagcggaaccgcgccacgcggguggagugcaccaccaucgugaacgggguccgccgguccuucuacguguacgccaacggcggcaagggguucugcaagcuccacaacuggaacugcgucaacugcgacaccuucugcgcgggcagcacguucaucuccgacgagguggcccgcgaccugagccugcaguucaagcggccgaucaaccccaccgaccaguccagcuacaucguggacuccgucaccgugaagaacgggagcauccaccucuacuucgacaaggccggccagaagaccuacgagcgccacucccugagccacuucgugaaccuggacaaccuccgggccaacaacacgaaggggucccugcccaucaacgucaucguguucgacggcaagagcaagugcgaggaguccagcgccaaguccgcgagcguguacuacucccagcugaugugccagcccauccuccugcuggaccaggcccucgucagcgacgugggcgacagcgccgagguggccgucaagauguucgacgccuacgugaacaccuucuccagcaccuucaacgugccgauggagaagcugaagacccuggucgcgacggccgaggccgagcucgccaagaacgugucccuggacaacgugcugagcaccuucaucuccgcggcccgccagggguucgucgacagcgacguggagaccaaggacguggucgagugccucaagcugucccaccagagcgacaucgaggugaccggcgacuccugcaacaacuacaugcugacguacaacaagguggagaacaugaccccccgggaccucggggccugcaucgacugcagcgcccgccacaucaacgcccaggucgcgaagucccacaacaucgcccugaucuggaacgugaaggacuucaugagccuguccgagcagcuccggaagcagauccgcagcgccgccaagaagaacaaccugcccuucaagcugaccugcgccaccacgcgccagguggucaacguggugaccaccaagaucgcgcucaagggcgggugaggacuagucccuguucccagagcccacuuuuuuuucuuuuuuugaaauaaaauagccugucuuucagaucucaaaggcucuuuucagagccaccaaaaaaaaaaaaaaaaaaaaaaaaaaaaaaaaaaaaaaaaaaaaaaaaaaaaaaaaaaaaaaaaaaaaaaaaaaaaaaaaaaaaaaaaaaaaaaaaaaaaa

SEQ ID NO: 19758 - RNA, 6113 nt, Artificial Sequence
  SARS-CoV-2__MT811528.1__non-structural protein 3 (NSP3) mRNA gc
aggagagucccgcagucggcguccagcggcucugcuuguucgugugugugucguugcaggccuuauucaagcuuaccauggcccccaccaaggugaccuucggcgacgacacggucaucgaggugcagggguacaagagcgugaacaucaccuucgagcuggacgagcgcaucgacaagguccucaacgagaagugcuccgccuacaccguggagcugggcaccgaggugaacgaguucgcgugcgucguggccgacgccgugaucaagacgcugcagccggucagcgagcuccugaccccccuggggaucgaccucgacgagugguccauggccaccuacuaccuguucgacgagagcggcgaguucaagcuggccucccacauguacugcagcuucuacccccccgacgaggacgaggaggagggggacugcgaggaggaggaguucgagccguccacccaguacgaguacggcacggaggacgacuaccagggcaagccccucgaguucggggcgaccagcgccgcccugcagcccgaggaggagcaggaggaggacuggcuggacgacgacucccagcagaccgugggccagcaggacgggagcgaggacaaccagaccacgaccauccagaccaucguggagguccagccccagcucgagauggagcugaccccgguggugcagacgaucgaggucaacuccuucagcggcuaccugaagcucaccgacaacguguacaucaagaacgccgacaucguggaggaggcgaagaaggucaagcccaccgugguggucaacgccgccaacguguaccugaagcacgggggcggcguggccggggcccugaacaaggcgaccaacaacgccaugcaggucgaguccgacgacuacaucgccacgaacggcccccucaagguggggggcagcugcguccuguccggccacaaccuggccaagcacugccuccacgugguggggcccaacgucaacaagggcgaggacauccagcugcugaagagcgccuacgagaacuucaaccagcacgaggugcuccuggcgccgcugcucuccgccgggaucuucggcgccgaccccauccacagccugcgggugugcgucgacaccgugcgcaccaacguguaccuggccgucuucgacaagaaccucuacgacaagcugguguccagcuuccuggagaugaagagcgagaagcagguggagcagaagaucgccgagauccccaaggaggaggucaagcccuucaucaccgaguccaagccgagcguggagcagcggaagcaggacgacaagaagaucaaggcgugcguggaggaggucacgaccacccucgaggagaccaaguuccugacggagaaccugcuccuguacaucgacaucaacgggaaccugcaccccgacuccgccacccucgugagcgacaucgacaucaccuuccugaagaaggacgcccccuacaucgugggcgacgucgugcaggagggcgugcugaccgccgucgugauccccacgaagaaggccgggggcaccaccgagaugcucgcgaaggcccugcgcaaggugccgaccgacaacuacaucacgaccuaccccgggcagggccugaacggguacaccgucgaggaggccaagaccgugcucaagaagugcaaguccgccuucuacauccugcccagcaucaucuccaacgagaagcaggagauccugggcaccgugagcuggaaccuccgggagaugcuggcgcacgccgaggagacgcgcaagcugaugcccgucugcguggagaccaaggccaucguguccaccauccagcggaaguacaagggcaucaagauccaggagggggucguggacuacggcgcccgcuucuacuucuacaccagcaagacgaccguggccucccugaucaacacccucaacgaccugaacgagacccuggucacgaugccgcucggguacgugacccacggccugaaccuggaggaggcggcccgguacaugcgcagccucaaggugcccgccaccgucuccgugagcucccccgacgccgugaccgccuacaacggguaccugacgagcuccagcaagacccccgaggagcacuucaucgagaccaucucccuggcgggcagcuacaaggacuggagcuacuccggccagagcacccagcucgggaucgaguuccugaagcggggcgacaaguccgucuacuacacgagcaacccgaccaccuuccaccuggacggggaggugaucaccuucgacaaccucaagacgcugcugucccuccgcgaggugcggaccaucaaggucuucaccaccguggacaacaucaaccugcacacgcagguggucgacaugagcaugaccuacggccagcaguucggccccaccuaccuggacggggccgacgugaccaagaucaagccccacaacucccacgagggcaagacguucuacgugcucccgaacgacgacacccugcgcgucgaggccuucgaguacuaccacaccaccgaccccagcuuccuggggcgguacauguccgcccucaaccacacgaagaaguggaaguacccccaggugaacggccugaccagcaucaagugggccgacaacaacugcuaccuggcgaccgcccuccugacccugcagcagaucgagcucaaguucaaccccccggcccugcaggacgccuacuaccgcgcgcgggccggggaggccgccaacuucugcgcccugauccucgcguacugcaacaagacggugggcgagcugggcgacguccgcgagaccauguccuaccuguuccagcacgccaaccucgacagcugcaagcgggugcugaacgucgugugcaagaccugcgggcagcagcagaccacccugaagggcguggaggccgucauguacauggggacgcucuccuacgagcaguucaagaagggcgugcagauccccugcaccugcgggaagcaggccaccaaguaccuggugcagcaggagagccccuucgucaugauguccgcccccccggcgcaguacgagcugaagcacggcaccuucacgugcgccagcgaguacaccggcaacuaccagugcgggcacuacaagcacaucaccuccaaggagacccucuacugcaucgacggcgcccugcugacgaagagcagcgaguacaaggggcccaucaccgacguguucuacaaggagaacuccuacaccaccacgaucaagcccgugaccuacaagcucgacggcgucgugugcaccgagaucgaccccaagcuggacaacuacuacaagaaggacaacagcuacuucaccgagcagccgaucgaccuggugcccaaccagcccuaccccaacgccuccuucgacaacuucaaguucgucugcgacaacaucaaguucgccgacgaccucaaccagcugacgggguacaagaagccggcgagccgcgagcugaaggugaccuucuuccccgaccucaacggcgacguggucgccaucgacuacaagcacuacacccccuccuucaagaagggcgccaagcugcugcacaagcccaucguguggcacgugaacaacgccaccaacaaggcgacguacaagccgaacaccuggugcauccggugccucuggagcaccaagcccgucgagaccuccaacagcuucgacgugcugaaguccgaggacgcccaggggauggacaaccuggccugcgaggaccucaagcccgugagcgaggaggucguggagaaccccacgauccagaaggacgugcuggagugcaacgucaagaccaccgagguggugggcgacaucauccugaagccggccaacaacucccucaagaucaccgaggaggucgggcacacggaccugauggccgcguacguggacaacagcucccugaccaucaagaagcccaacgagcucagccgcgugcugggccugaagacccucgccacccacgggcuggccgccgucaacuccgugcccugggacacgaucgccaacuacgcgaagccguuccugaacaagguggucagcaccaccaccaacaucgugacgcgcugccucaaccgggugugcaccaacuacaugcccuacuucuucacccugcugcuccagcugugcaccuucacccgcuccacgaacagccggaucaaggccuccaugcccaccaccaucgccaagaacaccgucaagagcgugggcaaguucugccuggaggccagcuucaacuaccucaagucccugaacuucagcaagcugaucaacaucaucaucugguuccuccugcuguccgugugccucggcagccugaucuacuccacggccgcgcuggggguccucaugagcaaccugggcaugcccuccuacugcaccggguaccgcgagggcuaccugaacagcaccaacgugaccaucgccacguacugcaccggcuccaucccgugcagcgugugccucuccgggcuggacagccuggacaccuaccccucccucgagaccauccagaucacgaucagcuccuucaagugggaccugaccgccuucggccuggucgccgagugguuccucgccuacauccuguucacccgguucuucuacgugcuggggcucgcggccaucaugcagcuguucuucagcuacuucgccgugcacuucaucuccaacagcuggcugauguggcugaucaucaaccucguccagauggcccccaucuccgcgauggugcgcauguacaucuucuucgccagcuucuacuacguguggaagagcuacguccacgugguggacggcugcaacuccagcaccugcaugaugugcuacaagcggaaccgcgccacgcgggucgagugcaccaccaucgugaacgggguccgccgguccuucuacguguacgccaacggcggcaagggguucugcaagcugcacaacuggaacugcgugaacugcgacaccuucugcgccggcagcacguucaucuccgacgaggucgcgcgcgaccugagccuccaguucaagcggcccaucaacccgaccgaccaguccagcuacaucguggacuccgugaccgucaagaacgggagcauccaccuguacuucgacaaggccggccagaagaccuacgagcgccacucccugagccacuucgugaaccucgacaaccugcgggccaacaacacgaaggggucccugcccaucaacgugaucgucuucgacggcaagagcaagugcgaggaguccagcgccaaguccgccagcguguacuacucccagcucaugugccagcccauccugcugcucgaccaggcgcuggugagcgacgucggcgacagcgccgagguggccgugaagauguucgacgccuacgucaacaccuucuccagcaccuucaacgugcccauggagaagcugaagacccucguggccacggcggaggccgagcuggccaagaacgucucccuggacaacgugcucagcaccuucaucuccgccgcgcgccagggguucguggacagcgacgucgagaccaaggacgugguggagugccugaagcugucccaccagagcgacaucgaggucaccggcgacuccugcaacaacuacaugcucacguacaacaagguggagaacaugaccccgcgggaccugggggccugcaucgacugcagcgcccgccacaucaacgcccagguggccaagucccacaacaucgcgcugaucuggaacgucaaggacuucaugagccucuccgagcagcugcggaagcagauccgcagcgccgccaagaagaacaaccugcccuucaagcucaccugcgccaccacgcgccagguggugaacgucgugaccaccaagaucgcccugaagggcgggugaggacuagucccuguucccagagcccacuuuuuuuucuuuuuuugaaauaaaauagccugucuuucagaucucaaaggcucuuuucagagccaccaaaaaaaaaaaaaaaaaaaaaaaaaaaaaaaaaaaaaaaaaaaaaaaaaaaaaaaaaaaaaaaaaaaaaaaaaaaaaaaaaaaaaaaaaaaaaaaaaaaaa

SEQ ID NO: 19759 - RNA, 6113 nt, Artificial Sequence
  SARS-CoV-2__MT811530.1__non-structural protein 3 (NSP3) mRNA gc
aggagagucccgcagucggcguccagcggcucugcuuguucgugugugugucguugcaggccuuauucaagcuuaccauggcccccaccaaggugaccuucggcgacgacacggucaucgaggugcagggguacaagagcgugaacaucaccuucgagcuggacgagcgcaucgacaagguccucaacgagaagugcuccgccuacaccguggagcugggcaccgaggugaacgaguucgcgugcgucguggccgacgccgugaucaagacgcugcagccggucagcgagcuccugaccccccuggggaucgaccucgacgagugguccauggccaccuacuaccuguucgacgagagcggcgaguucaagcuggccucccacauguacugcagcuucuacccccccgacgaggacgaggaggagggggacugcgaggaggaggaguucgagccguccacccaguacgaguacggcacggaggacgacuaccagggcaagccccucgaguucggggcgaccagcgccgcccugcagcccgaggaggagcaggaggaggacuggcuggacgacgacucccagcagaccgugggccagcaggacgggagcgaggacaaccagaccacgaccauccagaccaucguggagguccagccccagcucgagauggagcugaccccgguggugcagacgaucgaggucaacuccuucagcggcuaccugaagcucaucgacaacguguacaucaagaacgccgacaucguggaggaggcgaagaaggucaagcccaccgugguggucaacgccgccaacguguaccugaagcacgggggcggcguggccggggcccugaacaaggcgaccaacaacgccaugcaggucgaguccgacgacuacaucgccaccaacggcccccucaagguggggggcagcugcguccuguccggccacaaccuggccaagcacugccuccacgugguggggcccaacgucaacaagggcgaggacauccagcugcugaagagcgccuacgagaacuucaaccagcacgaggugcuccuggcgccgcugcucuccgccgggaucuucggcgccgaccccauccacagccugcgggugugcgucgacacggugcgcaccaacguguaccuggccgucuucgacaagaaccucuacgacaagcugguguccagcuuccuggagaugaagagcgagaagcagguggagcagaagaucgccgagauccccaaggaggaggucaagcccuucaucaccgaguccaagccgagcguggagcagcggaagcaggacgacaagaagaucaaggcgugcguggaggaggucaccacgacccucgaggagaccaaguuccugaccgagaaccugcuccuguacaucgacaucaacgggaaccugcaccccgacuccgccacgcucgugagcgacaucgacaucaccuuccugaagaaggacgcccccuacaucgugggcgacgucgugcaggagggcgugcugaccgccgucgugauccccaccaagaaggccgggggcacgaccgagaugcucgcgaaggcccugcgcaaggugccgaccgacaacuacaucaccacguaccccgggcagggccugaacggguacaccgucgaggaggccaagaccgugcucaagaagugcaaguccgccuucuacauccugcccagcaucaucuccaacgagaagcaggagauccugggcaccgugagcuggaaccuccgggagaugcuggcgcacgccgaggagacccgcaagcugaugcccgucugcguggagacgaaggccaucguguccaccauccagcggaaguacaagggcaucaagauccaggagggggucguggacuacggcgcccgcuucuacuucuacaccagcaagaccacgguggccucccugaucaacacccucaacgaccugaacgagacccuggucaccaugccgcucggguacgugacgcacggccugaaccuggaggaggcggcccgguacaugcgcagccucaaggugcccgccaccgucuccgugagcucccccgacgccgugaccgccuacaacggguaccugaccagcuccagcaagacgcccgaggagcacuucaucgagaccaucucccuggcgggcagcuacaaggacuggagcuacuccggccagagcacccagcucgggaucgaguuccugaagcggggcgacaaguccgucuacuacaccagcaacccgacgaccuuccaccuggacggggaggugaucaccuucgacaaccucaagacccugcugucccuccgcgaggugcggacgaucaaggucuucaccaccguggacaacaucaaccugcacacccagguggucgacaugagcaugacguacggccagcaguucggccccaccuaccuggacggggccgacgugaccaagaucaagccccacaacucccacgagggcaagaccuucuacgugcucccgaacgacgacacgcugcgcgucgaggccuucgaguacuaccacaccaccgaccccagcuuccuggggcgguacauguccgcccucaaccacaccaagaaguggaaguacccccaggugaacggccugacgagcaucaagugggccgacaacaacugcuaccuggcgaccgcccuccugacccugcagcagaucgagcucaaguucaaccccccggcccugcaggacgccuacuaccgcgcgcgggccggggaggccgccaacuucugcgcccugauccucgcguacugcaacaagaccgugggcgagcugggcgacguccgcgagacgauguccuaccuguuccagcacgccaaccucgacagcugcaagcgggugcugaacgucgugugcaagaccugcgggcagcagcagaccacccugaagggcguggaggccgucauguacauggggacccucuccuacgagcaguucaagaagggcgugcagauccccugcacgugcgggaagcaggccaccaaguaccuggugcagcaggagagccccuucgucaugauguccgcccccccggcgcaguacgagcugaagcacggcaccuucaccugcgccagcgaguacacgggcaacuaccagugcgggcacuacaagcacaucaccuccaaggagacccucuacugcaucgacggcgcccugcugaccaagagcagcgaguacaaggggcccaucacggacguguucuacaaggagaacuccuacaccaccaccaucaagcccgugacguacaagcucgacggcgucgugugcaccgagaucgaccccaagcuggacaacuacuacaagaaggacaacagcuacuucaccgagcagccgaucgaccuggugcccaaccagcccuaccccaacgccuccuucgacaacuucaaguucgucugcgacaacaucaaguucgccgacgaccucaaccagcugaccggguacaagaagccggcgagccgcgagcugaaggugacguucuuccccgaccucaacggcgacguggucgccaucgacuacaagcacuacacccccuccuucaagaagggcgccaagcugcugcacaagcccaucguguggcacgugaacaacgccaccaacaaggcgaccuacaagccgaacacguggugcauccggugccucuggagcaccaagcccgucgagaccuccaacagcuucgacgugcugaaguccgaggacgcccaggggauggacaaccuggccugcgaggaccucaagcccgugagcgaggaggucguggagaaccccaccauccagaaggacgugcuggagugcaacgucaagacgaccgagguggugggcgacaucauccugaagccggccaacaacucccucaagaucaccgaggaggucgggcacaccgaccugauggccgcguacguggacaacagcucccugacgaucaagaagcccaacgagcucagccgcgugcugggccugaagacccucgccacccacgggcuggccgccgucaacuccgugcccugggacaccaucgccaacuacgcgaagccguuccugaacaagguggucagcacgaccaccaacaucgugacccgcugccucaaccgggugugcacgaacuacaugcccuacuucuucacccugcugcuccagcugugcaccuucacccgcuccaccaacagccggaucaaggccuccaugcccacgaccaucgccaagaacaccgucaagagcgugggcaaguucugccuggaggccagcuucaacuaccucaagucccccaacuucagcaagcugaucaacaucaucaucugguuccugcuccuguccgugugccugggcagccucaucuacuccaccgccgcgcuggggguccugaugagcaaccucggcaugccguccuacugcacgggguaccgcgagggcuaccugaacagcaccaacgugaccaucgccaccuacugcacgggcuccauccccugcagcgugugccuguccgggcucgacagccuggacaccuaccccucccuggagaccauccagaucaccaucagcuccuucaagugggaccucacggccuucggccuggucgccgagugguuccuggccuacauccucuucacccgguucuucuacgugcuggggcuggcggccaucaugcagcucuucuucagcuacuucgccgugcacuucaucuccaacagcuggcugauguggcugaucaucaaccugguccagauggcccccaucuccgcgauggugcgcauguacaucuucuucgccagcuucuacuacguguggaagagcuacguccacgugguggacggcugcaacuccagcaccugcaugaugugcuacaagcggaaccgcgccacccgggucgagugcacgaccaucgugaacgggguccgccgguccuucuacguguacgccaacggcggcaagggguucugcaagcuccacaacuggaacugcgugaacugcgacaccuucugcgccggcagcaccuucaucuccgacgaggucgcgcgcgaccugagccugcaguucaagcggccgaucaaccccacggaccaguccagcuacaucguggacuccgugaccgucaagaacgggagcauccaccucuacuucgacaaggccggccagaagaccuacgagcgccacucccugagccacuucgugaaccuggacaaccuccgggccaacaacaccaaggggucccugcccaucaacgugaucgucuucgacggcaagagcaagugcgaggaguccagcgccaaguccgccagcguguacuacucccagcugaugugccagcccauccuccugcuggaccaggcgcucgugagcgacgucggcgacagcgccgagguggccgugaagauguucgacgccuacgucaacacguucuccagcaccuucaacgugccgauggagaagcugaagacccugguggccaccgcggaggccgagcucgccaagaacgucucccuggacaacgugcugagcacguucaucuccgccgcgcgccagggguucguggacagcgacgucgagaccaaggacgugguggagugccucaagcugucccaccagagcgacaucgaggucaccggcgacuccugcaacaacuacaugcugaccuacaacaagguggagaacaugacgccccgggaccucggggccugcaucgacugcagcgcccgccacaucaacgcccagguggccaagucccacaacaucgcgcugaucuggaacgucaaggacuucaugagccuguccgagcagcuccggaagcagauccgcagcgccgccaagaagaacaaccugcccuucaagcugaccugcgccaccacccgccagguggugaacgucgugacgaccaagaucgcccucaagggcgggugaggacuagucccuguucccagagcccacuuuuuuuucuuuuuuugaaauaaaauagccugucuuucagaucucaaaggcucuuuucagagccaccaaaaaaaaaaaaaaaaaaaaaaaaaaaaaaaaaaaaaaaaaaaaaaaaaaaaaaaaaaaaaaaaaaaaaaaaaaaaaaaaaaaaaaaaaaaaaaaaaaaaa

SEQ ID NO: 19760 - RNA, 6113 nt, Artificial Sequence
  SARS-CoV-2__MT811552.1__non-structural protein 3 (NSP3) mRNA gc
aggagagucccgcagucggcguccagcggcucugcuuguucgugugugugucguugcaggccuuauucaagcuuaccauggcccccaccaaggugaccuucggcgacgacacggucaucgaggugcagggguacaagagcgugaacaucaccuucgagcuggacgagcgcaucgacaagguccucaacgagaagugcuccgccuacaccguggagcugggcaccgaggugaacgaguucgcgugcgucguggccgacgccgugaucaagacgcugcagccggucagcgagcuccugaccccccuggggaucgaccucgacgagugguccauggccaccuacuaccuguucgacgagagcggcgaguucaagcuggccucccacauguacugcagcuucuacccccccgacgaggacgaggaggagggggacugcgaggaggaggaguucgagccguccacccaguacgaguacggcacggaggacgacuaccagggcaagccccucgaguucggggcgaccagcgccgcccugcagcccgaggaggagcaggaggaggacuggcuggacgacgacucccagcagaccgugggccagcaggacgggagcgaggacaaccagaccacgaccauccagaccaucguggagguccagccccagcucgagauggagcugaccccgguggugcagacgaucgaggucaacuccuucagcggcuaccugaagcucaccgacaacguguacaucaagaacgccgacaucguggaggaggcgaagaaggucaagcccaccgugguggucaacgccgccaacguguaccugaagcacgggggcggcguggccggggcccugaacaaggcgaccaacaacgccaugcaggucgaguccgacgacuacaucgccacgaacggcccccucaagguggggggcagcugcguccuguccggccacaaccuggccaagcacugccuccacgugguggggcccaacgucaacaagggcgaggacauccagcugcugaagagcgccuacgagaacuucaaccagcacgaggugcuccuggcgccgcugcucuccgccgggaucuucggcgccgaccccauccacagccugcgggugugcgucgacaccgugcgcaccaacguguaccuggccgucuucgacaagaaccucuacgacaagcugguguccagcuuccuggagaugaagagcgagaagcagguggagcagaagaucgccgagauccccaaggaggaggucaagcccuucaucaccgaguccaagccgagcguggagcagcggaagcaggacgacaagaagaucaaggcgugcguggaggaggucacgaccacccucgaggagaccaaguuccugacggagaaccugcuccuguacaucgacaucaacgggaaccugcaccccgacuccgccacccucgugagcgacaucgacaucaccuuccugaagaaggacgcccccuacaucgugggcgacgucgugcaggagggcgugcugaccgccgucgugauccccacgaagaaggccgggggcaccaccgagaugcucgcgaaggcccugcgcaaggugccgaccgacaacuacaucacgaccuaccccgggcagggccugaacggguacaccgucgaggaggccaagaccgugcucaagaagugcaaguccgccuucuacauccugcccagcaucaucuccaacgagaagcaggagauccugggcaccgugagcuggaaccuccgggagaugcuggcgcacgccgaggagacgcgcaagcugaugcccgucugcguggagaccaaggccaucguguccaccauccagcggaaguacaagggcaucaagauccaggagggggucguggacuacggcgcccgcuucuacuucuacaccagcaagacgaccguggccucccugaucaacacccucaacgaccugaacgagacccuggucacgaugccgcucggguacgugacccacggccugaaccuggaggaggcggcccgguacaugcgcagccucaaggugcccgccaccgucuccgugagcucccccgacgccgugaccgccuacaacggguaccugacgagcuccagcaagacccccgaggagcacuucaucgagaccaucucccuggcgggcagcuacaaggacuggagcuacuccggccagagcacccagcucgggaucgaguuccugaagcggggcgacaaguccgucuacuacacgagcaacccgaccaccuuccaccuggacggggaggugaucaccuucgacaaccucaagacgcugcugucccuccgcgaggugcggaccaucaaggucuucaccaccguggacaacaucaaccugcacacgcagguggucgacaugagcaugaccuacggccagcaguucggccccaccuaccuggacggggccgacgugaccaagaucaagccccacaacucccacgagggcaagacguucuacgugcucccgaacgacgacacccugcgcgucgaggccuucgaguacuaccacaccaccgaccccagcuuccuggggcgguacauguccgcccucaaccacacgaagaaguggaaguacccccaggugaacggccugaccagcaucaagugggccgacaacaacugcuaccuggcgaccgcccuccugacccugcagcagaucgagcucaaguucaaccccccggcccugcaggacgccuacuaccgcgcgcgggccggggaggccgccaacuucugcgcccugauccucgcguacugcaacaagacggugggcgagcugggcgacguccgcgagaccauguccuaccuguuccagcacgccaaccucgacagcugcaagcgggugcugaacgucgugugcaagaccugcgggcagcagcagaccacccugaagggcguggaggccgucauguacauggggacgcucuccuacgagcaguucaagaagggcgugcagauccccugcaccugcgggaagcaggccaccaaguaccuggugcagcaggagagccccuucgucaugauguccgcccccccggcgcaguacgagcugaagcacggcaccuucacgugcgccagcgaguacaccggcaacuaccagugcgggcacuacaagcacaucaccuccaaggagacccucuacugcaucgacggcgcccugcugacgaagagcagcgaguacaaggggcccaucaccgacguguucuacaaggagaacuccuacaccaccacgaucaagcccgugaccuacaagcucgacggcgucgugugcaccgagaucgaccccaagcuggacaacuacuacaagaaggacaacagcuacuucaccgagcagccgaucgaccuggugcccaaccagcccuaccccaacgccuccuucgacaacuucaaguucgucugcgacaacaucaaguucgccgacgaccucaaccagcugacgggguacaagaagccggcgagccgcgagcugaaggugaccuucuuccccgaccucaacggcgacguggucgccaucgacuacaagcacuacacccccuccuucaagaagggcgccaagcugcugcacaagcccaucguguggcacgugaacaacgccaccaacaaggcgacguacaagccgaacaccuggugcauccggugccucuggagcaccaagcccgucgagaccuccaacagcuucgacgugcugaaguccgaggacgcccaggggauggacaaccuggccugcgaggaccucaagcccgugagcgaggaggucguggagaaccccacgauccagaaggacgugcuggagugcaacgucaagaccaccgagguggugggcgacaucauccugaagccggccaacaacucccucaagaucaccgaggaggucgggcacacggaccugauggccgcguacguggacaacagcucccugaccaucaagaagcccaacgagcucagccgcgugcugggccugaagacccucgccacccacgggcuggccgccgucaacuccgugcccugggacacgaucgccaacuacgcgaagccguuccugaacaagguggucagcaccaccaccaacaucgugacgcgcugccucaaccgggugugcaccaacuacaugcccuacuucuucacccugcugcuccagcugugcaccuucacccgcuccacgaacagccggaucaaggccuccaugcccaccaccaucgccaagaacaccgucaagagcgugggcaaguucugccuggaggccagcuucaacuaccucaagucccccaacuucagcaagcugaucaacaucaucaucugguuccugcuccuguccgugugccugggcagccucaucuacuccacggccgcgcuggggguccugaugagcaaccucggcaugccguccuacugcaccggguaccgcgagggcuaccugaacagcaccaacgugaccaucgccacguacugcaccggcuccauccccugcagcgugugccuguccgggcucgacagccuggacaccuaccccucccuggagaccauccagaucacgaucagcuccuucaagugggaccucaccgccuucggccuggucgccgagugguuccuggccuacauccucuucacccgguucuucuacgugcuggggcuggcggccaucaugcagcucuucuucagcuacuucgccgugcacuucaucuccaacagcuggcugauguggcugaucaucaaccugguccagauggcccccaucuccgcgauggugcgcauguacaucuucuucgccagcuucuacuacguguggaagagcuacguccacgugguggacggcugcuccagcuccaccugcaugaugugcuacaagcggaaccgcgccacgcgggucgagugcaccaccaucgugaacgggguccgccggagcuucuacguguacgccaacggcggcaagggguucugcaagcuccacaacuggaacugcgugaacugcgacaccuucugcgccggcuccacguucaucagcgacgaggucgcgcgcgaccugucccugcaguucaagcggccgaucaaccccaccgaccagagcuccuacaucguggacagcgugaccgucaagaacggguccauccaccucuacuucgacaaggccggccagaagaccuacgagcgccacagccugucccacuucgugaaccuggacaaccuccgggccaacaacacgaaggggagccugcccaucaacgugaucgucuucgacggcaaguccaagugcgaggagagcuccgccaagagcgccuccguguacuacagccagcugaugugccagcccauccuccugcuggaccaggcgcucgugagcgacgucggcgacuccgccgagguggccgugaagauguucgacgccuacgucaacaccuucagcuccaccuucaacgugccgauggagaagcugaagacccugguggccacggcggaggccgagcucgccaagaacgucagccuggacaacgugcuguccaccuucaucagcgccgcgcgccagggguucguggacuccgacgucgagaccaaggacgugguggagugccucaagcugagccaccaguccgacaucgaggucaccggcgacagcugcaacaacuacaugcugacguacaacaagguggagaacaugaccccccgggaccucggggccugcaucgacugcuccgcccgccacaucaacgcccagguggccaagagccacaacaucgcgcugaucuggaacgucaaggacuucaugucccugagcgagcagcuccggaagcagauccgcuccgccgccaagaagaacaaccugcccuucaagcugaccugcgccaccacgcgccagguggugaacgucgugaccaccaagaucgcccucaagggcgggugaggacuagucccuguucccagagcccacuuuuuuuucuuuuuuugaaauaaaauagccugucuuucagaucucaaaggcucuuuucagagccaccaaaaaaaaaaaaaaaaaaaaaaaaaaaaaaaaaaaaaaaaaaaaaaaaaaaaaaaaaaaaaaaaaaaaaaaaaaaaaaaaaaaaaaaaaaaaaaaaaaaaa

SEQ ID NO: 19761 - RNA, 6113 nt, Artificial Sequence
  SARS-CoV-2__MT811557.1__non-structural protein 3 (NSP3) mRNA gc
aggagagucccgcagucggcguccagcggcucugcuuguucgugugugugucguugcaggccuuauucaagcuuaccauggcccccaccaaggugaccuucggcgacgacacggucaucgaggugcagggguacaagagcgugaacaucaccuucgagcuggacgagcgcaucgacaagguccucaacgagaagugcuccgccuacaccguggagcugggcaccgaggugaacgaguucgcgugcgucguggccgacgccgugaucaagacgcugcagccggucagcgagcuccugaccccccuggggaucgaccucgacgagugguccauggccaccuacuaccuguucgacgagagcggcgaguucaagcuggccucccacauguacugcagcuucuacccccccgacgaggacgaggaggagggggacugcgaggaggaggaguucgagccguccacccaguacgaguacggcacggaggacgacuaccagggcaagccccucgaguucggggcgaccagcgccgcccugcagcccgaggaggagcaggaggaggacuggcuggacgacgacucccagcagaccgugggccagcaggacgggagcgaggacaaccagaccacgaccauccagaccaucguggagguccagccccagcucgagauggagcugaccccgguggugcagacgaucgaggucaacuccuucagcggcuaccugaagcucaccgacaacguguacaucaagaacgccgacaucguggaggaggcgaagaaggucaagcccaccgugguggucaacgccgccaacguguaccugaagcacgggggcggcguggccggggcccugaacaaggcgaccaacaacgccaugcaggucgaguccgacgacuacaucgccacgaacggcccccucaagguggggggcagcugcguccuguccggccacaaccuggccaagcacugccuccacgugguggggcccaacgucaacaagggcgaggacauccagcugcugaagagcgccuacgagaacuucaaccagcacgaggugcuccuggcgccgcugcucuccgccgggaucuucggcgccgaccccauccacagccugcgggugugcgucgacaccgugcgcaccaacguguaccuggccgucuucgacaagaaccucuacgacaagcugguguccagcuuccuggagaugaagagcgagaagcagguggagcagaagaucgccgagauccccaaggaggaggucaagcccuucaucaccgaguccaagccgagcguggagcagcggaagcaggacgacaagaagaucaaggcgugcguggaggaggucacgaccacccucgaggagaccaaguuccugacggagaaccugcuccuguacaucgacaucaacgggaaccugcaccccgacuccgccacccucgugagcgacaucgacaucaccuuccugaagaaggacgcccccuacaucgugggcgacgucgugcaggagggcgugcugaccgccgucgugauccccacgaagaaggccgggggcaccaccgagaugcucgcgaaggcccugcgcaaggugccgaccgacaacuacaucacgaccuaccccgggcagggccugaacggguacaccgucgaggaggccaagaccgugcucaagaagugcaaguccgccuucuacauccugcccagcaucaucuccaacgagaagcaggagauccugggcaccgugagcuggaaccuccgggagaugcuggcgcacgccgaggagacgcgcaagcugaugcccgucugcguggagaccaaggccaucguguccaccauccagcggaaguacaagggcaucaagauccaggagggggucguggacuacggcgcccgcuucuacuucuacaccagcaagacgaccguggccucccugaucaacacccucaacgaccugaacgagacccuggucacgaugccgcucggguacgugacccacggccugaaccuggaggaggcggcccgguacaugcgcagccucaaggugcccgccaccgucuccgugagcucccccgacgccgugaccgccuacaacggguaccugacgagcuccagcaagacccccgaggagcacuucaucgagaccaucucccuggcgggcagcuacaaggacuggagcuacuccggccagagcacccagcucgggaucgaguuccugaagcggggcgacaaguccgucuacuacacgagcaacccgaccaccuuccaccuggacggggaggugaucaccuucgacaaccucaagacgcugcugucccuccgcgaggugcggaccaucaaggucuucaccaccguggacaacaucaaccugcacacgcagguggucgacaugagcaugaccuacggccagcaguucggccccaccuaccuggacggggccgacgugaccaagaucaagccccacaacucccacgagggcaagacguucuacgugcucccgaacgacgacacccugcgcgucgaggccuucgaguacuaccacaccaccgaccccagcuuccuggggcgguacauguccgcccucaaccacacgaagaaguggaaguacccccaggugaacggccugaccagcaucaagugggccgacaacaacugcuaccuggcgaccgcccuccugacccugcagcagaucgagcucaaguucaaccccccggcccugcaggacgccuacuaccgcgcgcgggccggggaggccgccaacuucugcgcccugauccucgcguacugcaacaagacggugggcgagcugggcgacguccgcgagaccauguccuaccuguuccagcacgccaaccucgacagcugcaagcgggugcugaacgucgugugcaagaccugcgggcagcagcagaccacccugaagggcguggaggccgucauguacauggggacgcucuccuacgagcaguucaagaagggcgugcagauccccugcaccugcgggaagcaggccaccaaguaccuggugcagcaggagagccccuucgucaugauguccgcccccccggcgcaguacgagcugaagcacggcaccuucacgugcgccagcgaguacaccggcaacuaccagugcgggcacuacaagcacaucaccuccaaggagacccucuacugcaucgacggcgcccugcugacgaagagcagcgaguacaaggggcccaucaccgacguguucuacaaggagaacuccuacaccaccacgaucaagcccgugaccuacaagcucgacggcgucgugugcaccgagaucgaccccaagcuggacaacuacuacaagaaggacaacagcuacuucaccgagcagccgaucgaccuggugcccaaccagcccuaccccaacgccuccuucgacaacuucaaguucgucugcgacaacaucaaguucgccgacgaccucaaccagcugacgggguacaagaagccggcgagccgcgagcugaaggugaccuucuuccccgaccucaacggcgacguggucgccaucgacuacaagcacuacacccccuccuucaagaagggcgccaagcugcugcacaagcccaucguguggcacgugaacaacgccaccaacaaggcgacguacaagccgaacaccuggugcauccggugccucuggagcaccaagcccgucgagaccuccaacagcuucgacgugcugaaguccgaggacgcccaggggauggacaaccuggccugcgaggaccucaagcccgugagcgaggaggucguggagaaccccacgauccagaaggacgugcuggagugcaacgucaagaccaccgagguggugggcgacaucauccugaagccggccaacaacucccucaagaucaccgaggaggucgggcacacggaccugauggccgcguacguggacaacagcucccugaccaucaagaagcccaacgagcucagccgcgugcugggccugaagacccucgccacccacgggcuggccgccgucaacuccgugcccugggacacgaucgccaacuacgcgaagccguuccugaacaagguggucagcaccaccaccaacaucgugacgcgcugccucaaccgggugugcaccaacuacaugcccuacuucuucacccugcugcuccagcugugcaccuucacccgcuccacgaacagccggaucaaggccuccaugcccaccaccaucgccaagaacaccgucaagagcgugggcaaguucugccuggaggccagcuucaacuaccucaagucccccaacuucagcaagcugaucaacaucaucaucugguuccugcuccuguccgugugccugggcagccucaucuacuccacggccgcgcuggggguccugaugagcaaccucggcaugccguccuacugcaccggguaccgcgagggcuaccugaacagcaccaacgugaccaucgccacguacugcaccggcuccauccccugcagcgugugccuguccgggcucgacagccuggacaccuacuccagccuggagaccauccagaucacgaucuccagcuucaagugggaccucaccgccuucggccuggucgccgagugguuccuggccuacauccucuucacccgguucuucuacgugcuggggcuggcggccaucaugcagcucuucuucuccuacuucgccgugcacuucaucagcaacuccuggcugauguggcugaucaucaaccugguccagauggcccccaucagcgcgauggugcgcauguacaucuucuucgccagcuucuacuacguguggaaguccuacguccacgugguggacggcugcaacagcuccaccugcaugaugugcuacaagcggaaccgcgccacgcgggucgagugcaccaccaucgugaacgggguccgccggagcuucuacguguacgccaacggcggcaagggguucugcaagcuccacaacuggaacugcgugaacugcgacaccuucugcgccggcuccacguucaucagcgacgaggucgcgcgcgaccugucccugcaguucaagcggcccaucaacccgaccgaccagagcuccuacaucguggacagcgugaccgucaagaacggguccauccaccucuacuucgacaaggccggccagaagaccuacgagcgccacagccugucccacuucgugaaccuggacaaccuccgggccaacaacacgaaggggagccugcccaucaacgugaucgucuucgacggcaaguccaagugcgaggagagcuccgccaagagcgccuccguguacuacagccagcugaugugccagcccauccuccugcuggaccaggcgcucgugagcgacgucggcgacuccgccgagguggccgugaagauguucgacgccuacgucaacaccuucagcuccaccuucaacgugcccauggagaagcugaagacccugguggccacggcggaggccgagcucgccaagaacgucagccuggacaacgugcuguccaccuucaucagcgccgcgcgccagggguucguggacuccgacgucgagaccaaggacgugguggagugccucaagcugagccaccaguccgacaucgaggucaccggcgacagcugcaacaacuacaugcugacguacaacaagguggagaacaugaccccgcgggaccucggggccugcaucgacugcuccgcccgccacaucaacgcccagguggccaagagccacaacaucgcgcugaucuggaacgucaaggacuucaugucccugagcgagcagcuccggaagcagauccgcuccgccgccaagaagaacaaccugcccuucaagcugaccugcgccaccacgcgccagguggugaacgucgugaccaccaagaucgcccucaagggcgggugaggacuagucccuguucccagagcccacuuuuuuuucuuuuuuugaaauaaaauagccugucuuucagaucucaaaggcucuuuucagagccaccaaaaaaaaaaaaaaaaaaaaaaaaaaaaaaaaaaaaaaaaaaaaaaaaaaaaaaaaaaaaaaaaaaaaaaaaaaaaaaaaaaaaaaaaaaaaaaaaaaaaa

SEQ ID NO: 19762 - RNA, 6113 nt, Artificial Sequence
  SARS-CoV-2__MT811659.1__non-structural protein 3 (NSP3) mRNA gc
aggagagucccgcagucggcguccagcggcucugcuuguucgugugugugucguugcaggccuuauucaagcuuaccauggcccccaccaaggugaccuucggcgccgacacggucaucgaggugcagggguacaagagcgugaacaucaccuucgagcuggacgagcgcaucgacaagguccucaacgagaagugcuccgcguacaccguggagcugggcaccgaggugaacgaguucgccugcgucguggccgacgccgugaucaagacgcugcagccggucagcgagcuccugaccccccuggggaucgaccucgacgagugguccauggccaccuacuaccuguucgacgagagcggcgaguucaagcuggcgucccacauguacugcagcuucuacccccccgacgaggacgaggaggagggggacugcgaggaggaggaguucgagccguccacccaguacgaguacggcacggaggacgacuaccagggcaagccccucgaguucggggccaccagcgccgcccugcagcccgaggaggagcaggaggaggacuggcuggacgacgacucccagcagaccgugggccagcaggacgggagcgaggacaaccagaccacgaccauccagaccaucguggagguccagccccagcucgagauggagcugaccccgguggugcagacgaucgaggucaacuccuucagcggcuaccugaagcucaccgacaacguguacaucaagaacgcggacaucguggaggaggccaagaaggucaagcccaccgugguggucaacgccgccaacguguaccugaagcacgggggcggcguggccggggcgcugaacaaggccaccaacaacgccaugcaggucgaguccgacgacuacaucgccacgaacggcccccucaagguggggggcagcugcguccuguccggccacaaccuggccaagcacugccuccacgugguggggcccaacgucaacaagggcgaggacauccagcugcugaagagcgcguacgagaacuucaaccagcacgaggugcuccuggccccgcugcucuccgccgggaucuucggcgccgaccccauccacagccugcgggugugcgucgacaccgugcgcaccaacguguaccuggccgucuucgacaagaaccucuacgacaagcugguguccagcuuccuggagaugaagagcgagaagcagguggagcagaagaucgcggagauccccaaggaggaggucaagcccuucaucaccgaguccaagccgagcguggagcagcggaagcaggacgacaagaagaucaaggccugcguggaggaggucacgaccacccucgaggagaccaaguuccugacggagaaccugcuccuguacaucgacaucaacgggaaccugcaccccgacuccgccacccucgugagcgacaucgacaucaccuuccugaagaaggacgcccccuacaucgugggcgacgucgugcaggagggcgugcugaccgccgucgugauccccacgaagaaggcggggggcaccaccgagaugcucgccaaggcccugcgcaaggugccgaccgacaacuacaucacgaccuaccccgggcagggccugaacggguacaccgucgaggaggccaagaccgugcucaagaagugcaaguccgcguucuacauccugcccagcaucaucuccaacgagaagcaggagauccugggcaccgugagcuggaaccuccgggagaugcuggcccacgccgaggagacgcgcaagcugaugcccgucugcguggagaccaaggccaucguguccaccauccagcggaaguacaagggcaucaagauccaggagggggucguggacuacggcgcccgcuucuacuucuacaccagcaagacgaccguggcgucccugaucaacacccucaacgaccugaacgagacccuggucacgaugccgcucggguacgugacccacggccugaaccuggaggaggccgcccgguacaugcgcagccucaaggugcccgccaccgucuccgugagcucccccgacgccgugaccgcguacaacggguaccugacgagcuccagcaagacccccgaggagcacuucaucgagaccaucucccuggccggcagcuacaaggacuggagcuacuccggccagagcacccagcucgggaucgaguuccugaagcggggcgacaaguccgucuacuacacgagcaacccgaccaccuuccaccuggacggggaggugaucaccuucgacaaccucaagacgcugcugucccuccgcgaggugcggaccaucaaggucuucaccaccguggacaacaucaaccugcacacgcagguggucgacaugagcaugaccuacggccagcaguucggccccaccuaccuggacggggccgacgugaccaagaucaagccccacaacucccacgagggcaagacguucuacgugcucccgaacgacgacacccugcgcgucgaggccuucgaguacuaccacaccaccgaccccagcuuccuggggcgguacauguccgcccucaaccacacgaagaaguggaaguacccccaggugaacggccugaccagcaucaagugggcggacaacaacugcuaccuggccaccgcccuccugacccugcagcagaucgagcucaaguucaaccccccggcccugcaggacgcguacuaccgcgcccgggccggggaggccgccaacuucugcgcgcugauccucgccuacugcaacaagacggugggcgagcugggcgacguccgcgagaccauguccuaccuguuccagcacgccaaccucgacagcugcaagcgggugcugaacgucgugugcaagaccugcgggcagcagcagaccacccugaagggcguggaggccgucauguacauggggacgcucuccuacgagcaguucaagaagggcgugcagauccccugcaccugcgggaagcaggccaccaaguaccuggugcagcaggagagccccuucgucaugauguccgcgcccccggcccaguacgagcugaagcacggcaccuucacgugcgccagcgaguacaccggcaacuaccagugcgggcacuacaagcacaucaccuccaaggagacccucuacugcaucgacggcgcccugcugacgaagagcagcgaguacaaggggcccaucaccgacguguucuacaaggagaacuccuacaccaccacgaucaagcccgugaccuacaagcucgacggcgucgugugcaccgagaucgaccccaagcuggacaacuacuacaagaaggacaacagcuacuucaccgagcagccgaucgaccuggugcccaaccagcccuaccccaacgccuccuucgacaacuucaaguucgucugcgacaacaucaaguucgcggacgaccucaaccagcugacgggguacaagaagccggccagccgcgagcugaaggugaccuucuuccccgaccucaacggcgacguggucgccaucgacuacaagcacuacacccccuccuucaagaagggcgccaagcugcugcacaagcccaucguguggcacgugaacaacgcgaccaacaaggccacguacaagccgaacaccuggugcauccggugccucuggagcaccaagcccgucgagaccuccaacagcuucgacgugcugaaguccgaggacgcccaggggauggacaaccuggccugcgaggaccucaagcccgugagcgaggaggucguggagaaccccacgauccagaaggacgugcuggagugcaacgucaagaccaccgagguggugggcgacaucauccugaagccggccaacaacucccucaagaucaccgaggaggucgggcacacggaccugauggcggccuacguggacaacagcucccugaccaucaagaagcccaacgagcucagccgcgugcugggccugaagacccucgccacccacgggcuggccgccgucaacuccgugcccugggacacgaucgcgaacuacgccaagccguuccugaacaagguggucagcaccaccaccaacaucgugacgcgcugccucaaccgggugugcaccaacuacaugcccuacuucuucacccugcugcuccagcugugcaccuucacccgcuccacgaacagccggaucaaggccuccaugcccaccaccaucgccaagaacaccgucaagagcgugggcaaguucugccuggaggccagcuucaacuaccucaagucccccaacuucagcaagcugaucaacaucaucaucugguuccugcuccuguccgugugccugggcagccucaucuacuccacggcggcccuggggguccugaugagcaaccucggcaugccguccuacugcaccggguaccgcgagggcuaccugaacagcaccaacgugaccaucgccacguacugcaccggcuccauccccugcagcgugugccuguccgggcucgacagccuggacaccuaccccucccuggagaccauccagaucacgaucagcuccuucaagugggaccucaccgccuucggccuggucgccgagugguuccuggcguacauccucuucacccgguucuucuacgugcuggggcuggccgccaucaugcagcucuucuucagcuacuucgccgugcacuucaucuccaacagcuggcugauguggcugaucaucaaccugguccagauggcgcccaucuccgccauggugcgcauguacaucuucuucgccagcuucuacuacguguggaagagcuacguccacgugguggacggcugcaacuccagcaccugcaugaugugcuacaagcggaaccgcgccacgcgggucgagugcaccaccaucgugaacgggguccgccgguccuucuacguguacgccaacggcggcaagggguucugcaagcuccacaacuggaacugcgugaacugcgacaccuucugcgcgggcagcacguucaucuccgacgaggucgcccgcgaccugagccugcaguucaagcggccgaucaaccccaccgaccaguccagcuacaucguggacuccgugaccgucaagaacgggagcauccaccucuacuucgacaaggccggccagaagaccuacgagcgccacucccugagccacuucgugaaccuggacaaccuccgggccaacaacacgaaggggucccugcccaucaacgugaucgucuucgacggcaagagcaagugcgaggaguccagcgccaaguccgcgagcguguacuacucccagcugaugugccagcccauccuccugcuggaccaggcccucgugagcgacgucggcgacagcgccgagguggccgugaagauguucgacgccuacgucaacaccuucuccagcaccuucaacgugccgauggagaagcugaagacccugguggcgacggccgaggccgagcucgccaagaacgucucccuggacaacgugcugagcaccuucaucuccgcggcccgccagggguucguggacagcgacgucgagaccaaggacgugguggagugccucaagcugucccaccagagcgacaucgaggucaccggcgacuccugcaacaacuacaugcugacguacaacaagguggagaacaugaccccccgggaccucggggccugcaucgacugcagcgcccgccacaucaacgcccagguggcgaagucccacaacaucgcccugaucuggaacgucaaggacuucaugagccuguccgagcagcuccggaagcagauccgcagcgccgccaagaagaacaaccugcccuucaagcugaccugcgccaccacgcgccagguggugaacgucgugaccaccaagaucgcgcucaagggcgggugaggacuagucccuguucccagagcccacuuuuuuuucuuuuuuugaaauaaaauagccugucuuucagaucucaaaggcucuuuucagagccaccaaaaaaaaaaaaaaaaaaaaaaaaaaaaaaaaaaaaaaaaaaaaaaaaaaaaaaaaaaaaaaaaaaaaaaaaaaaaaaaaaaaaaaaaaaaaaaaaaaaaa

SEQ ID NO: 19763 - RNA, 6113 nt, Artificial Sequence
  SARS-CoV-2__MT811670.1__non-structural protein 3 (NSP3) mRNA gc
aggagagucccgcagucggcguccagcggcucugcuuguucgugugugugucguugcaggccuuauucaagcuuaccauggcccccaccaaggugaccuucggcgacgacacggucaucgaggugcagggguacaagagcgugaacaucaccuucgagcuggacgagcgcaucgacaagguccucaacgagaagugcuccgccuacaccguggagcugggcaccgaggugaacgaguucgcgugcgucguggccgacgccgugaucaagacgcugcagccggucagcgagcuccugaccccccuggggaucgaccucgacgagugguccauggccaccuacuaccuguucgacgagagcggcgaguucaagcuggccucccacauguacugcagcuucuacccccccgacgaggacgaggaggagggggacugcgaggaggaggaguucgagccguccacccaguacgaguacggcacggaggacgacuaccagggcaagccccucgaguucggggcgaccagcgccgcccugcagcccgaggaggagcaggaggaggacuggcuggacgacgacucccagcagaccgugggccagcaggacgggagcgaggacaaccagaccacgaccauccagaccaucguggagguccagccccagcucgagauggagcugaccccgguggugcagacgaucgaggucaacuccuucagcggcuaccugaagcucaccgacaacguguacaucaagaacgccgacaucguggaggaggcgaagaaggucaagcccaccgugguggucaacgccgccaacguguaccugaagcacgggggcggcguggccggggcccugaacaaggcgaccaacaacgccaugcaggucgaguccgacgacuacaucgccacgaacggcccccucaagguggggggcagcugcguccuguccggccacaaccuggccaagcacugccuccacgugguggggcccaacgucaacaagggcgaggacauccagcugcugaagagcgccuacgagaacuucaaccagcacgaggugcuccuggcgccgcugcucuccgccgggaucuucggcgccgaccccauccacagccugcgggugugcgucgacaccgugcgcaccaacguguaccuggccgucuucgacaagaaccucuacgacaagcugguguccagcuuccuggagaugaagagcgagaagcagguggagcagaacaucgccgagauccccaaggaggaggucaagcccuucaucaccgaguccaagccgagcguggagcagcggaagcaggacgacaagaagaucaaggcgugcguggaggaggucacgaccacccucgaggagaccaaguuccugacggagaaccugcuccuguacaucgacaucaacgggaaccugcaccccgacuccgccacccucgugagcgacaucgacaucaccuuccugaagaaggacgcccccuacaucgugggcgacgucgugcaggagggcgugcugaccgccgucgugauccccacgaagaaggccgggggcaccaccgagaugcucgcgaaggcccugcgcaaggugccgaccgacaacuacaucacgaccuaccccgggcagggccugaacggguacaccgucgaggaggccaagaccgugcucaagaagugcaaguccgccuucuacauccugcccagcaucaucuccaacgagaagcaggagauccugggcaccgugagcuggaaccuccgggagaugcuggcgcacgccgaggagacgcgcaagcugaugcccgucugcguggagaccaaggccaucguguccaccauccagcggaaguacaagggcaucaagauccaggagggggucguggacuacggcgcccgcuucuacuucuacaccagcaagacgaccguggccucccugaucaacacccucaacgaccugaacgagacccuggucacgaugccgcucggguacgugacccacggccugaaccuggaggaggcggcccgguacaugcgcagccucaaggugcccgccaccgucuccgugagcucccccgacgccgugaccgccuacaacggguaccugacgagcuccagcaagacccccgaggagcacuucaucgagaccaucucccuggcgggcagcuacaaggacuggagcuacuccggccagagcacccagcucgggaucgaguuccugaagcggggcgacaaguccgucuacuacacgagcaacccgaccaccuuccaccuggacggggaggugaucaccuucgacaaccucaagacgcugcugucccuccgcgaggugcggaccaucaaggucuucaccaccguggacaacaucaaccugcacacgcagguggucgacaugagcaugaccuacggccagcaguucggccccaccuaccuggacggggccgacgugaccaagaucaagccccacaacucccacgagggcaagacguucuacgugcucccgaacgacgacacccugcgcgucgaggccuucgaguacuaccacaccaccgaccccagcuuccuggggcgguacauguccgcccucaaccacacgaagaaguggaaguacccccaggugaacggccugaccagcaucaagugggccgacaacaacugcuaccuggcgaccgcccuccugacccugcagcagaucgagcucaaguucaaccccccggcccugcaggacgccuacuaccgcgcgcgggccggggaggccgccaacuucugcgcccugauccucgcguacugcaacaagacggugggcgagcugggcgacguccgcgagaccauguccuaccuguuccagcacgccaaccucgacagcugcaagcgggugcugaacgucgugugcaagaccugcgggcagcagcagaccacccugaagggcguggaggccgucauguacauggggacgcucuccuacgagcaguucaagaagggcgugcagauccccugcaccugcgggaagcaggccaccaaguaccuggugcagcaggagagccccuucgucaugauguccgcccccccggcgcaguacgagcugaagcacggcaccuucacgugcgccagcgaguacaccggcaacuaccagugcgggcacuacaagcacaucaccuccaaggagacccucuacugcaucgacggcgcccugcugacgaagagcagcgaguacaaggggcccaucaccgacguguucuacaaggagaacuccuacaccaccacgaucaagcccgugaccuacaagcucgacggcgucgugugcaccgagaucgaccccaagcuggacaacuacuacaagaaggacaacagcuacuucaccgagcagccgaucgaccuggugcccaaccagcccuaccccaacgccuccuucgacaacuucaaguucgucugcgacaacaucaaguucgccgacgaccucaaccagcugacgggguacaagaagccggcgagccgcgagcugaaggugaccuucuuccccgaccucaacggcgacguggucgccaucgacuacaagcacuacacccccuccuucaagaagggcgccaagcugcugcacaagcccaucguguggcacgugaacaacgccaccaacaaggcgacguacaagccgaacaccuggugcauccggugccucuggagcaccaagcccgucgagaccuccaacagcuucgacgugcugaaguccgaggacgcccaggggauggacaaccuggccugcgaggaccucaagcccgugagcgaggaggucguggagaaccccacgauccagaaggacgugcuggagugcaacgucaagaccaccgagguggugggcgacaucauccugaagccggccaacaacucccucaagaucaccgaggaggucgggcacacggaccugauggccgcguacguggacaacagcucccugaccaucaagaagcccaacgagcucagccgcgugcugggccugaagacccucgccacccacgggcuggccgccgucaacuccgugcccugggacacgaucgccaacuacgcgaagccguuccugaacaagguggucagcaccaccaccaacaucgugacgcgcugccucaaccgggugugcaccaacuacaugcccuacuucuucacccugcugcuccagcugugcaccuucacccgcuccacgaacagccggaucaaggccuccaugcccaccaccaucgccaagaacaccgucaagagcgugggcaaguucugccuggaggccagcuucaacuaccucaagucccccaacuucagcaagcugaucaacaucaucaucugguuccugcuccuguccgugugccugggcagccucaucuacuccacggccgcgcuggggguccugaugagcaaccucggcaugccguccuacugcaccggguaccgcgagggcuaccugaacagcaccaacgugaccaucgccacguacugcaccggcuccauccccugcagcgugugccuguccgggcucgacagccuggacaccuaccccucccuggagaccauccagaucacgaucagcuccuucaagugggaccucaccgccuucggccuggucgccgagugguuccuggccuacauccucuucacccgguucuucuacgugcuggggcuggcggccaucaugcagcucuucuucagcuacuucgccgugcacuucaucuccaacagcuggcugauguggcugaucaucaaccugguccagauggcccccaucuccgcgauggugcgcauguacaucuucuucgccagcuucuacuacguguggaagagcuacguccacgugguggacggcugcaacuccagcaccugcaugaugugcuacaagcggaaccgcgccacgcgggucgagugcaccaccaucgugaacgggguccgccgguccuucuacguguacgccaacggcggcaagggguucugcaagcuccacaacuggaacugcgugaacugcgacaccuucugcgccggcagcacguucaucuccgacgaggucgcgcgcgaccugagccugcaguucaagcggccgaucaaccccaccgaccaguccagcuacaucguggacuccgugaccgucaagaacgggagcauccaccucuacuucgacaaggccggccagaagaccuacgagcgccacucccugagccacuucgugaaccuggacaaccuccgggccaacaacacgaaggggucccugcccaucaacgugaucgucuucgacggcaagagcaagugcgaggaguccagcgccaaguccgccagcguguacuacucccagcugaugugccagcccauccuccugcuggaccaggcgcucgugagcgacgucggcgacagcgccgagguggccgugaagauguucgacgccuacgucaacaccuucuccagcaccuucaacgugccgauggagaagcugaagacccugguggccacggcggaggccgagcucgccaagaacgucucccuggacaacgugcugagcaccuucaucuccgccgcgcgccagggguucguggacagcgacgucgagaccaaggacgugguggagugccucaagcugucccaccagagcgacaucgaggucaccggcgacuccugcaacaacuacaugcugacguacaacaagguggagaacaugaccccccgggaccucggggccugcaucgacugcagcgcccgccacaucaacgcccagguggccaagucccacaacaucgcgcugaucuggaacgucaaggacuucaugagccuguccgagcagcuccggaagcagauccgcagcgccgccaagaagaacaaccugcccuucaagcugaccugcgccaccacgcgccagguggugaacgucgugaccaccaagaucgcccucaagggcgggugaggacuagucccuguucccagagcccacuuuuuuuucuuuuuuugaaauaaaauagccugucuuucagaucucaaaggcucuuuucagagccaccaaaaaaaaaaaaaaaaaaaaaaaaaaaaaaaaaaaaaaaaaaaaaaaaaaaaaaaaaaaaaaaaaaaaaaaaaaaaaaaaaaaaaaaaaaaaaaaaaaaaa

SEQ ID NO: 19764 - RNA, 6113 nt, Artificial Sequence
  SARS-CoV-2__MT811680.1__non-structural protein 3 (NSP3) mRNA gc
aggagagucccgcagucggcguccagcggcucugcuuguucgugugugugucguugcaggccuuauucaagcuuaccauggcccccaccaaggugaccuucggcgacgacacggucaucgaggugcagggguacaagagcgugaacaucaccuucgagcuggacgagcgcaucgacaagguccucaacgagaagugcuccgccuacaccguggagcugggcaccgaggugaacgaguucgcgugcgucguggccgacgccgugaucaagacgcugcagccggucagcgagcuccugaccccccuggggaucgaccucgacgagugguccauggccaccuacuaccuguucgacgagagcggcgaguucaagcuggccucccacauguacugcagcuucuacccccccgacgaggacgaggaggagggggacugcgaggaggaggaguucgagccguccacccaguacgaguacggcacggaggacgacuaccagggcaagccccucgaguucggggcgaccagcgccgcccugcagcccgaggaggagcaggaggaggacuggcuggacgacgacucccagcagaccgugggccagcaggacgggagcgaggacaaccagaccacgaccauccagaccaucguggagguccagccccagcucgagauggagcugaccccgguggugcagacgaucgaggucaacuccuucagcggcuaccugaagcucaccgacaacguguacaucaagaacgccgacaucguggaggaggcgaagaaggucaagcccaccgugguggucaacgccgccaacguguaccugaagcacgggggcggcguggccggggcccugaacaaggcgaccaacaacgccaugcaggucgaguccgacgacuacaucgccacgaacggcccccucaagguggggggcagcugcguccuguccggccacaaccuggccaagcacugccuccacgugguggggcccaacgucaacaagggcgaggacauccagcugcugaagagcgccuacgagaacuucaaccagcacgaggugcuccuggcgccgcugcucuccgccgggaucuucggcgccgaccugauccacagccugcgggugugcgucgacaccgugcgcaccaacguguaccucgccgucuucgacaagaaccuguacgacaagcugguguccagcuuccucgagaugaagagcgagaagcagguggagcagaagaucgccgagauccccaaggaggaggucaagcccuucaucaccgaguccaagcccagcguggagcagcggaagcaggacgacaagaagaucaaggcgugcguggaggaggucacgaccacccuggaggagaccaaguuccugacggagaaccuccugcuguacaucgacaucaacgggaaccuccacccggacuccgccacccuggugagcgacaucgacaucaccuuccugaagaaggacgcccccuacaucgugggcgacgucgugcaggagggcgugcucaccgccgucgugauccccacgaagaaggccgggggcaccaccgagaugcuggcgaaggcccugcgcaaggugcccaccgacaacuacaucacgaccuacccggggcagggccucaacggguacaccgucgaggaggccaagaccgugcugaagaagugcaaguccgccuucuacauccugcccagcaucaucuccaacgagaagcaggagauccucggcaccgugagcuggaaccugcgggagaugcuggcgcacgccgaggagacgcgcaagcugaugcccgucugcguggagaccaaggccaucguguccaccauccagcggaaguacaagggcaucaagauccaggagggggucguggacuacggcgcccgcuucuacuucuacaccagcaagacgaccguggccucccucaucaacacccugaacgaccugaacgagacccucgucacgaugccccugggguacgugacccacggccugaaccucgaggaggcggcccgguacaugcgcagccugaaggugccggccaccgucuccgugagcucccccgacgccgugaccgccuacaacggguaccugacgagcuccagcaagacccccgaggagcacuucaucgagaccaucucccucgcgggcagcuacaaggacuggagcuacuccggccagagcacccagcuggggaucgaguuccugaagcggggcgacaaguccgucuacuacacgagcaaccccaccaccuuccaccucgacggggaggugaucaccuucgacaaccugaagacgcugcucucccugcgcgaggugcggaccaucaaggucuucaccaccguggacaacaucaaccugcacacgcagguggucgacaugagcaugaccuacggccagcaguucggcccgaccuaccucgacggggccgacgugaccaagaucaagccccacaacucccacgagggcaagacguucuacgugcugcccaacgacgacacccugcgcgucgaggccuucgaguacuaccacaccaccgacccgagcuuccucgggcgguacauguccgcccugaaccacacgaagaaguggaaguacccccaggugaacggccugaccagcaucaagugggccgacaacaacugcuaccucgcgaccgcccugcugacccuccagcagaucgagcugaaguucaacccccccgcccugcaggacgccuacuaccgcgcgcgggccggggaggccgccaacuucugcgcccucauccuggcguacugcaacaagacggugggcgagcugggcgacguccgcgagaccauguccuaccucuuccagcacgccaaccuggacagcugcaagcgggugcugaacgucgugugcaagaccugcgggcagcagcagaccacccucaagggcguggaggccgucauguacauggggacgcuguccuacgagcaguucaagaagggcgugcagaucccgugcaccugcgggaagcaggccaccaaguaccuggugcagcaggagagccccuucgucaugauguccgccccccccgcgcaguacgagcucaagcacggcaccuucacgugcgccagcgaguacaccggcaacuaccagugcgggcacuacaagcacaucaccuccaaggagacccuguacugcaucgacggcgcccugcucacgaagagcagcgaguacaaggggccgaucaccgacguguucuacaaggagaacuccuacaccaccacgaucaagcccgugaccuacaagcuggacggcgucgugugcaccgagaucgaccccaagcuggacaacuacuacaagaaggacaacagcuacuucaccgagcagcccaucgaccucgugccgaaccagcccuaccccaacgccuccuucgacaacuucaaguucgucugcgacaacaucaaguucgccgacgaccugaaccagcugacgggguacaagaagcccgcgagccgcgagcucaaggugaccuucuucccggaccugaacggcgacguggucgccaucgacuacaagcacuacacccccuccuucaagaagggcgccaagcugcuccacaagcccaucguguggcacgugaacaacgccaccaacaaggcgacguacaagcccaacaccuggugcauccggugccuguggagcaccaagccggucgagaccuccaacagcuucgacgugcugaaguccgaggacgcccaggggauggacaaccucgccugcgaggaccugaagcccgugagcgaggaggucguggagaaccccacgauccagaaggacgugcuggagugcaacgucaagaccaccgagguggugggcgacaucauccucaagcccgccaacaacucccugaagaucaccgaggaggucgggcacacggaccugauggccgcguacguggacaacagcucccucaccaucaagaagccgaacgagcugagccgcgugcugggccucaagacccuggccacccacgggcuggccgccgucaacuccgugcccugggacacgaucgccaacuacgcgaagcccuuccucaacaagguggucagcaccaccaccaacaucgugacgcgcugccugaaccgggugugcaccaacuacaugccguacuucuucacccugcuccugcagcugugcaccuucacccgcuccacgaacagccggaucaaggccuccaugcccaccaccaucgccaagaacaccgucaagagcgugggcaaguucugccucgaggccagcuucaacuaccugaagucccccaacuucagcaagcugaucaacaucaucaucugguuccuccugcuguccgugugccucggcagccugaucuacuccacggccgcgcuggggguccucaugagcaaccugggcaugcccuccuacugcaccggguaccgcgagggcuaccugaacagcaccaacgugaccaucgccacguacugcaccggcuccaucccgugcagcgugugccucuccgggcuggacagccuggacaccuaccccucccucgagaccauccagaucacgaucagcuccuucaagugggaccugaccgccuucggccuggucgccgagugguuccucgccuacauccuguucacccgguucuucuacgugcuggggcucgcggccaucaugcagcuguucuucagcuacuucgccgugcacuucaucuccaacagcuggcugauguggcugaucaucaaccucguccagauggcccccaucuccgcgauggugcgcauguacaucuucuucgccagcuucuacuacguguggaagagcuacguccacgugguggacggcugcaacuccagcaccugcaugaugugcuacaagcggaaccgcgccacgcgggucgagugcaccaccaucgugaacgggguccgccgguccuucuacguguacgccaacggcggcaagggguucugcaagcugcacaacuggaacugcgugaacugcgacaccuucugcgccggcagcacguucaucuccgacgaggucgcgcgcgaccugagccuccaguucaagcggcccaucaacccgaccgaccaguccagcuacaucguggacuccgugaccgucaagaacgggagcauccaccuguacuucgacaaggccggccagaagaccuacgagcgccacucccugagccacuucgugaaccucgacaaccugcgggccaacaacacgaaggggucccugcccaucaacgugaucgucuucgacggcaagagcaagugcgaggaguccagcgccaaguccgccagcguguacuacucccagcucaugugccagcccauccugcugcucgaccaggcgcuggugagcgacgucggcgacagcgccgagguggccgugaagauguucgacgccuacgucaacaccuucuccagcaccuucaacgugcccauggagaagcugaagacccucguggccacggcggaggccgagcuggccaagaacgucucccuggacaacgugcucagcaccuucaucuccgccgcgcgccagggguucguggacagcgacgucgagaccaaggacgugguggagugccugaagcugucccaccagagcgacaucgaggucaccggcgacuccugcaacaacuacaugcucacguacaacaagguggagaacaugaccccgcgggaccugggggccugcaucgacugcagcgcccgccacaucaacgcccagguggccaagucccacaacaucgcgcugaucuggaacgucaaggacuucaugagccucuccgagcagcugcggaagcagauccgcagcgccgccaagaagaacaaccugcccuucaagcucaccugcgccaccacgcgccagguggugaacgucgugaccaccaagaucgcccugaagggcgggugaggacuagucccuguucccagagcccacuuuuuuuucuuuuuuugaaauaaaauagccugucuuucagaucucaaaggcucuuuucagagccaccaaaaaaaaaaaaaaaaaaaaaaaaaaaaaaaaaaaaaaaaaaaaaaaaaaaaaaaaaaaaaaaaaaaaaaaaaaaaaaaaaaaaaaaaaaaaaaaaaaaaa

SEQ ID NO: 19765 - RNA, 6113 nt, Artificial Sequence
  SARS-CoV-2__MT811683.1__non-structural protein 3 (NSP3) mRNA gc
aggagagucccgcagucggcguccagcggcucugcuuguucgugugugugucguugcaggccuuauucaagcuuaccauggcccccaccaaggugaccuucggcgacgacacggucaucgaggugcagggguacaagagcgugaacaucaccuucgagcuggacgagcgcaucgacaagguccucaacgagaagugcuccgccuacaccguggagcugggcaccgaggugaacgaguucgcgugcgucguggccgacgccgugaucaagacgcugcagccggucagcgagcuccugaccccccuggggaucgaccucgacgagugguccauggccaccuacuaccuguucgacgagagcggcgaguucaagcuggccucccacauguacugcagcuucuacccccccgacgaggacgaggaggagggggacugcgaggaggaggaguucgagccguccacccaguacgaguacggcacggaggacgacuaccagggcaagccccucgaguucggggcgaccagcgccgcccugcagcccgaggaggagcaggaggaggacuggcuggacgacgacucccagcagaccgugggccagcaggacgggagcgaggacaaccagaccacgaccauccagaccaucguggagguccagccccagcucgagauggagcugaccccgguggugcagacgaucgaggucaacuccuucagcggcuaccugaagcucaccgacaacguguacaucaagaacgccgacaucguggaggaggcgaagaaggucaagcccaccgugguggucaacgccgccaacguguaccugaagcacgggggcggcguggccggggcccugaacaaggcgaccaacaacgccaugcaggucgaguccgacgacuacaucgccacgaacggcccccucaagguggggggcagcugcguccuguccggccacaaccuggccaagcacugccuccacgugguggggcccaacgucaacaagggcgaggacauccagcugcugaagagcgccuacgagaacuucaaccagcacgaggugcuccuggcgccgcugcucuccgccgggaucuucggcgccgaccccauccacagccugcgggugugcgucgacaccgugcgcaccaacguguaccuggccgucuucgacaagaaccucuacgacaagcugguguccagcuuccuggagaugaagagcgagaagcagguggagcagaagaucgccgagauccccaaggaggaggucaagcccuucaucaccgaguccaagccgagcguggagcagcggaagcaggacgacaagaagaucaaggcgugcguggaggaggucacgaccacccucgaggagaccaaguuccugacggagaaccugcuccuguacaucgacaucaacgggaaccugcaccccgacuccgccacccucgugagcgacaucgacaucaccuuccugaagaaggacgcccccuacaucgugggcgacgucgugcaggagggcgugcugaccgccgucgugauccccacgaagaaggccgggggcaccaccgagaugcucgcgaaggcccugcgcaaggugccgaccgacaacuacaucacgaccuaccccgggcagggccugaacggguacaccgucgaggaggccaagaccgugcucaagaagugcaaguccgccuucuacauccugcccagcaucaucuccaacgagaagcaggagauccugggcaccgugagcuggaaccuccgggagaugcuggcgcacgccgaggagacgcgcaagcugaugcccgucugcguggagaccaaggccaucguguccaccauccagcggaaguacaagggcaucaagauccaggagggggucguggacuacggcgcccgcuucuacuucuacaccagcaagacgaccguggccucccugaucaacacccucaacgaccugaacgagacccuggucacgaugccgcucggguacgugacccacggccugaaccuggaggaggcggcccgguacaugcgcagccucaaggugcccgccaccgucuccgugagcucccccgacgccgugaccgccuacaacggguaccugacgagcuccagcaagacccccgaggagcacuucaucgagaccaucucccuggcgggcagcuacaaggacuggagcuacuccggccagagcacccagcucgggaucgaguuccugaagcggggcgacaaguccgucuacuacacgagcaacccgaccaccuuccaccuggacggggaggugaucaccuucgacaaccucaagacgcugcugucccuccgcgaggugcggaccaucaaggucuucaccaccguggacaacaucaaccugcacacgcagguggucgacaugagcaugaccuacggccagcaguucggccccaccuaccuggacggggccgacgugaccaagaucaagccccacaacucccacgagggcaagacguucuacgugcucccgaacgacgacacccugcgcgucgaggccuucgaguacuaccacaccaccgaccccagcuuccuggggcgguacauguccgcccucaaccacacgaagaaguggaaguacccccaggugaacggccugaccagcaucaagugggccgacaacaacugcuaccuggcgaccgcccuccugacccugcagcagaucgagcucaaguucaaccccccggcccugcaggacgccuacuaccgcgcgcgggccggggaggccgccaacuucugcgcccugauccucgcguacugcaacaagacggugggcgagcugggcgacguccgcgagaccauguccuaccuguuccagcacgccaaccucgacagcugcaagcgggugcugaacgucgugugcaagaccugcgggcagcagcagaccacccugaagggcguggaggccgucauguacauggggacgcucuccuacgagcaguucaagaagggcgugcagauccccugcaccugcgggaagcaggccaccaaguaccuggugcagcaggagagccccuucgucaugauguccgcccccccggcgcaguacgagcugaagcacggcaccuucacgugcgccagcgaguacaccggcaacuaccagugcgggcacuacaagcacaucaccuccaaggagacccucuacugcaucgacggcgcccugcugacgaagagcagcgaguacaaggggcccaucaccgacguguucuacaaggagaacuccuacaccaccacgaucaagcccgugaccuacaagcucgacggcgucgugugcaccgagaucgaccccaagcuggacaacuacuacaagaaggacaacagcuacuucaccgagcagccgaucgaccuggugcccaaccagcccuaccccaacgccuccuucgacaacuucaaguucgucugcgacaacaucaaguucgccgacgaccucaaccagcugacgggguacaagaagccggcgagccgcgagcugaaggugaccuucuuccccgaccucaacggcgacguggucgccaucgacuacaagcacuacacccccuccuucaagaagggcgccaagcugcugcacaagcccaucguguggcacgugaacaacgccaccaacaaggcgacguacaagccgaacaccuggugcauccggugccucuggagcaccaagcccgucgagaccuccaacagcuucgacgugcugaaguccgaggacgcccaggggauggacaaccuggccugcgaggaccucaagcccgugagcgaggaggucguggagaaccccacgauccagaaggacgugcuggagugcaacgucaagaccaccgagguggugggcgacaucauccugaagccggccaacaacucccucaagaucaccgaggaggucgggcacacggaccugauggccgcguacguggacaacagcucccugaccaucaagaagcccaacgagcucagccgcgugcugggccugaagacccucgccacccacgggcuggccgccgucaacuccgugcccugggacacgaucgccaacuacgcgaagccguuccugaacaagguggucagcaccaccaccaacaucgugacgcgcugccucaaccgggugugcaccaacuacaugcccuacuucuucacccugcugcuccagcugugcaccuucacccgcuccacgaacagccggaucaaggccuccaugcccaccaccaucgccaagaacaccgucaagagcgugggcaaguucugccuggaggccagcuucaacuaccucaagucccccaacuucagcaagcugaucaacaucaucaucugguuccugcuccuguccgugugccugggcagccucaucuacuccacggccgcgcuggggguccugaugagcaaccucggcaugccguccuacugcaccggguaccgcgagggcuaccugaacagcaccaacgugaccaucgccacguacugcaccggcuccauccccugcagcgugugccuguccgggcucgacagccuggacaccuaccccucccuggagaccauccagaucacgaucagcuccuucaagugggaccucaccgccuucggccuggucgccgagugguuccuggccuacauccucuucacccgguucuucuacgugcuggggcuggcggccaucaugcagcucuucuucagcuacuucgccgugcacuucaucuccaacagcuggcugauguggcugaucaucaaccugguccagauggcccccaucuccgcgauggugcgcauguacaucuucuucgccagcuucuacuacguguggaagagcuacguccacgugguggacggcugcaacuccagcaccugcaugaugugcuacaagcggaaccgcgccacgcgggucgagugcaccaccaucgugaacgggguccgccggccguucuacguguacgccaacggcggcaagggguucugcaagcuccacaacuggaacugcgugaacugcgacaccuucugcgccggcuccacguucaucagcgacgaggucgcgcgcgaccugucccugcaguucaagcggcccaucaaccccaccgaccagagcuccuacaucguggacagcgugaccgucaagaacggguccauccaccucuacuucgacaaggccggccagaagaccuacgagcgccacagccugucccacuucgugaaccuggacaaccuccgggccaacaacacgaaggggagccugcccaucaacgugaucgucuucgacggcaaguccaagugcgaggagagcuccgccaagagcgccuccguguacuacagccagcugaugugccagccgauccuccugcuggaccaggcgcucguguccgacgucggcgacagcgccgagguggccgugaagauguucgacgccuacgucaacaccuucagcuccaccuucaacgugcccauggagaagcugaagacccugguggccacggcggaggccgagcucgccaagaacgucagccuggacaacgugcuguccaccuucaucagcgccgcgcgccagggguucguggacuccgacgucgagaccaaggacgugguggagugccucaagcugagccaccaguccgacaucgaggucaccggcgacagcugcaacaacuacaugcugacguacaacaagguggagaacaugaccccccgggaccucggggccugcaucgacugcuccgcccgccacaucaacgcccagguggccaagagccacaacaucgcgcugaucuggaacgucaaggacuucaugucccugagcgagcagcuccggaagcagauccgcuccgccgccaagaagaacaaccugcccuucaagcugaccugcgccaccacgcgccagguggugaacgucgugaccaccaagaucgcccucaagggcgggugaggacuagucccuguucccagagcccacuuuuuuuucuuuuuuugaaauaaaauagccugucuuucagaucucaaaggcucuuuucagagccaccaaaaaaaaaaaaaaaaaaaaaaaaaaaaaaaaaaaaaaaaaaaaaaaaaaaaaaaaaaaaaaaaaaaaaaaaaaaaaaaaaaaaaaaaaaaaaaaaaaaaa

SEQ ID NO: 19766 - RNA, 6113 nt, Artificial Sequence
  SARS-CoV-2__MT811688.1__non-structural protein 3 (NSP3) mRNA gc
aggagagucccgcagucggcguccagcggcucugcuuguucgugugugugucguugcaggccuuauucaagcuuaccauggcccccaccaaggugaccuucggcgacgacacggucaucgaggugcagggguacaagagcgugaacaucaccuucgagcuggacgagcgcaucgacaagguccucaacgagaagugcuccgccuacaccguggagcugggcaccgaggugaacgaguucgcgugcgucguggccgacgccgugaucaagacgcugcagccggucagcgagcuccugaccccccuggggaucgaccucgacgagugguccauggccaccuacuaccuguucgacgagagcggcgaguucaagcuggccucccacauguacugcagcuucuacccccccgacgaggacgaggaggagggggacugcgaggaggaggaguucgagccguccacccaguacgaguacggcacggaggacgacuaccagggcaagccccucgaguucggggcgaccagcgccgcccugcagcccgaggaggagcaggaggaggacuggcuggacgacgacucccagcagaccgugggccagcaggacgggagcgaggacaaccagaccacgaccauccagaccaucguggagguccagccccagcucgagauggagcugaccccgguggugcagacgaucgaggucaacuccuucagcggcuaccugaagcucaccgacaacguguacaucaagaacgccgacaucguggaggaggcgaagaaggucaagcccaccgugguggucaacgccgccaacguguaccugaagcacgggggcggcguggccggggcccugaacaaggcgaccaacaacgccaugcaggucgaguccgacgacuacaucgccacgaacggcccccucaagguggggggcagcugcguccuguccggccacaaccuggccaagcacugccuccacgugguggggcccaacgucaacaagggcgaggacauccagcugcugaagagcgccuacgagaacuucaaccagcacgaggugcuccuggcgccgcugcucuccgccgggaucuucggcgccgaccccauccacagccugcgggugugcgucgacaccgugcgcaccaacguguaccuggccgucuucgacaagaaccucuacgacaagcugguguccagcuuccuggagaugaagagcgagaagcagguggagcagaagaucgccgagauccccaaggaggaggucaagcccuucaucaccgaguccaagccgagcguggagcagcggaagcaggacgacaagaagaucaaggcgugcguggaggaggucacgaccacccucgaggagaccaaguuccugacggagaaccugcuccuguacaucgacaucaacgggaaccugcaccccgacuccgccacccucgugagcgacaucgacaucaccuuccugaagaaggacgcccccuacaucgugggcgacgucgugcaggagggcuuccugaccgccguggucauccccacgaagaaggccgggggcaccaccgagaugcucgcgaaggcccugcgcaaggugccgaccgacaacuacaucacgaccuaccccgggcagggccugaacggguacaccguggaggaggccaagaccguccucaagaagugcaaguccgccuucuacauccugcccagcaucaucuccaacgagaagcaggagauccugggcaccgugagcuggaaccuccgggagaugcuggcgcacgccgaggagacgcgcaagcugaugcccgugugcgucgagaccaaggccaucguguccaccauccagcggaaguacaagggcaucaagauccaggaggggguggucgacuacggcgcccgcuucuacuucuacaccagcaagacgaccguggccucccugaucaacacccucaacgaccugaacgagacccuggugacgaugccgcucggguacgucacccacggccugaaccuggaggaggcggcccgguacaugcgcagccucaaggugcccgccaccguguccgucagcucccccgacgccgugaccgccuacaacggguaccugacgagcuccagcaagacccccgaggagcacuucaucgagaccaucucccuggcgggcagcuacaaggacuggagcuacuccggccagagcacccagcucgggaucgaguuccugaagcggggcgacaaguccguguacuacacgagcaacccgaccaccuuccaccuggacggggaggucaucaccuucgacaaccucaagacgcugcugucccuccgcgaggugcggaccaucaagguguucaccaccgucgacaacaucaaccugcacacgcaggugguggacaugagcaugaccuacggccagcaguucggccccaccuaccuggacggggccgacgucaccaagaucaagccccacaacucccacgagggcaagacguucuacgugcucccgaacgacgacacccugcgcguggaggccuucgaguacuaccacaccaccgaccccagcuuccuggggcgguacauguccgcccucaaccacacgaagaaguggaaguacccccaggucaacggccugaccagcaucaagugggccgacaacaacugcuaccuggcgaccgcccuccugacccugcagcagaucgagcucaaguucaaccccccggcccugcaggacgccuacuaccgcgcgcgggccggggaggccgccaacuucugcgcccugauccucgcguacugcaacaagacggugggcgagcugggcgacgugcgcgagaccauguccuaccuguuccagcacgccaaccucgacagcugcaagcggguccugaacguggucugcaagaccugcgggcagcagcagaccacccugaagggcguggaggccgugauguacauggggacgcucuccuacgagcaguucaagaagggcguccagauccccugcaccugcgggaagcaggccaccaaguaccuggugcagcaggagagccccuucgugaugauguccgcccccccggcgcaguacgagcugaagcacggcaccuucacgugcgccagcgaguacaccggcaacuaccagugcgggcacuacaagcacaucaccuccaaggagacccucuacugcaucgacggcgcccugcugacgaagagcagcgaguacaaggggcccaucaccgacgucuucuacaaggagaacuccuacaccaccacgaucaagcccgugaccuacaagcucgacggcguggucugcaccgagaucgaccccaagcuggacaacuacuacaagaaggacaacagcuacuucaccgagcagccgaucgaccuggugcccaaccagcccuaccccaacgccuccuucgacaacuucaaguucgugugcgacaacaucaaguucgccgacgaccucaaccagcugacgggguacaagaagccggcgagccgcgagcugaaggucaccuucuuccccgaccucaacggcgacgugguggccaucgacuacaagcacuacacccccuccuucaagaagggcgccaagcugcugcacaagcccaucgucuggcacgugaacaacgccaccaacaaggcgacguacaagccgaacaccuggugcauccggugccucuggagcaccaagcccguggagaccuccaacagcuucgacguccugaaguccgaggacgcccaggggauggacaaccuggccugcgaggaccucaagcccgugagcgaggagguggucgagaaccccacgauccagaaggacgugcuggagugcaacgugaagaccaccgaggucgugggcgacaucauccugaagccggccaacaacucccucaagaucaccgaggagguggggcacacggaccugauggccgcguacgucgacaacagcucccugaccaucaagaagcccaacgagcucagccgcgugcugggccugaagacccucgccacccacgggcuggccgccgugaacuccguccccugggacacgaucgccaacuacgcgaagccguuccugaacaagguggugagcaccaccaccaacaucgucacgcgcugccucaaccgggugugcaccaacuacaugcccuacuucuucacccugcugcuccagcugugcaccuucacccgcuccacgaacagccggaucaaggccuccaugcccaccaccaucgccaagaacaccgugaagagcgucggcaaguucugccuggaggccagcuucaacuaccucaagucccccaacuucagcaagcugaucaacaucaucaucugguuccugcuccuguccgugugccugggcagccucaucuacuccacggccgcgcugggggugcugaugagcaaccucggcaugccguccuacugcaccggguaccgcgagggcuaccugaacagcaccaacgucaccaucgccacguacugcaccggcuccauccccugcagcgugugccuguccgggcucgacagccuggacaccuaccccucccuggagaccauccagaucacgaucagcuccuucaagugggaccucaccgccuucggccugguggccgagugguuccuggccuacauccucuucacccgguucuucuacguccuggggcuggcggccaucaugcagcucuucuucagcuacuucgccgugcacuucaucuccaacagcuggcugauguggcugaucaucaaccuggugcagauggcccccaucuccgcgaugguccgcauguacaucuucuucgccagcuucuacuacguguggaagagcuacgugcacgucguggacggcugcaacuccagcaccugcaugaugugcuacaagcggaaccgcgccacgcggguggagugcaccaccaucgucaacggggugcgccgguccuucuacgucuacgccaacggcggcaagggguucugcaagcuccacaacuggaacugcgugaacugcgacaccuucugcgccggcagcacguucaucuccgacgagguggcgcgcgaccugagccugcaguucaagcggccgaucaaccccaccgaccaguccagcuacaucgucgacuccgugaccgugaagaacgggagcauccaccucuacuucgacaaggccggccagaagaccuacgagcgccacucccugagccacuucgucaaccuggacaaccuccgggccaacaacacgaaggggucccugcccaucaacgugaucguguucgacggcaagagcaagugcgaggaguccagcgccaaguccgccagcgucuacuacucccagcugaugugccagcccauccuccugcuggaccaggcgcucgugagcgacgugggcgacagcgccgaggucgccgugaagauguucgacgccuacgugaacaccuucuccagcaccuucaacgucccgauggagaagcugaagacccugguggccacggcggaggccgagcucgccaagaacgugucccuggacaacguccugagcaccuucaucuccgccgcgcgccagggguucguggacagcgacguggagaccaaggacgucguggagugccucaagcugucccaccagagcgacaucgaggugaccggcgacuccugcaacaacuacaugcugacguacaacaaggucgagaacaugaccccccgggaccucggggccugcaucgacugcagcgcccgccacaucaacgcccagguggccaagucccacaacaucgcgcugaucuggaacgugaaggacuucaugagccuguccgagcagcuccggaagcagauccgcagcgccgccaagaagaacaaccugcccuucaagcugaccugcgccaccacgcgccaggucgugaacguggucaccaccaagaucgcccucaagggcgggugaggacuagucccuguucccagagcccacuuuuuuuucuuuuuuugaaauaaaauagccugucuuucagaucucaaaggcucuuuucagagccaccaaaaaaaaaaaaaaaaaaaaaaaaaaaaaaaaaaaaaaaaaaaaaaaaaaaaaaaaaaaaaaaaaaaaaaaaaaaaaaaaaaaaaaaaaaaaaaaaaaaaa

SEQ ID NO: 19767 - RNA, 6113 nt, Artificial Sequence
  SARS-CoV-2__MT811695.1__non-structural protein 3 (NSP3) mRNA gc
aggagagucccgcagucggcguccagcggcucugcuuguucgugugugugucguugcaggccuuauucaagcuuaccauggcccccaccaaggugaccuucggcgacgacacggucaucgaggugcagggguacaagagcgugaacaucaccuucgagcuggacgagcgcaucgacaagguccucaacgagaagugcuccgccuacaccguggagcugggcaccgaggugaacgaguucgcgugcgucguggccgacgccgugaucaagacgcugcagccggucagcgagcuccugaccccccuggggaucgaccucgacgagugguccauggccaccuacuaccuguucgacgagagcggcgaguucaagcuggccucccacauguacugcagcuucuacccccccgacgaggacgaggaggagggggacugcgaggaggaggaguucgagccguccacccaguacgaguacggcacggaggacgacuaccagggcaagccccucgaguucggggcgaccagcgccgcccugcagcccgaggaggagcaggaggaggacuggcuggacgacgacucccagcagaccgugggccagcaggacgggagcgaggacaaccagaccacgaccauccagaccaucguggagguccagccccagcucgagauggagcugaccccgguggugcagacgaucgaggucaacuccuucagcggcuaccugaagcucaccgacaacguguacaucaagaacgccgacaucguggaggaggcgaagaaggucaagcccaccgugguggucaacgccgccaacguguaccugaagcacgggggcggcguggccggggcccugaacaaggcgaccaacaacgccaugcaggucgaguccgacgacuacaucgccacgaacggcccccucaagguggggggcagcugcguccuguccggccacaaccuggccaagcacugccuccacgugguggggcccaacgucaacaagggcgaggacauccagcugcugaagagcgccuacgagaacuucaaccagcacgaggugcuccuggcgccgcugcucuccgccgggaucuucggcgccgaccccauccacagccugcgggugugcgucgacaccgugcgcaccaacguguaccuggccgucuucgacaagaaccucuacgacaagcugguguccagcuuccuggagaugaagagcgagaagcagguggagcagaagaucgccgagauccccaaggaggaggucaagcccuucaucaccgaguccaagccgagcguggagcagcggaagcaggacgacaagaagaucaaggcgugcguggaggaggucacgaccacccucgaggagaccaaguuccugacggagaaccugcuccuguacaucgacaucaacgggaaccugcaccccgacuccgccacccucgugagcgacaucgacaucaccuuccugaagaaggacgcccccuacaucgugggcgacgucgugcaggagggcgugcugaccgccgucgugauccccacgaagaaggccgggggcaccaccgagaugcucgcgaaggcccugcgcaaggugccgaccgacaacuacaucacgaccuaccccgggcagggccugaacggguacaccgucgaggaggccaagaccgugcucaagaagugcaaguccgccuucuacauccugcccagcaucaucuccaacgagaagcaggagauccugggcaccgugagcuggaaccuccgggagaugcuggcgcacgccgaggagacgcgcaagcugaugcccgucugcguggagaccaaggccaucguguccaccauccagcggaaguacaagggcaucaagauccaggagggggucguggacuacggcgcccgcuucuacuucuacaccagcaagacgaccguggccucccugaucaacacccucaacgaccugaacgagacccuggucacgaugccgcucggguacgugacccacggccugaaccuggaggaggcggcccgguacaugcgcagccucaaggugcccgccaccgucuccgugagcucccccgacgccgugaccgccuacaacggguaccugacgagcuccagcaagacccccgaggagcacuucaucgagaccaucucccuggcgggcagcuacaaggacuggagcuacuccggccagagcacccagcucgggaucgaguuccugaagcggggcgacaaguccgucuacuacacgagcaacccgaccaccuuccaccuggacggggaggugaucaccuucgacaaccucaagacgcugcugucccuccgcgaggugcggaccaucaaggucuucaccaccguggacaacaucaaccugcacacgcagguggucgacaugagcaugaccuacggccagcaguucggccccaccuaccuggacggggccgacgugaccaagaucaagccccacaacucccacgagggcaagacguucuacgugcucccgaacgacgacacccugcgcgucgaggccuucgaguacuaccacaccaccgaccccagcuuccuggggcgguacauguccgcccucaaccacacgaagaaguggaaguacccccaggugaacggccugaccagcaucaagugggccgacaacaacugcuaccuggcgaccgcccuccugacccugcagcagaucgagcucaaguucaaccccccggcccugcaggacgccuacuaccgcgcgcgggccggggaggccgccaacuucugcgcccugauccucgcguacugcaacaagacggugggcgagcugggcgacguccgcgagaccauguccuaccuguuccagcacgccaaccucgacagcugcaagcgggugcugaacgucgugugcaagaccugcgggcagcagcagaccacccugaagggcguggaggccgucauguacauggggacgcucuccuacgagcaguucaagaagggcgugcagauccccugcaccugcgggaagcaggccaccaaguaccuggugcagcaggagagccccuucgucaugauguccgcccccccggcgcaguacgagcugaagcacggcaccuucacgugcgccagcgaguacaccggcaacuaccagugcgggcacuacaagcacaucaccuccaaggagacccucuacugcaucgacggcgcccugcugacgaagagcagcgaguacaaggggcccaucaccgacguguucuacaaggagaacuccuacaccaccacgaucaagcccgugaccuacaagcucgacggcgucgugugcaccgagaucgaccccaagcuggacaacuacuacaagaaggacaacagcuacuucaccgagcagccgaucgaccuggugcccaaccagcccuaccccaacgccuccuucgacaacuucaaguucgucugcgacaacaucaaguucgccgacgaccucaaccagcugacgggguacaagaagccggcgagccgcgagcugaaggugaccuucuuccccgaccucaacggcgacguggucgccaucgacuacaagcacuacacccccuccuucaagaagggcgccaagcugcugcacaagcccaucguguggcacgugaacaacgccaccaacaaggcgacguacaagccgaacaccuggugcauccggugccucuggagcaccaagcccgucgagaccuccaacagcuucgacgugcugaaguccgaggacacgcaggggauggacaaccuggccugcgaggaccucaagcccgugagcgaggaggucguggagaaccccaccauccagaaggacgugcuggagugcaacgucaagaccaccgagguggugggcgacaucauccugaagccggccaacaacucccucaagaucacggaggaggucgggcacaccgaccugauggccgccuacguggacaacagcucccugaccaucaagaagcccaacgagcucagccgcgugcugggccugaagacccucgcgacgcacgggcuggccgccgucaacuccgugcccugggacaccaucgccaacuacgccaagccguuccugaacaagguggucagcaccaccacgaacaucgugacccgcugccucaaccgggugugcaccaacuacaugcccuacuucuucacccugcugcuccagcugugcaccuucacgcgcuccaccaacagccggaucaaggcguccaugcccaccaccaucgccaagaacacggucaagagcgugggcaaguucugccuggaggccagcuucaacuaccucaagucccccaacuucagcaagcugaucaacaucaucaucugguuccugcuccuguccgugugccugggcagccucaucuacuccaccgccgcccuggggguccugaugagcaaccucggcaugccguccuacugcaccggguaccgcgagggcuaccugaacagcaccaacgugacgaucgcgaccuacugcaccggcuccauccccugcagcgugugccuguccgggcucgacagccuggacaccuaccccucccuggagacgauccagaucaccaucagcuccuucaagugggaccucaccgccuucggccuggucgccgagugguuccuggccuacauccucuucacccgguucuucuacgugcuggggcuggccgcgaucaugcagcucuucuucagcuacuucgccgugcacuucaucuccaacagcuggcugauguggcugaucaucaaccugguccagauggcccccaucuccgccauggugcgcauguacaucuucuucgcgagcuucuacuacguguggaagagcuacguccacgugguggacggcugcaacuccagcacgugcaugaugugcuacaagcggaaccgcgccacccgggucgagugcaccaccaucgugaacgggguccgccgguccuucuacguguacgccaacggcggcaagggguucugcaagcuccacaacuggaacugcgugaacugcgacacguucugcgccggcagcaccuucaucuccgacgaggucgcccgcgaccugagccugcaguucaagcggccgaucaaccccaccgaccaguccagcuacaucguggacuccgugaccgucaagaacgggagcauccaccucuacuucgacaaggcgggccagaagacguacgagcgccacuuccugucccacuucgugaaccuggacaaccuccgggccaacaacaccaaggggagccugcccaucaacgugaucgucuucgacggcaaguccaagugcgaggagagcuccgccaagagcgccuccguguacuacagccagcugaugugccagcccauccuccugcuggaccaggcccucguguccgacgucggcgacagcgcggagguggccgugaagauguucgacgccuacgucaacaccuucagcuccaccuucaacgugccgauggagaagcugaagacgcugguggccaccgccgaggcggagcucgccaagaacgucagccuggacaacgugcuguccaccuucaucagcgccgcccgccagggguucguggacuccgacgucgagaccaaggacgugguggagugccucaagcugagccaccaguccgacaucgaggucacgggcgacagcugcaacaacuacaugcugaccuacaacaagguggagaacaugaccccccgggaccucggggcgugcaucgacugcuccgcccgccacaucaacgcccagguggccaagagccacaacaucgcccugaucuggaacgucaaggacuucaugucccugagcgagcagcuccggaagcagauccgcuccgcggccaagaagaacaaccugcccuucaagcugaccugcgccacgacccgccagguggugaacgucgugaccaccaagaucgcccucaagggcgggugaggacuagucccuguucccagagcccacuuuuuuuucuuuuuuugaaauaaaauagccugucuuucagaucucaaaggcucuuuucagagccaccaaaaaaaaaaaaaaaaaaaaaaaaaaaaaaaaaaaaaaaaaaaaaaaaaaaaaaaaaaaaaaaaaaaaaaaaaaaaaaaaaaaaaaaaaaaaaaaaaaaaa

SEQ ID NO: 19768 - RNA, 6113 nt, Artificial Sequence
  SARS-CoV-2__MT811708.1__non-structural protein 3 (NSP3) mRNA gc
aggagagucccgcagucggcguccagcggcucugcuuguucgugugugugucguugcaggccuuauucaagcuuaccauggcccccaccaaggugaccuucggcgacgacacggucaucgaggugcagggguacaagagcgugaacaucaccuucgagcuggacgagcgcaucgacaagguccucaacgagaagugcuccgccuacaccguggagcugggcaccgaggugaacgaguucgcgugcgucguggccgacgccgugaucaagacgcugcagccggucagcgagcuccugaccccccuggggaucgaccucgacgagugguccauggccaccuacuaccuguucgacgagagcggcgaguucaagcuggccucccacauguacugcagcuucuacccccccgacgaggacgaggaggagggggacugcgaggaggaggaguucgagccguccacccaguacgaguacggcacggaggacgacuaccagggcaagccccucgaguucggggcgaccagcgccgcccugcagcccgaggaggagcaggaggaggacuggcuggacgacgacucccagcagaccgugggccagcaggacgggagcgaggacaaccagaccacgaccauccagaccaucguggagguccagccccagcucgagauggagcugaccccgguggugcagacgaucgaggucaacuccuucagcggcuaccugaagcucaccgacaacguguacaucaagaacgccgacaucguggaggaggcgaagaaggucaagcccaccgugguggucaacgccgccaacguguaccugaagcacgggggcggcguggccggggcccugaacaaggcgaccaacaacgccaugcaggucgaguccgacgacuacaucgccacgaacggcccccucaagguggggggcagcugcguccuguccggccacaaccuggccaagcacugccuccacgugguggggcccaacgucaacaagggcgaggacauccagcugcugaagagcgccuacgagaacuucaaccagcacgaggugcuccuggcgccgcugcucuccgccgggaucuucggcgccgaccccauccacagccugcgggugugcgucgacaccgugcgcaccaacguguaccuggccgucuucgacaagaaccucuacgacaagcugguguccagcuuccuggagaugaagagcgagaagcagguggagcagaagaucgccgagauccccaaggaggaggucaagcccuucaucaccgaguccaagccgagcguggagcagcggaagcaggacgacaagaagaucaaggcgugcguggaggaggucacgaccacccucgaggagaccaaguuccugacggagaaccugcuccuguacaucgacaucaacgggaaccugcaccccgacuccgccacccucgugagcgacaucgacaucaccuuccugaagaaggacgcccccuacaucgugggcgacgucgugcaggagggcgugcugaccgccgucgugauccccacgaagaaggccgggggcaccaccgagaugcucgcgaaggcccugcgcaaggugccgaccgacaacuacaucacgaccuaccccgggcagggccugaacggguacaccgucgaggaggccaagaccgugcucaagaagugcaaguccgccuucuacauccugcccagcaucaucuccaacgagaagcaggagauccugggcaccgugagcuggaaccuccgggagaugcuggcgcacgccgaggagacgcgcaagcugaugcccgucugcguggagaccaaggccaucguguccaccauccagcggaaguacaagggcaucaagauccaggagggggucguggacuacggcgcccgcuucuacuucuacaccagcaagacgaccguggccucccugaucaacacccucaacgaccugaacgagacccuggucacgaugccgcucggguacgugacccacggccugaaccuggaggaggcggcccgguacaugcgcagccucaaggugcccgccaccgucuccgugagcucccccgacgccgugaccgccuacaacggguaccugacgagcuccagcaagacccccgaggagcacuucaucgagaccaucucccuggcgggcagcuacaaggacuggagcuacuccggccagagcacccagcucgggaucgaguuccugaagcggggcgacaaguccgucuacuacacgagcaacccgaccaccuuccaccuggacggggaggugaucaccuucgacaaccucaagacgcugcugucccuccgcgaggugcggaccaucaaggucuucaccaccguggacaacaucaaccugcacacgcagguggucgacaugagcaugaccuacggccagcaguucggccccaccuaccuggacggggccgacgugaccaagaucaagccccacaacucccacgagggcaagacguucuacgugcucccgaacgacgacacccugcgcgucgaggccuucgaguacuaccacaccaccgaccccagcuuccuggggcgguacauguccgcccucaaccacacgaagaaguggaaguacccccaggugaacggccugaccagcaucaagugggccgacaacaacugcuaccuggcgaccgcccuccugacccugcagcagaucgagcucaaguucaaccccccggcccugcaggacgccuacuaccgcgcgcgggccggggaggccgccaacuucugcgcccugauccucgcguacugcaacaagacggugggcgagcugggcgacguccgcgagaccauguccuaccuguuccagcacgccaaccucgacagcugcaagcgggugcugaacgucgugugcaagaccugcgggcagcagcagaccacccugaagggcguggaggccgucauguacauggggacgcucuccuacgagcaguucaagaagggcgugcagauccccugcaccugcgggaagcaggccaccaaguaccuggugcagcaggagagccccuucgucaugauguccgcccccccggcgcaguacgagcugaagcacggcaccuucacgugcgccagcgaguacaccggcaacuaccagugcgggcacuacaagcacaucaccuccaaggagacccucuacugcaucgacggcgcccugcugacgaagagcagcgaguacaaggggcccaucaccgacguguucuacaaggagaacuccuacaccaccacgaucaagcccgugaccuacaagcucgacggcgucgugugcaccgagaucgaccccaagcuggacaacuacuacaagaaggacaacagcuacuucaccgagcagccgaucgaccuggugcccaaccagcccuaccccaacgccuccuucgacaacuucaaguucgucugcgacaacaucaaguucgccgacgaccucaaccagcugacgggguacaagaagccggcgagccgcgagcugaaggugaccuucuuccccgaccucaacggcgacguggucgccaucgacuacaagcacuacacccccuccuucaagaagggcgccaagcugcugcacaagcccaucguguggcacgugaacaacgccaccaacaaggcgacguacaagccgaacaccuggugcauccggugccucuggagcaccaagcccgucgagaccuccaacagcuucgacgugcugaaguccgaggacacgcaggggauggacaaccuggccugcgaggaccucaagcccgugagcgaggaggucguggagaaccccaccauccagaaggacgugcuggagugcaacgucaagaccaccgagguggugggcgacaucauccugaagccggccaacaacucccucaagaucacggaggaggucgggcacaccgaccugauggccgccuacguggacaacagcucccugaccaucaagaagcccaacgagcucagccgcgugcugggccugaagacccucgcgacgcacgggcuggccgccgucaacuccgugcccugggacaccaucgccaacuacgccaagccguuccugaacaagguggucagcaccaccacgaacaucgugacccgcugccucaaccgggugugcaccaacuacaugcccuacuucuucacccugcugcuccagcugugcaccuucacgcgcuccaccaacagccggaucaaggcguccaugcccaccaccaucgccaagaacacggucaagagcgugggcaaguucugccuggaggccagcuucaacuaccucaagucccccaacuucagcaagcugaucaacaucaucaucugguuccugcuccuguccgugugccugggcagccucaucuacuccaccgccgcccuggggguccugaugagcaaccucggcaugccguccuacugcaccggguaccgcgagggcuaccugaacagcaccaacgugacgaucgcgaccuacugcaccggcuccauccccugcagcgugugccuguccgggcucgacagccuggacaccuaccccucccuggagacgauccagaucaccaucagcuccuucaagugggaccucaccgccuucggccuggucgccgagugguuccuggccuacauccucuucacccgguucuucuacgugcuggggcuggccgcgaucaugcagcucuucuucagcuacuucgccgugcacuucaucuccaacagcuggcugauguggcugaucaucaaccugguccagauggcccccaucuccgccauggugcgcauguacaucuucuucgcgagcuucuacuacguguggaagagcuacguccacgugguggacggcugcaacuccagcacgugcaugaugugcuacaagcggaaccgcgccacccgggucgagugcaccaccaucgugaacgggguccgccgguccuucuacguguacgccaacggcggcaagggguucugcaagcuccacaacuggaacugcgugaacugcgacacguucugcgccggcagcaccuucaucuccgacgaggucgcccgcgaccugagccugcaguucaagcggccgaucaaccccaccgaccaguccagcuacaucguggacuccgugaccgucaagaacgggagcauccaccucuacuucgacaaggcgggccagaagacguacgagcgccacucccugagccacuucgugaaccuggacaaccuccgggccaacaacaccaaggggucccugcccaucaacgugaucgucuucgacggcaagagcaagugcgaggaguccagcgccaaguccgccagcguguacuacucccagcugaugugccagcccauccuccugcuggaccaggcccucgugagcgacgucggcgacagcgcggagguggccgugaagauguucgacgccuacgucaacaccuucuccagcaccuucaacgugccgauggagaagcugaagacgcugguggccaccgccgaggcggagcucgccaagaacgucucccuggacaacgugcugagcaccuucaucuccgccgcccgccagggguucguggacagcgacgucgagaccaaggacgugguggagugccucaagcugucccaccagagcgacaucgaggucacgggcgacuccugcaacaacuacaugcugaccuacaacaagguggagaacaugaccccccgggaccucggggcgugcaucgacugcagcgcccgccacaucaacgcccagguggccaagucccacaacaucgcccugaucuggaacgucaaggacuucaugagccuguccgagcagcuccggaagcagauccgcagcgcggccaagaagaacaaccugcccuucaagcugaccugcgccacgacccgccagguggugaacgucgugaccaccaagaucgcccucaagggcgggugaggacuagucccuguucccagagcccacuuuuuuuucuuuuuuugaaauaaaauagccugucuuucagaucucaaaggcucuuuucagagccaccaaaaaaaaaaaaaaaaaaaaaaaaaaaaaaaaaaaaaaaaaaaaaaaaaaaaaaaaaaaaaaaaaaaaaaaaaaaaaaaaaaaaaaaaaaaaaaaaaaaaa

SEQ ID NO: 19769 - RNA, 6113 nt, Artificial Sequence
  SARS-CoV-2__MT811713.1__non-structural protein 3 (NSP3) mRNA gc
aggagagucccgcagucggcguccagcggcucugcuuguucgugugugugucguugcaggccuuauucaagcuuaccauggcccccaccaaggugaccuucggcgacgacacggucaucgaggugcagggguacaagagcgugaacaucaccuucgagcuggacgagcgcaucgacaagguccucaacgagaagugcuccgccuacaccguggagcugggcaccgaggugaacgaguucgcgugcgucguggccgacgccgugaucaagacgcugcagccggucagcgagcuccugaccccccuggggaucgaccucgacgagugguccauggccaccuacuaccuguucgacgagagcggcgaguucaagcuggccucccacauguacugcagcuucuacccccccgacgaggacgaggaggagggggacugcgaggaggaggaguucgagccguccacccaguacgaguacggcacggaggacgacuaccagggcaagccccucgaguucggggcgaccagcgccgcccugcagcccgaggaggagcaggaggaggacuggcuggacgacgacucccagcagaccgugggccagcaggacgggagcgaggacaaccagaccacgaccauccagaccaucguggagguccagccccagcucgagauggagcugaccccgguggugcagacgaucgaggucaacuccuucagcggcuaccugaagcucaccgacaacguguacaucaagaacgccgacaucguggaggaggcgaagaaggucaagcccaccgugguggucaacgccgccaacguguaccugaagcacgggggcggcguggccggggcccugaacaaggcgaccaacaacgccaugcaggucgaguccgacgacuacaucgccacgaacggcccccucaagguggggggcagcugcguccuguccggccacaaccuggccaagcacugccuccacgugguggggcccaacgucaacaagggcgaggacauccagcugcugaagagcgccuacgagaacuucaaccagcacgaggugcuccuggcgccgcugcucuccgccgggaucuucggcgccgaccccauccacagccugcgggugugcgucgacaccgugcgcaccaacguguaccuggccgucuucgacaagaaccucuacgacaagcugguguccagcuuccuggagaugaagagcgagaagcagguggagcagaagaucgccgagauccccaaggaggaggucaagcccuucaucaccgaguccaagccgagcguggagcagcggaagcaggacgacaagaagaucaaggcgugcguggaggaggucacgaccacccucgaggagaccaaguuccugacggagaaccugcuccuguacaucgacaucaacgggaaccugcaccccgacuccgccacccucgugagcgacaucgacaucaccuuccugaagaaggacgcccccuacaucgugggcgacgucgugcaggagggcgugcugaccgccgucgugauccccacgaagaaggccgggggcaccaccgagaugcucgcgaaggcccugcgcaaggugccgaccgacaacuacaucacgaccuaccccgggcagggccugaacggguacaccgucgaggaggccaagaccgugcucaagaagugcaaguccgccuucuacauccugcccagcaucaucuccaacgagaagcaggagauccugggcaccgugagcuggaaccuccgggagaugcuggcgcacgccgaggagacgcgcaagcugaugcccgucugcguggagaccaaggccaucguguccaccauccagcggaaguacaagggcaucaagauccaggagggggucguggacuacggcgcccgcuucuacuucuacaccagcaagacgaccguggccucccugaucaacacccucaacgaccugaacgagacccuggucacgaugccgcucggguacgugacccacggccugaaccuggaggaggcggcccgguacaugcgcagccucaaggugcccgccaccgucuccgugagcucccccgacgccgugaccgccuacaacggguaccugacgagcuccagcaagacccccgaggagcacuucaucgagaccaucucccuggcgggcagcuacaaggacuggagcuacuccggccagagcacccagcucgggaucgaguuccugaagcggggcgacaaguccgucuacuacacgagcaacccgaccaccuuccaccuggacggggaggugaucaccuucgacaaccucaagacgcugcugucccuccgcgaggugcggaccaucaaggucuucaccaccguggacaacaucaaccugcacacgcagguggucgacaugagcaugaccuacggccagcaguucggccccaccuaccuggacggggccgacgugaccaagaucaagccccacaacucccacgagggcaagacguucuacgugcucccgaacgacgacacccugcgcgucgaggccuucgaguacuaccacaccaccgaccccagcuuccuggggcgguacauguccgcccucaaccacacgaagaaguggaaguacccccaggugaacggccugaccagcaucaagugggccgacaacaacugcuaccuggcgaccgcccuccugacccugcagcagaucgagcucaaguucaaccccccggcccugcaggacgccuacuaccgcgcgcgggccggggaggccgccaacuucugcgcccugauccucgcguacugcaacaagacggugggcgagcugggcgacguccgcgagaccauguccuaccuguuccagcacgccaaccucgacagcugcaagcgggugcugaacgucgugugcaagaccugcgggcagcagcagaccacccugaagggcguggaggccgucauguacauggggacgcucuccuacgagcaguucaagaagggcgugcagauccccugcaccugcgggaagcaggccaccaaguaccuggugcagcaggagagccccuucgucaugauguccgcccccccggcgcaguacgagcugaagcacggcaccuucacgugcgccagcgaguacaccggcaacuaccagugcgggcacuacaagcacaucaccuccaaggagacccucuacugcaucgacggcgcccugcugacgaagagcagcgaguacaaggggcccaucaccgacguguucuacaaggagaacuccuacaccaccacgaucaagcccgugaccuacaagcucgacggcgucgugugcaccgagaucgaccccaagcuggacaacuacuacaagaaggacaacagcuacuucaccgagcagccgaucgaccuggugcccaaccagcccuaccccaacgccuccuucgacaacuucaaguucgucugcgacaacaucaaguucgccgacgaccucaaccagcugacgggguacaagaagccggcgagccgcgagcugaaggugaccuucuuccccgaccucaacggcgacguggucgccaucgacuacaagcacuacacccccuccuucaagaagggcgccaagcugcugcacaagcccaucguguggcacgugaacaacgccaccaacaaggcgacguacaagccgaacaccuggugcauccggugccucuggagcaccaagcccgucgagaccuccaacagcuucgacgugcugaaguccgaggacgcccaggggauggacaaccuggccugcgaggaccucaagcccgugagcgaggaggucguggagaaccccacgauccagaaggacgugcuggagugcaacgucaagaccaccgagguggugggcgacaucauccugaagccggccaacaacucccucaagaucaccgaggaggucgggcacacggaccugauggccgcguacguggacaacagcucccugaccaucaagaagcccaacgagcucagccgcgugcugggccugaagacccucgccacccacgggcuggccgccgucaacuccgugcccugggacacgaucgccaacuacgcgaagccguuccugaacaagguggucagcaccaccaccaacaucgugacgcgcugccucaaccgggugugcaccaacuacaugcccuacuucuucacccugcugcuccagcugugcaccuucacccgcuccacgaacagccggaucaaggccuccaugcccaccaccaucgccaagaacaccgucaagagcgugggcaaguucugccuggaggccagcuucaacuaccucaagucccccaacuucagcaagcugaucaacaucaucaucugguuccugcuccuguccgugugccugggcagccucaucuacuccacggccgcgcuggggguccugaugagcaaccucggcaugccguccuacugcaccggguaccgcgagggcuaccugaacagcaccaacgugaccaucgccacguacugcaccggcuccauccccugcagcgugugccuguccgggcucgacagccuggacaccuaccccucccuggagaccauccagaucacgaucagcuccuucaagugggaccucaccgccuucggccuggucgccgagugguuccuggccuacauccucuucacccgguucuucuacgugcuggggcuggcggccaucaugcagcucuucuucagcuacuucgccgugcacuucaucuccaacagcuggcugauguggcugaucaucaaccugguccagauggcccccaucuccgcgauggugcgcauguacaucuucuucgccagcuucuacuacguguggaagagcuacguccacgugguggacggcugcaacuccagcaccugcaugaugugcuacaagcggaaccgcgccacgcgggucgagugcaccaccaucgugaacgggguccgccgguccuucuacguguacgccaacggcggcaagggguucugcaagcuccacaacuggaacugcgugaacugcgacaccuucugcgccggcagcacguucaucuccgacgaggucgcgcgcgaccugagccugcaguucaagcggccgaucaaccccaccgaccaguccagcuacaucguggacuccgugaccgucaagaacgggagcauccaccucuacuucgacaaggccggccagaagaccuacgagcgccacucccugagccacuucgugaaccuggacaaccuccgggccaacaacacgaaggggucccugcccaucaacgugaucgucuucgacggcaagagcaagugcgaggaguccagcgccaaguccgccagcguguacuacucccagcugaugugccagcccauccuccugcuggaccaggcgcucgugagcgacgucggcgacagcgccgagguggccgugaagauguucgacgccuacgucaacaccuucuccagcaccuucaacgugccgauggagaagcugaagacccugguggccacggcggaggccgagcucgccaacaacgucucccuggacaacgugcugagcaccuucaucuccgccgcgcgccagggguucguggacagcgacgucgagaccaaggacgugguggagugccucaagcugucccaccagagcgacaucgaggucaccggcgacuccugcaacaacuacaugcugacguacaacaagguggagaacaugaccccccgggaccucggggccugcaucgacugcagcgcccgccacaucaacgcccagguggccaagucccacaacaucgcgcugaucuggaacgucaaggacuucaugagccuguccgagcagcuccggaagcagauccgcagcgccgccaagaagaacaaccugcccuucaagcugaccugcgccaccacgcgccagguggugaacgucgugaccaccaagaucgcccucaagggcgggugaggacuagucccuguucccagagcccacuuuuuuuucuuuuuuugaaauaaaauagccugucuuucagaucucaaaggcucuuuucagagccaccaaaaaaaaaaaaaaaaaaaaaaaaaaaaaaaaaaaaaaaaaaaaaaaaaaaaaaaaaaaaaaaaaaaaaaaaaaaaaaaaaaaaaaaaaaaaaaaaaaaaa

SEQ ID NO: 19770 - RNA, 6113 nt, Artificial Sequence
  SARS-CoV-2__MT811720.1__non-structural protein 3 (NSP3) mRNA gc
aggagagucccgcagucggcguccagcggcucugcuuguucgugugugugucguugcaggccuuauucaagcuuaccauggcccccaccaaggugaccuucggcgacgacacggucaucgaggugcagggguacaagagcgugaacaucaccuucgagcuggacgagcgcaucgacaagguccucaacgagaagugcuccgccuacaccguggagcugggcaccgaggugaacgaguucgcgugcgucguggccgacgccaucaucaagacgcugcagccggugagcgagcuccugaccccccuggggaucgaccucgacgagugguccauggccaccuacuaccuguucgacgagagcggcgaguucaagcuggccucccacauguacugcagcuucuacccccccgacgaggacgaggaggagggggacugcgaggaggaggaguucgagccguccacccaguacgaguacggcacggaggacgacuaccagggcaagccccucgaguucggggcgaccagcgccgcccugcagcccgaggaggagcaggaggaggacuggcuggacgacgacucccagcagaccgucggccagcaggacgggagcgaggacaaccagaccacgaccauccagaccaucguggaggugcagccccagcucgagauggagcugaccccggucgugcagacgaucgaggugaacuccuucagcggcuaccugaagcucaccgacaacgucuacaucaagaacgccgacaucguggaggaggcgaagaaggugaagcccaccgucguggugaacgccgccaacgucuaccugaagcacgggggcggcguggccggggcccugaacaaggcgaccaacaacgccaugcagguggaguccgacgacuacaucgccacgaacggcccccucaaggucgggggcagcugcgugcuguccggccacaaccuggccaagcacugccuccacgucguggggcccaacgugaacaagggcgaggacauccagcugcugaagagcgccuacgagaacuucaaccagcacgagguccuccuggcgccgcugcucuccgccgggaucuucggcgccgaccccauccacagccugcgggugugcguggacaccguccgcaccaacguguaccuggccguguucgacaagaaccucuacgacaagcuggucuccagcuuccuggagaugaagagcgagaagcagguggagcagaagaucgccgagauccccaaggaggaggugaagcccuucaucaccgaguccaagccgagcgucgagcagcggaagcaggacgacaagaagaucaaggcgugcguggaggaggugacgaccacccucgaggagaccaaguuccugacggagaaccugcuccuguacaucgacaucaacgggaaccugcaccccgacuccgccacccucgucagcgacaucgacaucaccuuccugaagaaggacgcccccuacaucgugggcgacgugguccaggagggcgugcugaccgccguggucauccccacgaagaaggccgggggcaccaccgagaugcucgcgaaggcccugcgcaaggugccgaccgacaacuacaucacgaccuaccccgggcagggccugaacggguacaccguggaggaggccaagaccguccucaagaagugcaaguccgccuucuacauccugcccagcaucaucuccaacgagaagcaggagauccugggcaccgugagcuggaaccuccgggagaugcuggcgcacgccgaggagacgcgcaagcugaugcccgugugcgucgagaccaaggccaucguguccaccauccagcggaaguacaagggcaucaagauccaggaggggguggucgacuacggcgcccgcuucuacuucuacaccagcaagacgaccguggccucccugaucaacacccucaacgaccugaacgagacccuggugacgaugccgcucggguacgucacccacggccugaaccuggaggaggcggcccgguacaugcgcagccucaaggugcccgccaccguguccgucagcucccccgacgccgugaccgccuacaacggguaccugacgagcuccagcaagacccccgaggagcacuucaucgagaccaucucccuggcgggcagcuacaaggacuggagcuacuccggccagagcacccagcucgggaucgaguuccugaagcggggcgacaaguccguguacuacacgagcaacccgaccaccuuccaccuggacggggaggucaucaccuucgacaaccucaagacgcugcugucccuccgcgaggugcggaccaucaagguguucaccaccgucgacaacaucaaccugcacacgcaggugguggacaugagcaugaccuacggccagcaguucggccccaccuaccuggacggggccgacgucaccaagaucaagccccacaacucccacgagggcaagacguucuacgugcucccgaacgacgacacccugcgcguggaggccuucgaguacuaccacaccaccgaccccagcuuccuggggcgguacauguccgcccucaaccacacgaagaaguggaaguacccccaggucaacggccugaccagcaucaagugggccgacaacaacugcuaccuggcgaccgcccuccugacccugcagcagaucgagcucaaguucaaccccccggcccugcaggacgccuacuaccgcgcgcgggccggggaggccgccaacuucugcgcccugauccucgcguacugcaacaagacggugggcgagcugggcgacgugcgcgagaccauguccuaccuguuccagcacgccaaccucgacagcugcaagcggguccugaacguggucugcaagaccugcgggcagcagcagaccacccugaagggcguggaggccgugauguacauggggacgcucuccuacgagcaguucaagaagggcguccagauccccugcaccugcgggaagcaggccaccaaguaccuggugcagcaggagagccccuucgugaugauguccgcccccccggcgcaguacgagcugaagcacggcaccuucacgugcgccagcgaguacaccggcaacuaccagugcgggcacuacaagcacaucaccuccaaggagacccucuacugcaucgacggcgcccugcugacgaagagcagcgaguacaaggggcccaucaccgacgucuucuacaaggagaacuccuacaccaccacgaucaagcccgugaccuacaagcucgacggcguggucugcaccgagaucgaccccaagcuggacaacuacuacaagaaggacaacagcuacuucaccgagcagccgaucgaccuggugcccaaccagcccuaccccaacgccuccuucgacaacuucaaguucgugugcgacaacaucaaguucgccgacgaccucaaccagcugacgggguacaagaagccggcgagccgcgagcugaaggucaccuucuuccccgaccucaacggcgacgugguggccaucgacuacaagcacuacacccccuccuucaagaagggcgccaagcugcugcacaagcccaucgucuggcacgugaacaacgccaccaacaaggcgacguacaagccgaacaccuggugcauccggugccucuggagcaccaagcccguggagaccuccaacagcuucgacguccugaaguccgaggacgcccaggggauggacaaccuggccugcgaggaccucaagcccgugagcgaggagguggucgagaaccccacgauccagaaggacgugcuggagugcaacgugaagaccaccgaggucgugggcgacaucauccugaagccggccaacaacucccucaagaucaccgaggagguggggcacacggaccugauggccgcguacgucgacaacagcucccugaccaucaagaagcccaacgagcucagccgcgugcugggccugaagacccucgccacccacgggcuggccgccgugaacuccguccccugggacacgaucgccaacuacgcgaagccguuccugaacaagguggugagcaccaccaccaacaucgucacgcgcugccucaaccgggugugcaccaacuacaugcccuacuucuucacccugcugcuccagcugugcaccuucacccgcuccacgaacagccggaucaaggccuccaugcccaccaccaucgccaagaacaccgugaagagcgucggcaaguucugccuggaggccagcuucaacuaccucaagucccccaacuucagcaagcugaucaacaucaucaucugguuccugcuccuguccgugugccugggcagccucaucuacuccacggccgcgcugggggugcugaugagcaaccucggcaugccguccuacugcaccggguaccgcgagggcuaccugaacagcaccaacgucaccaucgccacguacugcaccggcuccauccccugcagcgugugccuguccgggcucgacagccuggacaccuaccccucccuggagaccauccagaucacgaucagcuccuucaagugggaccucaccgccuucggccugguggccgagugguuccuggccuacauccucuucacccgguucuucuacguccuggggcuggcggccaucaugcagcucuucuucagcuacuucgccgugcacuucaucuccaacagcuggcugauguggcugaucaucaaccuggugcagauggcccccaucuccgcgaugguccgcauguacaucuucuucgccagcuucuacuacguguggaagagcuacgugcacgucguggacggcugcaacuccagcaccugcaugaugugcuacaagcggaaccgcgccacgcggguggagugcaccaccaucgucaacggggugcgccgguccuucuacgucuacgccaacggcggcaagggguucugcaagcuccacaacuggaacugcgugaacugcgacaccuucugcgccggcagcacguucaucuccgacgagguggcgcgcgaccugagccugcaguucaagcggccgaucaaccccaccgaccaguccagcuacaucgucgacuccgugaccgugaagaacgggagcauccaccucuacuucgacaaggccggccagaagaccuacgagcgccacucccugagccacuucgucaaccuggacaaccuccgggccaacaacacgaaggggucccugcccaucaacgugaucguguucgacggcaagagcaagugcgaggaguccagcgccaaguccgccagcgucuacuacucccagcugaugugccagcccauccuccugcuggaccaggcgcucgugagcgacgugggcgacagcgccgaggucgccgugaagauguucgacgccuacgugaacaccuucuccagcaccuucaacgucccgauggagaagcugaagacccugguggccacggcggaggccgagcucgccaagaacgugucccuggacaacguccugagcaccuucaucuccgccgcgcgccagggguucguggacagcgacguggagaccaaggacgucguggagugccucaagcugucccaccagagcgacaucgaggugaccggcgacuccugcaacaacuacaugcugacguacaacaaggucgagaacaugaccccccgggaccucggggccugcaucgacugcagcgcccgccacaucaacgcccagguggccaagucccacaacaucgcgcugaucuggaacgugaaggacuucaugagccuguccgagcagcuccggaagcagauccgcagcgccgccaagaagaacaaccugcccuucaagcugaccugcgccaccacgcgccaggucgugaacguggucaccaccaagaucgcccucaagggcgggugaggacuagucccuguucccagagcccacuuuuuuuucuuuuuuugaaauaaaauagccugucuuucagaucucaaaggcucuuuucagagccaccaaaaaaaaaaaaaaaaaaaaaaaaaaaaaaaaaaaaaaaaaaaaaaaaaaaaaaaaaaaaaaaaaaaaaaaaaaaaaaaaaaaaaaaaaaaaaaaaaaaaa

SEQ ID NO: 19771 - RNA, 6113 nt, Artificial Sequence
  SARS-CoV-2__MT811723.1__non-structural protein 3 (NSP3) mRNA gc
aggagagucccgcagucggcguccagcggcucugcuuguucgugugugugucguugcaggccuuauucaagcuuaccauggcccccaccaaggugaccuucggcgacgacacggucaucgaggugcagggguacaagagcgugaacaucaccuucgagcuggacgagcgcaucgacaagguccucaacgagaagugcuccgccuacaccguggagcugggcaccgaggugaacgaguucgcgugcgucguggccgacgccgugaucaagacgcugcagccggucagcgagcuccugaccccccuggggaucgaccucgacgagugguccauggccaccuacuaccuguucgacgagagcggcgaguucaagcuggccucccacauguacugcagcuucuacccccccgacgaggacgaggaggagggggacugcgaggaggaggaguucgagccguccacccaguacgaguacggcacggaggacgacuaccagggcaagccccucgaguucggggcgaccagcgccgcccugcagcccgaggaggagcaggaggaggacuggcuggacgacgacucccagcaggccgugggccagcaggacgggagcgaggacaaccagaccaccacgauccagaccaucguggagguccagccccagcucgagauggagcugaccccgguggugcagaccaucgaggucaacuccuucagcggcuaccugaagcucacggacaacguguacaucaagaacgcggacaucguggaggaggccaagaaggucaagcccaccgugguggucaacgccgccaacguguaccugaagcacgggggcggcguggccggggcgcugaacaaggccaccaacaacgccaugcaggucgaguccgacgacuacaucgccaccaacggcccccucaagguggggggcagcugcguccuguccggccacaaccuggccaagcacugccuccacgugguggggcccaacgucaacaagggcgaggacauccagcugcugaagagcgcguacgagaacuucaaccagcacgaggugcuccuggccccgcugcucuccgccgggaucuucggcgccgaccccauccacagccugcgggugugcgucgacacggugcgcaccaacguguaccuggccgucuucgacaagaaccucuacgacaagcugguguccagcuuccuggagaugaagagcgagaagcagguggagcagaagaucgcggagauccccaaggaggaggucaagcccuucaucaccgaguccaagccgagcguggagcagcggaagcaggacgacaagaagaucaaggccugcguggaggaggucaccacgacccucgaggagaccaaguuccugaccgagaaccugcuccuguacaucgacaucaacgggaaccugcaccccgacuccgccacgcucgugagcgacaucgacaucaccuuccugaagaaggacgcccccuacaucgugggcgacgucgugcaggagggcgugcugaccgccgucgugauccccaccaagaaggcggggggcacgaccgagaugcucgccaaggcccugcgcaaggugccgaccgacaacuacaucaccacguaccccgggcagggccugaacggguacaccgucgaggaggccaagaccgugcucaagaagugcaaguccgcguucuacauccugcccagcaucaucuccaacgagaagcaggagauccugggcaccgugagcuggaaccuccgggagaugcuggcccacgccgaggagacccgcaagcugaugcccgucugcguggagacgaaggccaucguguccaccauccagcggaaguacaagggcaucaagauccaggagggggucguggacuacggcgcccgcuucuacuucuacaccagcaagaccacgguggcgucccugaucaacacccucaacgaccugaacgagacccuggucaccaugccgcucggguacgugacgcacggccugaaccuggaggaggccgcccgguacaugcgcagccucaaggugcccgccaccgucuccgugagcucccccgacgccgugaccgcguacaacggguaccugaccagcuccagcaagacgcccgaggagcacuucaucgagaccaucucccuggccggcagcuacaaggacuggagcuacuccggccagagcacccagcucgggaucgaguuccugaagcggggcgacaaguccgucuacuacaccagcaacccgacgaccuuccaccuggacggggaggugaucaccuucgacaaccucaagacccugcugucccuccgcgaggugcggacgaucaaggucuucaccaccguggacaacaucaaccugcacacccagguggucgacaugagcaugacguacggccagcaguucggccccaccuaccuggacggggccgacgugaccaagaucaagccccacaacucccacgagggcaagaccuucuacgugcucccgaacgacgacacgcugcgcgucgaggccuucgaguacuaccacaccaccgaccccagcuuccuggggcgguacauguccgcccucaaccacaccaagaaguggaaguacccccaggugaacggccugacgagcaucaagugggcggacaacaacugcuaccuggccaccgcccuccugacccugcagcagaucgagcucaaguucaaccccccggcccugcaggacgcguacuaccgcgcccgggccggggaggccgccaacuucugcgcgcugauccucgccuacugcaacaagaccgugggcgagcugggcgacguccgcgagacgauguccuaccuguuccagcacgccaaccucgacagcugcaagcgggugcugaacgucgugugcaagaccugcgggcagcagcagaccacccugaagggcguggaggccgucauguacauggggacccucuccuacgagcaguucaagaagggcgugcagauccccugcacgugcgggaagcaggccaccaaguaccuggugcagcaggagagccccuucgucaugauguccgcgcccccggcccaguacgagcugaagcacggcaccuucaccugcgccagcgaguacacgggcaacuaccagugcgggcacuacaagcacaucaccuccaaggagacccucuacugcaucgacggcgcccugcugaccaagagcagcgaguacaaggggcccaucacggacguguucuacaaggagaacuccuacaccaccaccaucaagcccgugacguacaagcucgacggcgucgugugcaccgagaucgaccccaagcuggacaacuacuacaagaaggacaacagcuacuucaccgagcagccgaucgaccuggugcccaaccagcccuaccccaacgccuccuucgacaacuucaaguucgucugcgacaacaucaaguucgcggacgaccucaaccagcugaccggguacaagaagccggccagccgcgagcugaaggugacguucuuccccgaccucaacggcgacguggucgccaucgacuacaagcacuacacccccuccuucaagaagggcgccaagcugcugcacaagcccaucguguggcacgugaacaacgcgaccaacaaggccaccuacaagccgaacacguggugcauccggugccucuggagcaccaagcccgucgagaccuccaacagcuucgacgugcugaaguccgaggacgcccaggggauggacaaccuggccugcgaggaccucaagcccgugagcgaggaggucguggagaaccccaccauccagaaggacgugcuggagugcaacgucaagacgaccgagguggugggcgacaucauccugaagccggccaacaacucccucaagaucaccgaggaggucgggcacaccgaccugauggcggccuacguggacaacagcucccugacgaucaagaagcccaacgagcucagccgcgugcugggccugaagacccucgccacccacgggcuggccgccgucaacuccgugcccugggacaccaucgcgaacuacgccaagccguuccugaacaagguggucagcacgaccaccaacaucgugacccgcugccucaaccgggugugcacgaacuacaugcccuacuucuucacccugcugcuccagcugugcaccuucacccgcuccaccaacagccggaucaaggccuccaugcccacgaccaucgccaagaacaccgucaagagcgugggcaaguucugccuggaggccagcuucaacuaccucaagucccccaacuucagcaagcugaucaacaucaucaucugguuccugcuccuguccgugugccugggcagccucaucuacuccaccgcggcccuggggguccugaugagcaaccucggcaugccguccuacugcacgggguaccgcgagggcuaccugaacagcaccaacgugaccaucgccaccuacugcacgggcuccauccccugcagcgugugccuguccgggcucgacagccuggacaccuaccccucccuggagaccauccagaucaccaucagcuccuucaagugggaccucacggccuucggccuggucgccgagugguuccuggcguacauccucuucacccgguucuucuacgugcuggggcuggccgccaucaugcagcucuucuucagcuacuucgccgugcacuucaucuccaacagcuggcugauguggcugaucaucaaccugguccagauggcgcccaucuccgccauggugcgcauguacaucuucuucgccagcuucuacuacguguggaagagcuacguccacgugguggacggcugcaacuccagcaccugcaugaugugcuacaagcggaaccgcgccacccgggucgagugcacgaccaucgugaacgggguccgccgguccuucuacguguacgccaacggcggcaagggguucugcaagcuccacaacuggaacugcgugaacugcgacaccuucugcgcgggcagcaccuucaucuccgacgaggucgcccgcgaccugagccugcaguucaagcggccgaucaaccccacggaccaguccagcuacaucguggacuccgugaccgucaagaacgggagcauccaccucuacuucgacaaggccggccagaagaccuacgagcgccacucccugagccacuucgugaaccuggacaaccuccgggccaacaacaccaaggggucccugcccaucaacgugaucgucuucgacggcaagagcaagugcgaggaguccagcgccaaguccgcgagcguguacuacucccagcugaugugccagcccauccuccugcuggaccaggcccucgugagcgacgucggcgacagcgccgagguggccgugaagauguucgacgccuacgucaacacguucuccagcaccuucaacgugccgauggagaagcugaagacccugguggcgaccgccgaggccgagcucgccaagaacgucucccuggacaacgugcugagcacguucaucuccgcggcccgccagggguucguggacagcgacgucgagaccaaggacgugguggagugccucaagcugucccaccagagcgacaucgaggucaccggcgacuccugcaacaacuacaugcugaccuacaacaagguggagaacaugacgccccgggaccucggggccugcaucgacugcagcgcccgccacaucaacgcccagguggcgaagucccacaacaucgcccugaucuggaacgucaaggacuucaugagccuguccgagcagcuccggaagcagauccgcagcgccgccaagaagaacaaccugcccuucaagcugaccugcgccaccacccgccagguggugaacgucgugacgaccaagaucgcgcucaagggcgggugaggacuagucccuguucccagagcccacuuuuuuuucuuuuuuugaaauaaaauagccugucuuucagaucucaaaggcucuuuucagagccaccaaaaaaaaaaaaaaaaaaaaaaaaaaaaaaaaaaaaaaaaaaaaaaaaaaaaaaaaaaaaaaaaaaaaaaaaaaaaaaaaaaaaaaaaaaaaaaaaaaaaa

SEQ ID NO: 19772 - RNA, 6113 nt, Artificial Sequence
  SARS-CoV-2__MT811727.1__non-structural protein 3 (NSP3) mRNA gc
aggagagucccgcagucggcguccagcggcucugcuuguucgugugugugucguugcaggccuuauucaagcuuaccauggcccccaccaaggugaccuucggcgacgacacggucaucgaggugcagggguacaagagcgugaacaucaccuucgagcuggacgagcgcaucgacaagguccucaacgagaagugcuccgccuacaccguggagcugggcaccgaggugaacgaguucgcgugcgucguggccgacgccgugaucaagacgcugcagccggucagcgagcuccugaccccccuggggaucgaccucgacgagugguccauggccaccuacuaccuguucgacgagagcggcgaguucaagcuggccucccacauguacugcagcuucuacccccccgacgaggacgaggaggagggggacugcgaggaggaggaguucgagccguccacccaguacgaguacggcacggaggacgacuaccagggcaagccccucgaguucggggcgaccagcgccgcccugcagcccgaggaggagcaggaggaggacuggcuggacgacgacucccagcagaccgugggccagcaggacgggagcgaggacaaccagaccacgaccauccagaccaucguggagguccagccccagcucgagauggagcugaccccgguggugcagacgaucgaggucaacuccuucagcggcuaccugaagcucaccgacaacguguacaucaagaacgccgacaucguggaggaggcgaagaaggucaagcccaccgugguggucaacgccgccaacguguaccugaagcacgggggcggcguggccggggcccugaacaaggcgaccaacaacgccaugcaggucgaguccgacgacuacaucgccacgaacggcccccucaagguggggggcagcugcguccuguccggccacaaccuggccaagcacugccuccacgugguggggcccaacgucaacaagggcgaggacauccagcugcugaagagcgccuacgagaacuucaaccagcacgaggugcuccuggcgccgcugcucuccgccgggaucuucggcgccgaccccauccacagccugcgggugugcgucgacaccgugcgcaccaacguguaccuggccgucuucgacaagaaccucuacgacaagcugguguccagcuuccuggagaugaagagcgagaagcagguggagcagaacaucgccgagauccccaaggaggaggucaagcccuucaucaccgaguccaagccgagcguggagcagcggaagcaggacgacaagaagaucaaggcgugcguggaggaggucacgaccacccucgaggagaccaaguuccugacggagaaccugcuccuguacaucgacaucaacgggaaccugcaccccgacuccgccacccucgugagcgacaucgacaucaccuuccugaagaaggacgcccccuacaucgugggcgacgucgugcaggagggcgugcugaccgccgucgugauccccacgaagaaggccgggggcaccaccgagaugcucgcgaaggcccugcgcaaggugccgaccgacaacuacaucacgaccuaccccgggcagggccugaacggguacaccgucgaggaggccaagaccgugcucaagaagugcaaguccgccuucuacauccugcccagcaucaucuccaacgagaagcaggagauccugggcaccgugagcuggaaccuccgggagaugcuggcgcacgccgaggagacgcgcaagcugaugcccgucugcguggagaccaaggccaucguguccaccauccagcggaaguacaagggcaucaagauccaggagggggucguggacuacggcgcccgcuucuacuucuacaccagcaagacgaccguggccucccugaucaacacccucaacgaccugaacgagacccuggucacgaugccgcucggguacgugacccacggccugaaccuggaggaggcggcccgguacaugcgcagccucaaggugcccgccaccgucuccgugagcucccccgacgccgugaccgccuacaacggguaccugacgagcuccagcaagacccccgaggagcacuucaucgagaccaucucccuggcgggcagcuacaaggacuggagcuacuccggccagagcacccagcucgggaucgaguuccugaagcggggcgacaaguccgucuacuacacgagcaacccgaccaccuuccaccuggacggggaggugaucaccuucgacaaccucaagacgcugcugucccuccgcgaggugcggaccaucaaggucuucaccaccguggacaacaucaaccugcacacgcagguggucgacaugagcaugaccuacggccagcaguucggccccaccuaccuggacggggccgacgugaccaagaucaagccccacaacucccacgagggcaagacguucuacgugcucccgaacgacgacacccugcgcgucgaggccuucgaguacuaccacaccaccgaccccagcuuccuggggcgguacauguccgcccucaaccacacgaagaaguggaaguacccccaggugaacggccugaccagcaucaagugggccgacaacaacugcuaccuggcgaccgcccuccugacccugcagcagaucgagcucaaguucaaccccccggcccugcaggacgccuacuaccgcgcgcgggccggggaggccgccaacuucugcgcccugauccucgcguacugcaacaagacggugggcgagcugggcgacguccgcgagaccauguccuaccuguuccagcacgccaaccucgacagcugcaagcgggugcugaacgucgugugcaagaccugcgggcagcagcagaccacccugaagggcguggaggccgucauguacauggggacgcucuccuacgagcaguucaagaagggcgugcagauccccugcaccugcgggaagcaggccaccaaguaccuggugcagcaggagagccccuucgucaugauguccgcccccccggcgcaguacgagcugaagcacggcaccuucacgugcgccagcgaguacaccggcaacuaccagugcgggcacuacaagcacaucaccuccaaggagacccucuacugcaucgacggcgcccugcugacgaagagcagcgaguacaaggggcccaucaccgacguguucuacaaggagaacuccuacaccaccacgaucaagcccgugaccuacaagcucgacggcgucgugugcaccgagaucgaccccaagcuggacaacuacuacaagaaggacaacagcuacuucaccgagcagccgaucgaccuggugcccaaccagcccuaccccaacgccuccuucgacaacuucaaguucgucugcgacaacaucaaguucgccgacgaccucaaccagcugacgggguacaagaagccggcgagccgcgagcugaaggugaccuucuuccccgaccucaacggcgacguggucgccaucgacuacaagcacuacacccccuccuucaagaagggcgccaagcugcugcacaagcccaucguguggcacgugaacaacgccaccaacaaggcgacguacaagccgaacaccuggugcauccggugccucuggagcaccaagcccgucgagaccuccaacagcuucgacgugcugaaguccgaggacgcccaggggauggacaaccuggugugcgaggaccucaagcccgucagcgaggaggugguggagaaccccacgauccagaaggacguccuggagugcaacgugaagaccaccgagguggucggcgacaucauccugaagccggccaacaacucccucaagaucaccgaggagguggggcacacggaccugauggccgccuacguggacaacagcucccugaccaucaagaagcccaacgagcucagccgcguccugggccugaagacccucgcgacccacgggcuggccgccgugaacuccgugcccugggacacgaucgccaacuacgccaagccguuccugaacaaggucgugagcaccaccaccaacaucgugacgcgcugccucaaccgggucugcaccaacuacaugcccuacuucuucacccugcugcuccagcugugcaccuucacccgcuccacgaacagccggaucaaggcguccaugcccaccaccaucgccaagaacaccgugaagagcgugggcaaguucugccuggaggccagcuucaacuaccucaagucccccaacuucagcaagcugaucaacaucaucaucugguuccugcuccuguccgucugccugggcagccucaucuacuccacggccgcccugggggugcugaugagcaaccucggcaugccguccuacugcaccggguaccgcgagggcuaccugaacagcaccaacgugaccaucgcgacguacugcaccggcuccauccccugcagcgucugccuguccgggcucgacagccuggacaccuaccccucccuggagaccauccagaucacgaucagcuccuucaagugggaccucaccgccuucggccugguggccgagugguuccuggccuacauccucuucacccgguucuucuacgugcuggggcuggccgcgaucaugcagcucuucuucagcuacuucgccguccacuucaucuccaacagcuggcugauguggcugaucaucaaccuggugcagauggcccccaucuccgccauggugcgcauguacaucuucuucgcgagcuucuacuacgucuggaagagcuacgugcacguggucgacggcugcaacuccagcaccugcaugaugugcuacaagcggaaccgcgccacgcggguggagugcaccaccaucgucaacggggugcgccgguccuucuacguguacgccaacggcggcaagggguucugcaagcuccacaacuggaacugcgucaacugcgacaccuucugcgccggcagcacguucaucuccgacgagguggcccgcgaccugagccugcaguucaagcggccgaucaaccccaccgaccaguccagcuacaucguggacuccgucaccgugaagaacgggagcauccaccucuacuucgacaaggcgggccagaagaccuacgagcgccacucccugagccacuucgugaaccuggacaaccuccgggccaacaacacgaaggggucccugcccaucaacgucaucguguucgacggcaagagcaagugcgaggaguccagcgccaaguccgccagcguguacuacucccagcugaugugccagcccauccuccugcuggaccaggcccucgucagcgacgugggcgacagcgcggagguggccgucaagauguucgacgccuacgugaacaccuucuccagcaccuucaacgugccgauggagaagcugaagacccuggucgccacggccgaggcggagcucgccaagaacgugucccuggacaacgugcugagcaccuucaucuccgccgcccgccagggguucgucgacagcgacguggagaccaaggacguggucgagugccucaagcugucccaccagagcgacaucgaggugaccggcgacuccugcaacaacuacaugcugacguacaacaagguggagaacaugaccccccgggaccucggggcgugcaucgacugcagcgcccgccacaucaacgcccaggucgccaagucccacaacaucgcccugaucuggaacgugaaggacuucaugagccuguccgagcagcuccggaagcagauccgcagcgcggccaagaagaacaaccugcccuucaagcugaccugcgccaccacgcgccagguggucaacguggugaccaccaagaucgcccucaagggcgggugaggacuagucccuguucccagagcccacuuuuuuuucuuuuuuugaaauaaaauagccugucuuucagaucucaaaggcucuuuucagagccaccaaaaaaaaaaaaaaaaaaaaaaaaaaaaaaaaaaaaaaaaaaaaaaaaaaaaaaaaaaaaaaaaaaaaaaaaaaaaaaaaaaaaaaaaaaaaaaaaaaaaa

SEQ ID NO: 19773 - RNA, 6113 nt, Artificial Sequence
  SARS-CoV-2__MT811731.1__non-structural protein 3 (NSP3) mRNA gc
aggagagucccgcagucggcguccagcggcucugcuuguucgugugugugucguugcaggccuuauucaagcuuaccauggcccccaccaaggugaccuucggcgacgacacggucaucgaggugcagggguacaagagcgugaacaucaccuucgagcuggacgagcgcaucgacaagguccucaacgagaagugcuccgccuacaccguggagcugggcaccgaggugaacgaguucgcgugcgucguggccgacgccgugaucaagacgcugcagccggucagcgagcuccugaccccccuggggaucgaccucgacgagugguccauggccaccuacuaccuguucgacgagagcggcgaguucaagcuggccucccacauguacugcagcuucuacccccccgacgaggacgaggaggagggggacugcgaggaggaggaguucgagccguccacccaguacgaguacggcacggaggacgacuaccagggcaagccccucgaguucggggcgaccagcgccgcccugcagcccgaggaggagcaggaggaggacuggcuggacgacgacucccagcagaccgugggccagcaggacgggagcgaggacaaccagaccacgaccauccagaccaucguggagguccagccccagcucgagauggagcugaccccgguggugcagacgaucgaggucaacuccuucagcggcuaccugaagcucaccgacaacguguacaucaagaacgccgacaucguggaggaggcgaagaaggucaagcccaccgugguggucaacgccgccaacguguaccugaagcacgggggcggcguggccggggcccugaacaaggcgaccaacaacgccaugcaggucgaguccgacgacuacaucgccacgaacggcccccucaagguggggggcagcugcguccuguccggccacaaccuggccaagcacugccuccacgugguggggcccaacgucaacaagggcgaggacauccagcugcugaagagcgccuacgagaacuucaaccagcacgaggugcuccuggcgccgcugcucuccgccgggaucuucggcgccgaccccauccacagccugcgggugugcgucgacaccgugcgcaccaacguguaccuggccgucuucgacaagaaccucuacgacaagcugguguccagcuuccuggagaugaagagcgagaagcagguggagcagaagaucgccgagauccccaaggaggaggucaagcccuucaucaccgaguccaagccgagcguggagcagcggaagcaggacgacaagaagaucaaggcgugcguggaggaggucacgaccacccucgaggagaccaaguuccugacggagaaccugcuccuguacaucgacaucaacgggaaccugcaccccgacuccgccacccucgugagcgacaucgacaucaccuuccugaagaaggacgcccccuacaucgugggcgacgucgugcaggagggcgugcugaccgccgucgugauccccacgaagaaggccgggggcaccaccgagaugcucgcgaaggcccugcgcaaggugccgaccgacaacuacaucacgaccuaccccgggcagggccugaacggguacaccgucgaggaggccaagaccgugcucaagaagugcaaguccgccuucuacauccugcccagcaucaucuccaacgagaagcaggagauccugggcaccgugagcuggaaccuccgggagaugcuggcgcacgccgaggagacgcgcaagcugaugcccgucugcguggagaccaaggccaucguguccaccauccagcggaaguacaagggcaucaagauccaggagggggucguggacuacggcgcccgcuucuacuucuacaccagcaagacgaccguggccucccugaucaacacccucaacgaccugaacgagacccuggucacgaugccgcucggguacgugacccacggccugaaccuggaggaggcggcccgguacaugcgcagccucaaggugcccgccaccgucuccgugagcucccccgacgccgugaccgccuacaacggguaccugacgagcuccagcaagacccccgaggagcacuucaucgagaccaucucccuggcgggcagcuacaaggacuggagcuacuccggccagagcacccagcucgggaucgaguuccugaagcggggcgacaaguccgucuacuacacgagcaacccgaccaccuuccaccuggacggggaggugaucaccuucgacaaccucaagacguuccugucccugcgcgaggugcggaccaucaaggucuucaccaccguggacaacaucaaccuccacacgcagguggucgacaugagcaugaccuacggccagcaguucggccccaccuaccuggacggggccgacgugaccaagaucaagccccacaacucccacgagggcaagacguucuacgugcugccgaacgacgacacccuccgcgucgaggccuucgaguacuaccacaccaccgaccccagcuuccuggggcgguacauguccgcccugaaccacacgaagaaguggaaguacccccaggugaacggccucaccagcaucaagugggccgacaacaacugcuaccuggcgaccgcccugcucacccugcagcagaucgagcugaaguucaaccccccggcccuccaggacgccuacuaccgcgcgcgggccggggaggccgccaacuucugcgcccugauccuggcguacugcaacaagacggugggcgagcucggcgacguccgcgagaccauguccuaccuguuccagcacgccaaccuggacagcugcaagcgggugcucaacgucgugugcaagaccugcgggcagcagcagaccacccugaagggcguggaggccgucauguacauggggacgcuguccuacgagcaguucaagaagggcgugcagauccccugcaccugcgggaagcaggccaccaaguaccucgugcagcaggagagccccuucgucaugauguccgcccccccggcgcaguacgagcugaagcacggcaccuucacgugcgccagcgaguacaccggcaacuaccagugcgggcacuacaagcacaucaccuccaaggagacccuguacugcaucgacggcgcccuccugacgaagagcagcgaguacaaggggcccaucaccgacguguucuacaaggagaacuccuacaccaccacgaucaagcccgugaccuacaagcuggacggcgucgugugcaccgagaucgaccccaagcucgacaacuacuacaagaaggacaacagcuacuucaccgagcagccgaucgaccuggugcccaaccagcccuaccccaacgccuccuucgacaacuucaaguucgucugcgacaacaucaaguucgccgacgaccugaaccagcucacgggguacaagaagccggcgagccgcgagcugaaggugaccuucuuccccgaccugaacggcgacguggucgccaucgacuacaagcacuacacccccuccuucaagaagggcgccaagcuccugcacaagcccaucguguggcacgugaacaacgccaccaacaaggcgacguacaagccgaacaccuggugcauccggugccuguggagcaccaagcccgucgagaccuccaacagcuucgacgugcucaaguccgaggacgcccaggggauggacaaccuggccugcgaggaccugaagcccgugagcgaggaggucguggagaaccccacgauccagaaggacgugcucgagugcaacgucaagaccaccgagguggugggcgacaucauccugaagccggccaacaacucccugaagaucaccgaggaggucgggcacacggaccucauggccgcguacguggacaacagcucccugaccaucaagaagcccaacgagcugagccgcgugcucggccugaagacccuggccacccacgggcucgccgccgucaacuccgugcccugggacacgaucgccaacuacgcgaagccguuccugaacaagguggucagcaccaccaccaacaucgugacgcgcugccugaaccgggugugcaccaacuacaugcccuacuucuucacccuccugcugcagcucugcaccuucacccgcuccacgaacagccggaucaaggccuccaugcccaccaccaucgccaagaacaccgucaagagcgugggcaaguucugccuggaggccagcuucaacuaccugaagucccccaacuucagcaagcucaucaacaucaucaucugguuccugcugcucuccgugugccugggcagccugaucuacuccacggccgcgcucgggguccugaugagcaaccugggcaugccguccuacugcaccggguaccgcgagggcuaccucaacagcaccaacgugaccaucgccacguacugcaccggcuccauccccugcagcgugugccuguccgggcuggacagccucgacaccuaccccucccuggagaccauccagaucacgaucagcuccuucaagugggaccugaccgccuucggccucgucgccgagugguuccuggccuacauccuguucacccgguucuucuacgugcucgggcuggcggccaucaugcagcuguucuucagcuacuucgccgugcacuucaucuccaacagcuggcucauguggcugaucaucaaccugguccagauggcccccaucuccgcgauggugcgcauguacaucuucuucgccagcuucuacuacguguggaagagcuacguccacgugguggacggcugcaacuccagcaccugcaugaugugcuacaagcggaaccgcgccacgcgggucgagugcaccaccaucgugaacgggguccgccgguccuucuacguguacgccaacggcggcaagggguucugcaagcugcacaacuggaacugcgugaacugcgacaccuucugcgccggcagcacguucaucuccgacgaggucgcgcgcgaccucagccugcaguucaagcggccgaucaaccccaccgaccaguccagcuacaucguggacuccgugaccgucaagaacgggagcauccaccuguacuucgacaaggccggccagaagaccuacgagcgccacucccucagccacuucgugaaccuggacaaccugcgggccaacaacacgaaggggucccuccccaucaacgugaucgucuucgacggcaagagcaagugcgaggaguccagcgccaaguccgccagcguguacuacucccagcugaugugccagcccauccugcuccuggaccaggcgcuggugagcgacgucggcgacagcgccgagguggccgugaagauguucgacgccuacgucaacaccuucuccagcaccuucaacgugccgauggagaagcucaagacccugguggccacggcggaggccgagcuggccaagaacgucucccucgacaacgugcugagcaccuucaucuccgccgcgcgccagggguucguggacagcgacgucgagaccaaggacgugguggagugccugaagcucucccaccagagcgacaucgaggucaccggcgacuccugcaacaacuacaugcugacguacaacaagguggagaacaugaccccccgggaccugggggccugcaucgacugcagcgcccgccacaucaacgcccagguggccaagucccacaacaucgcgcucaucuggaacgucaaggacuucaugagccuguccgagcagcugcggaagcagauccgcagcgccgccaagaagaacaaccuccccuucaagcugaccugcgccaccacgcgccagguggugaacgucgugaccaccaagaucgcccugaagggcgggugaggacuagucccuguucccagagcccacuuuuuuuucuuuuuuugaaauaaaauagccugucuuucagaucucaaaggcucuuuucagagccaccaaaaaaaaaaaaaaaaaaaaaaaaaaaaaaaaaaaaaaaaaaaaaaaaaaaaaaaaaaaaaaaaaaaaaaaaaaaaaaaaaaaaaaaaaaaaaaaaaaaaa

SEQ ID NO: 19774 - RNA, 6113 nt, Artificial Sequence
  SARS-CoV-2__MT811755.1__non-structural protein 3 (NSP3) mRNA gc
aggagagucccgcagucggcguccagcggcucugcuuguucgugugugugucguugcaggccuuauucaagcuuaccauggcccccaccaaggugaccuucggcgacgacacggucaucgaggugcagggguacaagagcgugaacaucaccuucgagcuggacgagcgcaucgacaagguccucaacgagaagugcuccgccuacaccguggagcugggcaccgaggugaacgaguucgcgugcgucguggccgacgccgugaucaagacgcugcagccggucagcgagcuccugaccccccuggggaucgaccucgacgagugguccauggccaccuacuaccuguucgacgagagcggcgaguucaagcuggccucccacauguacugcagcuucuacccccccgacgaggacgaggaggagggggacugcgaggaggaggaguucgagccguccacccaguacgaguacggcacggaggacgacuaccagggcaagccccucgaguucggggcgaccagcgccgcccugcagcccgaggaggagcaggaggaggacuggcuggacgacgacucccagcagaccgugggccagcaggacgggagcgaggacaaccagaccacgaccauccagaccaucguggagguccagccccagcucgagauggagcugaccccgguggugcagacgaucgaggucaacuccuucagcggcuaccugaagcucaccgacaacguguacaucaagaacgccgacaucguggaggaggcgaagaaggucaagcccaccgugguggucaacgccgccaacguguaccugaagcacgggggcggcguggccggggcccugaacaaggcgaccaacaacgccaugcaggucgaguccgacgacuacaucgccacgaacggcccccucaagguggggggcagcugcguccuguccggccacaaccuggccaagcacugccuccacgugguggggcccaacgucaacaagggcgaggacauccagcugcugaagagcgccuacgagaacuucaaccagcacgaggugcuccuggcgccgcugcucuccgccgggaucuucggcgccgaccccauccacagccugcgggugugcgucgacaccgugcgcaccaacguguaccuggccgucuucgacaagaaccucuacgacaagcugguguccagcuuccuggagaugaagagcgagaagcagguggagcagaagaucgccgagauccccaaggaggaggucaagcccuucaucaccgaguccaagccgagcguggagcagcggaagcaggacgacaagaagaucaaggcgugcguggaggaggucacgaccacccucgaggagaccaaguuccugacggagaaccugcuccuguacaucgacaucaacgggaaccugcaccccgacuccgccacccucgugagcgacaucgacaucaccuuccugaagaaggacgcccccuacaucgugggcgacgucgugcaggagggcgugcugaccgccgucgugauccccacgaagaaggccgggggcaccaccgagaugcucgcgaaggcccugcgcaaggugccgaccgacaacuacaucacgaccuaccccgggcagggccugaacggguacaccgucgaggaggccaagaccgugcucaagaagugcaaguccgccuucuacauccugcccagcaucaucuccaacgagaagcaggagauccugggcaccgugagcuggaaccuccgggagaugcuggcgcacgccgaggagacgcgcaagcugaugcccgucugcguggagaccaaggccaucguguccaccauccagcggaaguacaagggcaucaagauccaggagggggucguggacuacggcgcccgcuucuacuucuacaccagcaagacgaccguggccucccugaucaacacccucaacgaccugaacgagacccuggucacgaugccgcucggguacgugacccacggccugaaccuggaggaggcggcccgguacaugcgcagccucaaggugcccgccaccgucuccgugagcucccccgacgccgugaccgccuacaacggguaccugacgagcuccagcaagacccccgaggagcacuucaucgagaccaucucccuggcgggcagcuacaaggacuggagcuacuccggccagagcacccagcucgggaucgaguuccugaagcggggcgacaaguccgucuacuacacgagcaacccgaccaccuuccaccuggacggggaggugaucaccuucgacaaccucaagacgcugcugucccuccgcgaggugcggaccaucaaggucuucaccaccguggacaacaucaaccugcacacgcagguggucgacaugagcaugaccuacggccagcaguucggccccaccuaccuggacggggccgacgugaccaagaucaagccccacaacucccacgagggcaagacguucuacgugcucccgaacgacgacacccugcgcgucgaggccuucgaguacuaccacaccaccgaccccagcuuccuggggcgguacauguccgcccucaaccacacgaagaaguggaaguacccccaggugaacggccugaccagcaucaagugggccgacaacaacugcuaccuggcgaccgcccuccugacccugcagcagaucgagcucaaguucaaccccccggcccugcaggacgccuacuaccgcgcgcgggccggggaggccgccaacuucugcgcccugauccucgcguacugcaacaagacggugggcgagcugggcgacguccgcgagaccauguccuaccuguuccagcacgccaaccucgacagcugcaagcgggugcugaacgucgugugcaagaccugcgggcagcagcagaccacccugaagggcguggaggccgucauguacauggggacgcucuccuacgagcaguucaagaagggcgugcagauccccugcaccugcgggaagcaggccaccaaguaccuggugcagcaggagagccccuucgucaugauguccgcccccccggcgcaguacgagcugaagcacggcaccuucacgugcgccagcgaguacaccggcaacuaccagugcgggcacuacaagcacaucaccuccaaggagacccucuacugcaucgacggcgcccugcugacgaagagcagcgaguacaaggggcccaucaccgacguguucuacaaggagaacuccuacaccaccacgaucaagcccgugaccuacaagcucgacggcgucgugugcaccgagaucgaccccaagcuggacaacuacuacaagaaggacaacagcuacuucaccgagcagccgaucgaccuggugcccaaccagcccuaccccaacgccuccuucgacaacuucaaguucgucugcgacaacaucaaguucgccgacgaccucaaccagcugacgggguacaagaagccggcgagccgcgagcugaaggugaccuucuuccccgaccucaacggcgacguggucgccaucgacuacaagcacuacacccccuccuucaagaagggcgccaagcugcugcacaagcccaucguguggcacgugaacaacgccaccaacaaggcgacguacaagccgaacaccuggugcauccggugccucuggagcaccaagcccgucgagaccuccaacagcuucgacgugcugaaguccgaggacgcccaggggauggacaaccuggccugcgaggaccucaagcccgugagcgaggaggucguggagaaccccacgauccagaaggacgugcuggagugcaacgucaagaccaccgagguggugggcgacaucauccugaagccggccaacaacucccucaagaucaccgaggaggucgggcacacggaccugauggccgcguacguggacaacagcucccugaccaucaagaagcccaacgagcucagccgcgugcugggccugaagacccucgccacccacgggcuggccgccgucaacuccgugcccugggacacgaucgccaacuacgcgaagccguuccugaacaagguggucagcaccaccaccaacaucgugacgcgcugccucaaccgggugugcaccaacuacaugcccuacuucuucacccugcugcuccagcugugcaccuucacccgcuccacgaacagccggaucaaggccuccaugcccaccaccaucgccaagaacaccgucaagagcgugggcaaguucugccuggaggccagcuucaacuaccucaagucccccaacuucagcaagcugaucaacaucaucaucugguuccugcuccuguccgugugccugggcagccucaucuacuccacggccgcgcuggggguccugaugagcaaccucggcaugccguccuacugcaccggguaccgcgagggcuaccugaacagcaccaacgugaccaucgccacguacugcaccggcuccauccccugcagcgugugccuguccgggcucgacagccuggacaccuaccccucccuggagaccauccagaucacgaucagcuccuucaagugggaccucaccgccuucggccuggucgccgagugguuccuggccuacauccucuucacccgguucuucuacgugcuggggcuggcggccaucaugcagcucuucuucagcuacuucgccgugcacuucaucuccaacagcuggcugauguggcugaucaucaaccugguccagauggcccccaucuccgcgauggugcgcauguacaucuucuucgccagcuucuacuacguguggaagagcuacguccacgugguggacggcugcaacaccuccacgugcaugaugugcuacaagcggaaccgcgccacccgggucgagugcaccaccaucgugaacgggguccgccggagcuucuacguguacgccaacggcggcaagggguucugcaagcuccacaacuggaacugcgugaacugcgacacguucugcgccggcuccaccuucaucagcgacgaggucgcgcgcgaccugucccugcaguucaagcggccgaucaaccccaccgaccagagcuccuacaucguggacagcgugaccgucaagaacggguccauccaccucuacuucgacaaggccggccagaagacguacgagcgccacagccugucccacuucgugaaccuggacaaccuccgggccaacaacaccaaggggagccugcccaucaacgugaucgucuucgacggcaaguccaagugcgaggagagcuccgccaagagcgccuccguguacuacagccagcugaugugccagcccauccuccugcuggaccaggcgcucguguccgacgucggcgacagcgccgagguggccgugaagauguucgacgccuacgucaacaccuucagcuccaccuucaacgugccgauggagaagcugaagacgcugguggccaccgcggaggccgagcucgccaagaacgucagccuggacaacgugcuguccaccuucaucagcgccgcgcgccagggguucguggacuccgacgucgagaccaaggacgugguggagugccucaagcugagccaccaguccgacaucgaggucacgggcgacagcugcaacaacuacaugcugaccuacaacaagguggagaacaugaccccccgggaccucggggccugcaucgacugcuccgcccgccacaucaacgcccagguggccaagagccacaacaucgcgcugaucuggaacgucaaggacuucaugucccugagcgagcagcuccggaagcagauccgcuccgccgccaagaagaacaaccugcccuucaagcugaccugcgccacgacccgccagguggugaacgucgugaccaccaagaucgcccucaagggcgggugaggacuagucccuguucccagagcccacuuuuuuuucuuuuuuugaaauaaaauagccugucuuucagaucucaaaggcucuuuucagagccaccaaaaaaaaaaaaaaaaaaaaaaaaaaaaaaaaaaaaaaaaaaaaaaaaaaaaaaaaaaaaaaaaaaaaaaaaaaaaaaaaaaaaaaaaaaaaaaaaaaaaa
